United States Patent Application Publication US 2017/0114356 A1 - sequence listing, part 118

SEQ ID NO: 217623 - DNA, 1799 bp, Zea Mays
gacgacccttgcggatcggccggctctgcatctcgtcgactttgtaacaggatcgctgcacgtacggcattcggcatcacgatctcgtgaaagatcgtgaggcattctcctgaagttattaggctcagttggactgtgaacagatgtcgagcaagtctgacaacggaaccaatgagcagttggtggacgaatattatgaccaagacgaggacgacctaggtgacttcattgtgtatagcgacgacgacgatgagtcgttgaagcacaagcagcaccagcaggagatggaggatgagcaacagcaggaggatgagatggaacagcagcagcaggaggatgagatggaagaggaaatcgaagaggaggtagaggttgaggaagaagaggaggcaccagttgggcagcaagagatcctcagcctgagggagcagttaaaggaggaaatcagaaggaagaacgcggcaatggtccccagcgctcacaaacctgatttatcgtcaccatccaagaaccagacgatgccaaccgtcaatgacggatacggcaccttctttgggccatcaaagccagtgcttgctcgccgagtcatcgaagaagggtgttcatcatcgatgatgaaagatctacagaatataccgtcgtccaaaagagatgtttccttggcttcgaagatgcgaccaggtgcggttcagaatgtgcagaaacaaaagtttgttagcgaggagaaaagaaaggccgacacactccgaaagaatcgagattactcgtgtctgttctcagatgatgctgatactcacccccctactgaagaggctcaagatggtgggccggtgaatgccaggaaaggcacagctcaacctgccacattatctctcggaaagaaggctcatgcagaaagaaaaggcactatagcttctggtagaaacagcctgcctaataacttgaagaagaaatctccaggtttgctatcatcctcgaaaagccaagagctgcagccgtcactccataacaagaggctgcaggcatcgattcctggccagaaactgcggcagcaatcgcagagtcatcagaggccgcaaggcaatggacgtcagccaccgttgcaaggtcgacgtctacaaggtcagctcattggtcagaacagatcggctgcgcaaaacgcgagattgaaatcagcacaaaaacagctcatccattcctcagaattcaaggcctctcgtggagtagaaaagtatacagtaaaaagaaggaaatccagtgatgacagacaaataatgcatagcgacgatgaagacgagagtgacatggaagctgattttgctagcatacaaagggaagaaagaagaagcgcggcacttgcaaggagagaggacgaggagcagctccggttgatcaaggaggaagagaggcgcgagcgcgcgaacaagagaaaaagagcagcacaaaaggagagtaggagttagttagaagctgccagttcttaaaatcatgtattctaagatgtggccaaaggttaagttatattgatatggtagtctatcatgtagtttattgacttattcccagtggaagaaaatctacctatatgtagctacgtgatgccaacatgtacggactaggccagacctagttggccaactactcagaacaaatatatgaagagtctataatagaaaaaaaaatggatccatcatacaaatagagagggtgctcgagtttgttcacacctctcactctccgatccatttgtcttctttcatattttagccttccattctttgttttaatattgatcctag

SEQ ID NO: 217624 - DNA, 2226 bp, Zea Mays
gtttgcgccgcgcccgtgccgtgccttccgcgggcgtcgctgctcgtgatcgcgacgcgagggctttgtttgtggtatgatccccgcacgcgcgtctccagcagcccccgcgcaacgggccgggggcggacagggggatcgaccaggcggatcgatccgcttatagctccggccgcgggcaggggagaaacggagatgagaggggccgcgcgagaggatgcccgcccacgcgcgcgtggaagacgctgcctcctatatataccaggagggctcgcgcatccgcccaggcgcgcacccttcgttttccccagatcgacgaacaacggaccaagtcagggcgggctgcctccgattcgtctcgtcgcgagtcgacgacgacccttgcggatcggccggctctgcatctcgtcgactttgtaacaggatcgctgcacgtacggcattcggcatcacgatctcgtgaaagatcgtgaggcattctcctgaagttattaggctcagttggactgtgaacagatgtcgagcaagtctgacaacggaaccaatttggtggacgaatattatgaccaagacgaggacgacctaggtgacttcattgtgtatagcgacgacgacgatgagtcgttgaagcacaagcagcaccagcaggagatggaggatgagcaacagcaggaggatgagatggaacagcagcagcaggaggatgagatggaagaggaaatcgaagaggaggtagaggttgaggaagaagaggaggcaccagttgggcagcaagagatcctcagcctgagggagcagttaaaggaggaaatcagaaggaagaacgcggcaatggtccccagcgctcacaaacctgatttatcgtcaccatccaagaaccagacgatgccaaccgtcaatgacggatacggcaccttctttgggccatcaaagccagtgcttgctcgccgagtcatcgaagaagggtgttcatcatcgatgatgaaagatctacagaatataccgtcgtccaaaagagatgtttccttggcttcgaagatgcgaccaggtgcggttcagaatgtgcagaaacaaaagtttgttagcgaggagaaaagaaaggccgacacactccgaaagaatcgagattactcgtgtctgttctcagatgatgctgatactcacccccctactgaaggtcatcctagtagtagggcctctcttgctctcaaatctgaggctcaagatggtgggccggtgaatgccaggaaaggcacagctcaacctgccacattatctctcggaaagaaggctcatgcagaaagaaaaggcactatagcttctggtagaaacagcctgcctaataacttgaagaagaaatctccaggtttgctatcatcctcgaaaagccaagagctgcagccgtcactccataacaagaggctgcaggcatcgattcctggccagaaactgcggcagcaatcgcagagtcatcagaggccgcaaggcaatggacgtcagccaccgttgcaaggtcgacgtctacaaggtcagctcattggtcagaacagatcggctgcgcaaaacgcgagattgaaatcagcacaaaaacagctcatccattcctcagaattcaaggcctctcgtggagtagaaaagtatacagtaaaaagaaggaaatccagtgatgacagacaaataatgcatagctatcacaaatttgctggcagcgacgatgaagacgagagtgacatggaagctgattttgctagcatacaaagggaagaaagaagaagcgcggcacttgcaaggagagaggacgaggagcagctccggttgatcaaggaggaagagaggcgcgagcgcgcgaacaagagaaaaagagcagcacaaaaggagagtaggagttagttagaagctgccagttcttaaaatcatgtattctaagatgtggccaaaggttaagttatattgatatggtagtctatcatgtagtttattgacttattcccagtggaagaaaatctacctatatgtagctacgtgatgccaacatgtacggactaggccagacctagttggccaactactcagaacaaatatatgaagagtctataatagaaaaaaaaatggatccatcatacaaatagagagggtgctcgagtttgttcacacctctcactctccgatccatttgtcttctttcatattttagccttccattctttgttttaatattgatcctag

SEQ ID NO: 217625 - DNA, 580 bp, Zea Mays
gaccggccaggcggccaccccatcgatccatcgcgaggccaaacccagccatggcctcgtcctcccgcacggccgacgtcgccgccagcagggtgctgtccgagaagggggcggccgcaatggcggagtgcgtcggcctgcttttcgggaagtggacggcgctgcagctggcggtgcagaaccagtggggcggccacgactcgcaggctaaggccgaccggctcgcctcctccgtcctctcctggttcacccgcgccgccgccgccagaggcgcgggcgcactcgacccggacgagctggaggatttgctgtacgtcaccatggacgagtccttcaacgccgacatagatgacgggggcgtcgaggagggtggtgcagtttcactaaaagaagctgcaattcctgccccacgttgatcagctcccaagaactcgagttaccaagaacctgatgatcatgtacacacgctgtctgcggcaggactattcgtacacggataagctaaggaagacggggcttgcaggcagcgccattacccagagcaaacagaatcttggttcagacctgtggcgagggctag

SEQ ID NO: 217626 - DNA, 1165 bp, Zea Mays
tttttgtataaagtaggaaggcggtggaaccggagaaattggtattaaagagatagtttgaaaaccccagccgatattatgcatcgtcgatcggcggaccggccaggcggccaccccatcgatccatcgcgaggccaaacccagccatggcctcgtcctcccgcacggccgacgtcgccgccagcagggtgctgtccgagaagggggcggccgcaatggcggagtgcgtcggcctgcttttcgggaagtggacggcgctgcagctggcggtgcagaaccagtggggcggccacgactcgcaggctaaggccgaccggctcgcctcctccgtcctctcctggttcacccgcgccgccgccgccagaggcgcgggcgcactcgacccggacgagctggaggatttgctgtacgtcaccatggacgagtccttcaacgccgacatagatgacgggggcgtcgaggagggtggtgcagtttcactaaaagaagctgcaattcctgccccacgttgatcagctcccaagaactcgagttaccaagaacctgatgatcatgtacacacgctgtctgcggcaggactattcgtacacggataagctaaggaagacggggcttgcaggcagcgccattacccagagcaaacaggtattgcgaggctatggcagtagctgctacgattatgataatgatgatgatgacgacgacgacgacgataacgatgatggagcaggtctaatggagattgaggcgctgcacaacccgtaacccgcaagcccgtccctggtgcgggtggatgcaccacaacaatagtgaatcgaagaagaaaataaggcacatgtggaaggttttcgatctctccatgcaaatgcgtagcaaactaataatgcatggcaaataatgttcagttgcatggcgcattttgatttgtggatgagatggagtcgtcgctatagcatcgtctagcaatgtaaatacttaatataattactcaaaagtaaaatttcaaagcaaagtaaggattataaatgtcttgatattttttccgagtatactctctgctatttttttggctcttggcatctaggcaaggccaacaagctgctactgcgcttaccatgaatcatcctccttagatccttagatgttttttatttattttgtatag

SEQ ID NO: 217627 - DNA, 574 bp, Zea Mays
cggcggaccggccaggcggccaccccatcgatccatcgcgaggccaaacccagccatggcctcgtcctcccgcacggccgacgtcgccgccagcagggtgctgtccgagaagggggcggccgcaatggcggagtgcgtcggcctgcttttcgggaagtggacggcgctgcagctggcggtgcagaaccagtggggcggccacgactcgcaggctaaggccgaccggctcgcctcctccgtcctctcctggttcacccgcgccgccgccgccagaggcgcgggcgcactcgacccggacgagctggaggatttgctgtacgtcaccatggacgagtccttcaacgccgacatagatgacgggggcgtcgaggagggtggtgcagtttcactaaaagaagctgcaattcctgccccacgttgatcagctcccaagaactcgatgaatagatggtgagagactatacaaaaggtatgcaaattaacaagacttatacatgcgcggaacagtgtgctgatgaggcacaagggaacacatgctcacgtattaatatgtttgggaacacatgtgacccca

SEQ ID NO: 217628 - DNA, 2419 bp, Zea Mays
agccgctagggctgcattcatccacctcgtgcttatcgcctaccccaactccgactcctgctcgtctcgtcgctcgccgctcgccgcctcgtccagctctctccgcccctccggactagcctagcccctcccgctcaccgcgtcgtctccagaatctggcctacgaccgttgacggctggtgccccctccggcgatcggtggtcatggtccgtccttgctcaccccgttcggatccgctatgcgcgagcctccccttccctaatcacgcgcccccctgccccagcgatccgcagctgccgccccctgtcccaccgatccgcggctgccgcctcctccttcccctaatcacgccccccggtcccgttgatccatagttgtcgcctcccccaacccctaatcacgcgcgtctcgctcccgccgatccgcggatcggctctgctccaaccctcctccgtccctgagatgcaagcgagcaccacgggggatttctcccttgaggtgttgcctgagaggtgctgctgaccgagtagcatcattgaagagttactgtcgagcacttggattatgtgatcgatgtgcagagaagtggttccaagggcacaagtgtgccaacacggtgcaacttcacaccattgaggaagtctaggatttgctcaccttggatgaagctacagtggaagtcattgaaccaacagaggaactgatgatggttgtcgtatccctgtctaatgcggcatgggtcttcacatactttcctcaatgacagtcgtcgaccactattgtttggagtccaagaattgacaacactaattacagtttaggttgctaatggccaagttattacctgctcacaccaccttccagcagctcaatggaccatcggtatagcccgatgagagtggattggacaaacatgtggatggttatttcttaccaggaaaatactatctaccttcaggctgttgcagtggattccagagtgcaagctgtactcgacagttatcctagcattttcatcgatccagtgggactcctaccaacccgcccgtgtgatcattcaatttcattgatccccggtgcccagctgttccacataaggccataccgttaccctccaaccctcaaagatgaaattgaaactcaagttaaggaaatgctatcccagggggtgatacgaaagagcagcagcccctttgcatctccaattctcttgtcaaaaagaaagaccactcatggcgattctgtgtagattaccgttatttgaatgccacgacggtgaagagtaaataccctatgctgatattcgatcagttctttgtgctcaggcactaggcatgtagagtcgatgcagcttacaaggctgttgacaaaataatccaggtttgttggcacacttttaatctttcttgtacgggtacactacttctaacaatggaatatgaatgttgttttttgcgcaaaagttgcctggcttttagcatcgtttgatgggtgaggacacacatcgcctccaaatactagaacgctagggatatttgttctctcaaataaagctttacctgttatattatataatacttccgtaagaagagctgttagtggctggagtgaatagaatttggttggtcagtgcctccaagttgttttataggactttcatatttggtcggtgccagattgggtgaataagctctctatgaggtttctgaaagttgacaggaaaacagttgatcttgtcggtaatgagaaactgaaggccagtgcatctgttaagcaccttgctcttccttgtaacaaggcagcaacggcacaagttattccagacattatccgatgttatagccatggaggtcgaaccatcatcttcactgagacgaaggattctgcatcagagctttctggtaatactggtgttgctgtcatgctttatgagcccagatataagcacagtgtcagcagactagaaagggagtctggggttaaatttgagcatatctctgcgccacaacccactgatgtagcacaatctgctggcagtgaagctgcagatgccattgcgagtgtgtcagacagtgttattcctatcttcaggcagcaagcagagcagttgctaagctcttccagtctgtctgcagctgacttgcttgccaaagcacttgcgaaggcagttggttacacggacataaagaaaagatcattgttatcttccttggaggattacagtacactacatcttcaaactggcagaccgatgtggtcacctgggtttgctataacattccggtgatcgtgtttcttcttcgtcggggtcatatttgttcccattggtgttatcttcagtttgacgtcggcaacgtggtcatggtgaccggcgggaggaacaccgggcgtgtaggagtgatcaagaactgggagaag

SEQ ID NO: 217629 - DNA, 2005 bp, Zea Mays
ctcaaataatagtataatatcaagtatgcaatatatatttggtctcaaagtacaagttcaaccaccttctgcaataggctaaccaactataaggataacaaaatgtagcatgtcgtaagtataaaactctcacttccaacttaatattacagactgaggttcaacacaatatgaagctcttcattgccccatatattttaaaagaattgctccaaagaaaatgcatatcttgttttgtacaggtgatcgaacattgagtgactctaatattttactttaccttgtctcgaggtgtgctctccactcagaccatttcagtaatttgcattaggttttcttgagatattaataatgtgtaaaggtatagatgctaccttcagacatttattcgaataaaattttcacttaactggatagtggctctgattgtcattaagtattttgacttttggcatgatcactgcactcttcagcactgtgtccttgcttggagccatcacctctctgtctccggtttccttggcatgatgactgttggtattgctgtaatcattgtctgcttgatcacccactcctttttagctctgttcgtatcattgtctgcttgatcaccaccctttttgctactgatttctttgaagtcaaggctgtgaaagaaattgagcctgcacttaagaagcagctcatcatctccaccaccctgatgactgttggtattgctgtaatcagctggttggcccttctagctaagttcaccatcttcaactttggtactcagaaggatgtctccaactagggcttgttcttctgtgttgcaattggtccatggctggtctgattattggttttgtcacagaatactacactagcaatgcatacaatcctgtgcaagacgttgcagattcctgcagaactggtgctgtcactaatgtcattttgggtcttgctcttggatacaagtcggttatcatcccgattttcgctatcgctgttatcatctatgttagtttctccattgctgcaatgtacgacatcgcagttgccgctcttggtatgctgagcacaatcgcaactggtcttgctattgatgcttatgctcccatcagtgacaatgctggtggtattgctgagaactgatgctgttgatgctgctggcaacaccactgccgctattggaaagggatttgccattggttcagctgctcttgtgtctctggcgctttttggtgcctttgtcagcagagctggagtcaaggttgtcgatgtcctctcccccaaggttttcattggtttgattgttggagccatgcttccctattggttctctgccatgaccgtgaagagtgttggaagtgctgccctaaagatggtggaggaggtccgcagacagttcaacaccattcctgggttgatggagggaactgccaagcctgactatgcaacctattggaagatctccactgatgcttccatcaaggagatgattcctcctggtgctctggtcatgctcactcccctcattgttggaaccctcttcggtgttgagactctctatggtgttcttgctggtgccctggtttctggagtgcaaccgtcgttttctcttaacagaaaagaactataaaaacgtcgccgctgtcaaaacccagaaattacgaggcgcgaaatggaaagcttccagcagattaacgatcggctagatttgattcattccgcccgcccactacctctcacggtcacggccaatccggccaacccagagatcacgtgtcagtgctattttgtgtacaagtactacttaatatatgtttgaaaacttttttaagtgatttccaaacttgaacgggaatcattcttattcttttaaatgtctgatagtagttattgtttgtgtgacattgtactgttttgtttcttaaacaaacaccattctacaaattttgcatcgtccctgtagtgcgcccgtaagggcgccgcctgttctagtatgatacattgcttcccc

SEQ ID NO: 217630 - DNA, 2490 bp, Zea Mays
atgtcctctgttcgtatcattgtctgcttgatcaccaccctttttgctactgatttctttgaagtcaaggctgtgaaagaaattgagcctgcacttaagaagcagctcatcatctccaccaccctgatgactgttggtattgctgtaatcagctggttggcccttctagctaagttcaccatcttcaactttggtactcagaaggatgtctccaactagggcttgttcttctgtgttgcaattggtccatggctggtctgattattggttttgtcacagaatactacactagcaatgcatacaatttcaaagcctacaagtctcttatgttttttcttctcatcgtttctttgtgatggtgttttaataatcctaacatgtttattctgtggtagtcctgtgcaagacgttgcagattcctgcagaactggtgctgtcactaatgtcattttgggtcttgctcttggatacaagtcggttatcatcccgattttcgctatcgctgttatcatctatgttagtttctccattgctgcaatgtacgacatcgcagttgccgctcttggtatgctgagcacaatcgcaactggtcttgctattgatgcttatgctcccatcagtgacaatgctggtggtattgctgagaactgatgctgttgatgctgctggcaacaccactgccgctattggaaagggatttgccattggttcagctgctcttgtgtctctggcgctttttggtgcctttgtcagcaaagctggagtcaaggttgtcgatgtcctctcccccaaggttttcattggtttgattgttggagccatgcttccctattggttctctgccatgaccatgaagagtgttggaagtgctgccctaaagatggtggaggaggtccgcagacagttcaacaccattcctgggttgatggagggaactgccaagcctgactatgcaacctattggaagatctccactgatgcttccatcaaggagatgattcctcctggtgctctggtcatgctcactcccctcattgttggaaccctcttcggttttgagactctctatggtgttcttgctggtgccctggtttctggagtgcaaccgtcgttttctcgcggatgcgattttttatttcattgcattggatacgacttgcgtccgctttctcacccaatcaggcggccctccgcctgcgcacgcctcgtgttttccgtctcgccaccgtgatgtcgcctctgctgcttcgtcgcgtcgtcgcctctctgctgctccacggatccctgaagtgctgctgctccggcgccacgggcggcgccctctggcagccggctgccaggggcgcgtggaggatgtagattggtcctggtggcggcgacagcggagggccagcaactgcgagcggtaccgtgctcctgcggtggcttcgtatgcagggaccggaggtctacagtagcgcgcatctagccggctcagcatcgtggatctaaccagaggaggccacggctgttgctcctccctcggcaatggcgagggttcgagacaggacgaagcacttcaaaggggtcgcaatgctctcacatggatacatcgagaaaatgggaaccactcgaaaacgtcgctcactctggctgaggtaatggaaaatcactacgcatccaaaatcagcactttcaatctttagaaaatagcactggttattggagtcattttttgaccgatggagttatcctttgattcagtaagtattttttcctaaaaaacaaatcaaccatgtggcacctgaaccaccatcagagattgcagaggagcacgatggtttagagagtgttttagtgcctatgcaggggattgtggttaatgggaaaagtacttcagagctattgagtggctctgtatcattgaggtcagctgaggtggttggaacacctgttggacgaattgtgaagtgtgaggagtttctgaaggctgcaggacctgttatgagcggcatgttcaagttcagttgaatgaatggcgctctggtgcactaatgagcggatagcgagagaacctctaacatagtatgcaagattttctttcctgatagaatcttccagagtacaaagctaacacaatacctttctaggataaatttgggagtatcaactctaatattttactttaccttgtctcgaggtgtgctctccactcaaaccatttcagtaatttgcattaggttttcttgagatattaataatgtgtaaaggtatagatgctaccttcagacatttattcgaataaaattttcacttaactggatagtggctctgattgtcattaagtattttgacttttggcatgatcactgcactcttcagcactgtgtccttgcttggagccatcacctctctgtctccggtttccttggcatgatgactgttggtattgctgtaatcattgtctgcttgatcacccactcctttttagctctgttcgtatcattgtct

SEQ ID NO: 217631 - DNA, 2176 bp, Zea Mays
atgtcctctgttcgtatcattgtctgcttgatcaccaccctttttgctactgatttctttgaagtcaaggctgtgaaagaaattgagcctgcacttaagaagcagctcatcatctccaccaccctgatgactgttggtattgctgtaatcagctggttggcccttctagctaagttcaccatcttcaactttggtactcagaaggatgtctccaactagggcttgttcttctgtgttgcaattggtccatggctggtctgattattggttttgtcacagaatactacactagcaatgcatacaatttcaaagcctacaagtctcttatgttttttcttctcatcgtttctttgtgatggtgttttaataatcctaacatgtttattctgtggtagtcctgtgcaagacgttgcagattcctgcagaactggtgctgtcactaatgtcattttgggtcttgctcttggatacaagtcggttatcatcccgattttcgctatcgctgttatcatctatgttagtttctccattgctgcaatgtacgacatcgcagttgccgctcttggtatgctgagcacaatcgcaactggtcttgctattgatgcttatgctcccatcagtgacaatgctggtggtattgctgagaactgatgctgttgatgctgctggcaacaccactgccgctattggaaagggatttgccattggttcagctgctcttgtgtctctggcgctttttggtgcctttgtcagcaaagctggagtcaaggttgtcgatgtcctctcccccaaggttttcattggtttgattgttggagccatgcttccctattggttctctgccatgaccatgaagagtgttggaagtgctgccctaaagatggtggaggaggtccgcagacagttcaacaccattcctgggttgatggagggaactgccaagcctgactatgcaacctattggaagatctccactgatgcttccatcaaggagatgattcctcctggtgctctgccggctgccaggggcgcgtggaggatgtagattggtcctggtggcggcgacagcggagggccagcaactgcgagcggtaccgtgctcctgcggtggcttcgtatgcagggaccggaggtctacagtagcgcgcatctagccggctcagcatcgtggatctaaccagaggaggccacggctgttgctcctccctcggcaatggcgagggttcgagacaggacgaagcacttcaaaggggtcgcaatgctctcacatggatacatcgagaaaatgggaaccactcgaaaacgtcgctcactctggctgaggtaatggaaaatcactacgcatccaaaatcagcactttcaatctttagaaaatagcactggttattggagtcattttttgaccgatggagttatcctttgattcagtaagtattttttcctaaaaaacaaatcaaccatgtggcacctgaaccaccatcagagattgcagaggagcacgatggtttagagagtgttttagtgcctatgcaggggattgtggttaatgggaaaagtacttcagagctattgagtggctctgtatcattgaggtcagctgaggtggttggaacacctgttggacgaattgtgaagtgtgaggagtttctgaaggctgcaggacctgttatgagcggcatgttcaagttcagttgaatgaatggcgctctggtgcactaatgagcggatagcgagagaacctctaacatagtatgcaagattttctttcctgatagaatcttccagagtacaaagctaacacaatacctttctaggataaatttgggagtatcaactctaatattttactttaccttgtctcgaggtgtgctctccactcaaaccatttcagtaatttgcattaggttttcttgagatattaataatgtgtaaaggtatagatgctaccttcagacatttattcgaataaaattttcacttaactggatagtggctctgattgtcattaagtattttgacttttggcatgatcactgcactcttcagcactgtgtccttgcttggagccatcacctctctgtctccggtttccttggcatgatgactgttggtattgctgtaatcattgtctgcttgatcacccactcctttttagctctgttcgtatcattgtct

SEQ ID NO: 217632 - DNA, 3330 bp, Zea Mays
atgtcctctgttcgtatcattgtctgcttgatcaccaccctttttgctactgatttctttgaagtcaaggctgtgaaagaaattgagcctgcacttaagaagcagctcatcatctccaccaccctgatgactgttggtattgctgtaatcagctggttggcccttctagctaagttcaccatcttcaactttggtactcagaaggatgtctccaactagggcttgttcttctgtgttgcaattggtccatggctggtctgattattggttttgtcacagaatactacactagcaatgcatacaatcctgtgcaagacgttgcagattcctgcagaactggtgctgtcactaatgtcattttgggtcttgctcttggatacaagtcggttatcatcccgattttcgctatcgctgttatcatctatgttagtttctccattgctgcaatgtacgacatcgcagttgccgctcttggtatgctgagcacaatcgcaactggtcttgctattgatgcttatgctcccatcagtgacaatgctggtggtattgctgagaactgatgctgttgatgctgctggcaacaccactgccgctattggaaagggatttgccattggttcagctgctcttgtgtctctggcgctttttggtgcctttgtcagcaaagctggagtcaaggttgtcgatgtcctctcccccaaggttttcattggtttgattgttggagccatgcttccctattggttctctgccatgaccatgaagagtgttggaagtgctgccctaaagatggtggaggaggtccgcagacagttcaacaccattcctgggttgatggagggaactgccaagcctgactatgcaacctattggaagatctccactgatgcttccatcaaggagatgattcctcctggtgctctggtcatgctcactcccctcattgttggaaccctcttcggttttgagactctctatggtgttcttgctggtgccctggtttctggagtgcaaccgtcgttttctcgcggatgcgattttttatttcattgcattggatacgacttgcgtccgctttctcacccaatcaggcggccctccgcctgcgcacgcctcgtgttttccgtctcgccaccgtgatgtcgcctctgctgcttcgtcgcgtcgtcgcctctctgctgctccacggatccctgaagtgctgctgctccggcgccacgggcggcgccctctggcagccggctgccaggggcgcgtggaggatgtagattggtcctggtggcggcgacagcggagggccagcaactgcgagcggtaccgtgctcctgcggtggcttcgtatgcagggaccggaggtctacagtagcgcgcatctagccggctcagcatcgtggatctaaccagaggaggccacggctgttgctcctccctcggcaatggcgagggttcgagacaggacgaagcacttcaaaggggtcgcaatgctctcacatggatacatcgaggtgtgttgcgtcctctgcctctccacccgcatcccctcttcagcgtagtgatgacgcctcactaatgaaaatgggaaccactcgaaaacgtcgctcactctggctgaggtaatggaaaatcactacgcatccaaaatcagcactttcaatctttagaaaatagcactggttattggagtcattttttgaccgatggagttatcctttgattcagtaagtattttttcctaaaaaacaaatcaaccatgtggcacctgaaccaccatcagagattgcagaggagcacgatggtttagagagtgttttagtgcctatgcaggggattgtggttaatgggaaaagtacttcagagctattgagtggctctgtatcattgaggtcagctgaggtggttggaacacctgttggacgaattgtgaagtgtgaggagtttctgaaggctgcaggacctgttatgctggttggcccttctagctaagttcaccatcttcaactttggtactcagaaggatgtctccaactggggcttgttcttctgtgttgcaattggtccatgggctggtctgattattggttttgtcacagaatactacactagcaatgcatacaagttcaaagcctacaagtctcttatgttttttcttctcatcgtttctttgtgatggtgttttaataatcctaacatgtttattctatggtagtcctgtgcaagacgttgcagattcctgcagaactggtgctgtcactaatgtcattttgggtcttgctcttggatacaagtcggttatcatcccgattttcgctatcgctgttatcatctatgttagtttctccattgctgcaatgtacgacatcgcagttgccgctcttggtatgctgagcacaatcgcaactggtcttgctattgatgcttatgctcccatcagtgacaatgctggtggtattgctgagaactgatgctgttgatgctgctggcaacaccactgccgctattggaaagggatttgccattggttcagctgctcttgtgtctctggcgctttttggtgcctttgtcagcagagctggagtcaaggttgtcgatgtcctctcccccaaggttttcattggtttgattgttggagccatgcttccctattggttctctgccatgaccgtgaagagtgttggaagtgctgccctaaagatggtggaggaggtccgcagacagttcaacaccattcctgggttgatggagggaactgccaagcctgactatgcaacctattggaagatctccactgatgcttccatcaaggagatgattcctcctggtgctctggtcatgctcactcccctcattgttggaaccctcttcggtgttgagactctctatggtgttcttgctggtgccctggtttctggagtgcaaccgtcgttttctcttaacagaaaagaactataaaaacgtcgccgctgtcaaaacccagaaattacgaggcgcgaaatggaaagcttccagcagattaacgatcggctagatttgattcattccgcccgcccactacctctcacggtcacggccaatccggccaacccagagatcacgtgtcagtgctattttgtgtacaagtactacttaatatatgtttgaaaacttttttaagtgatttccaaacttgaacgggaatcattcttattcttttaaatgtctgatagtagttattgtttgtgtgacattgtactgttttgtttcttaaacaaacaccattctacaaattttgcatcgtccctgtagtgcgcccgtaagggcgccgcctgttctagtatgatacattgcttcccc

SEQ ID NO: 217633 - DNA, 3344 bp, Zea Mays
atgtcctctgttcgtatcattgtctgcttgatcaccaccctttttgctactgatttctttgaagtcaaggctgtgaaagaaattgagcctgcacttaagaagcagctcatcatctccaccaccctgatgactgttggtattgctgtaatcagctggttggcccttctagctaagttcaccatcttcaactttggtactcagaaggatgtctccaactagggcttgttcttctgtgttgcaattggtccatggctggtctgattattggttttgtcacagaatactacactagcaatgcatacaatttcaaagcctacaagtctcttatgttttttcttctcatcgtttctttgtgatggtgttttaataatcctaacatgtttattctgtggtagtcctgtgcaagacgttgcagattcctgcagaactggtgctgtcactaatgtcattttgggtcttgctcttggatacaagtcggttatcatcccgattttcgctatcgctgttatcatctatgttagtttctccattgctgcaatgtacgacatcgcagttgccgctcttggtatgctgagcacaatcgcaactggtcttgctattgatgcttatgctcccatcagtgacaatgctggtggtattgctgagaactgatgctgttgatgctgctggcaacaccactgccgctattggaaagggatttgccattggttcagctgctcttgtgtctctggcgctttttggtgcctttgtcagcaaagctggagtcaaggttgtcgatgtcctctcccccaaggttttcattggtttgattgttggagccatgcttccctattggttctctgccatgaccatgaagagtgttggaagtgctgccctaaagatggtggaggaggtccgcagacagttcaacaccattcctgggttgatggagggaactgccaagcctgactatgcaacctattggaagatctccactgatgcttccatcaaggagatgattcctcctggtgctctggtcatgctcactcccctcattgttggaaccctcttcggttttgagactctctatggtgttcttgctggtgccctggtttctggagtgcaaccgtcgttttctcgcggatgcgattttttatttcattgcattggatacgacttgcgtccgctttctcacccaatcaggcggccctccgcctgcgcacgcctcgtgttttccgtctcgccaccgtgatgtcgcctctgctgcttcgtcgcgtcgtcgcctctctgctgctccacggatccctgaagtgctgctgctccggcgccacgggcggcgccctctggcagccggctgccaggggcgcgtggaggatgtagattggtcctggtggcggcgacagcggagggccagcaactgcgagcggtaccgtgctcctgcggtggcttcgtatgcagggaccggaggtctacagtagcgcgcatctagccggctcagcatcgtggatctaaccagaggaggccacggctgttgctcctccctcggcaatggcgagggttcgagacaggacgaagcacttcaaaggggtcgcaatgctctcacatggatacatcgagaaaatgggaaccactcgaaaacgtcgctcactctggctgaggtaatggaaaatcactacgcatccaaaatcagcactttcaatctttagaaaatagcactggttattggagtcattttttgaccgatggagttatcctttgattcagtaagtattttttcctaaaaaacaaatcaaccatgtggcacctgaaccaccatcagagattgcagaggagcacgatggtttagagagtgttttagtgcctatgcaggggattgtggttaatgggaaaagtacttcagagctattgagtggctctgtatcattgaggtggttggaacacctgttggacgaattgtgaagtgtgaggagtttctgaaggctgcaggacctgttatgctggttggcccttctagctaagttcaccatcttcaactttggtactcagaaggatgtctccaactggggcttgttcttctgtgttgcaattggtccatgggctggtctgattattggttttgtcacagaatactacactagcaatgcatacaagttcaaagcctacaagtctcttatgttttttcttctcatcgtttctttgtgatggtgttttaataatcctaacatgtttattctatggtagtcctgtgcaagacgttgcagattcctgcagaactggtgctgtcactaatgtcattttgggtcttgctcttggatacaagtcggttatcatcccgattttcgctatcgctgttatcatctatgttagtttctccattgctgcaatgtacgacatcgcagttgccgctcttggtatgctgagcacaatcgcaactggtcttgctattgatgcttatgctcccatcagtgacaatgctggtggtattgctgagaactgatgctgttgatgctgctggcaacaccactgccgctattggaaagggatttgccattggttcagctgctcttgtgtctctggcgctttttggtgcctttgtcagcagagctggagtcaaggttgtcgatgtcctctcccccaaggttttcattggtttgattgttggagccatgcttccctattggttctctgccatgaccgtgaagagtgttggaagtgctgccctaaagatggtggaggaggtccgcagacagttcaacaccattcctgggttgatggagggaactgccaagcctgactatgcaacctattggaagatctccactgatgcttccatcaaggagatgattcctcctggtgctctggtcatgctcactcccctcattgttggaaccctcttcggtgttgagactctctatggtgttcttgctggtgccctggtttctggagtgcaaccgtcgttttctcttaacagaaaagaactataaaaacgtcgccgctgtcaaaacccagaaattacgaggcgcgaaatggaaagcttccagcagattaacgatcggctagatttgattcattccgcccgcccactacctctcacggtcacggccaatccggccaacccagagatcacgtgtcagtgctattttgtgtacaagtactacttaatatatgtttgaaaacttttttaagtgatttccaaacttgaacgggaatcattcttattcttttaaatgtctgatagtagttattgtttgtgtgacattgtactgttttgtttcttaaacaaacaccattctacaaattttgcatcgtccctgtagtgcgcccgtaagggcgccgcctgttctagtatgatacattgcttcccc

SEQ ID NO: 217634 - DNA, 3343 bp, Zea Mays
cagtaatttgcattaggttttcttgagatattaataatgtgtaaagcactgtgtccttgcttggagccatcacctctctgtctccggtttccttggcatgatgactgttggtattgctgtaatcattgtctgcttgatcacccactcctttttagctctgttcgtatcattgtctgcttgatcaccaccctttttgctactgatttctttgaagtcaaggctgtgaaagaaattgagcctgcacttaagaagcagctcatcatctccaccaccctgatgactgttggtattgctgtaatcagctggttggcccttctagctaagttcaccatcttcaactttggtactcagaaggatgtctccaactagggcttgttcttctgtgttgcaattggtccatggctggtctgattattggttttgtcacagaatactacactagcaatgcatacaatttcaaagcctacaagtctcttatgttttttcttctcatcgtttctttgtgatggtgttttaataatcctaacatgtttattctgtggtagtcctgtgcaagacgttgcagattcctgcagaactggtgctgtcactaatgtcattttgggtcttgctcttggatacaagtcggttatcatcccgattttcgctatcgctgttatcatctatgttagtttctccattgctgcaatgtacgacatcgcagttgccgctcttggtatgctgagcacaatcgcaactggtcttgctattgatgcttatgctcccatcagtgacaatgctggtggtattgctgagaactgatgctgttgatgctgctggcaacaccactgccgctattggaaagggatttgccattggttcagctgctcttgtgtctctggcgctttttggtgcctttgtcagcaaagctggagtcaaggttgtcgatgtcctctcccccaaggttttcattggtttgattgttggagccatgcttccctattggttctctgccatgaccatgaagagtgttggaagtgctgccctaaagatggtggaggaggtccgcagacagttcaacaccattcctgggttgatggagggaactgccaagcctgactatgcaacctattggaagatctccactgatgcttccatcaaggagatgattcctcctggtgctctggtcatgctcactcccctcattgttggaaccctcttcggttttgagactctctatggtgttcttgctggtgccctggtttctggagtgcaaccgtcgttttctcgcggatgcgattttttatttcattgcattggatacgacttgcgtccgctttctcacccaatcaggcggccctccgcctgcgcacgcctcgtgttttccgtctcgccaccgtgatgtcgcctctgctgcttcgtcgcgtcgtcgcctctctgctgctccacggatccctgaagtgctgctgctccggcgccacgggcggcgccctctggcagccggctgccaggggcgcgtggaggatgtagattggtcctggtggcggcgacagcggagggccagcaactgcgagcggtaccgtgctcctgcggtggcttcgtatgcagggaccggaggtctacagtagcgcgcatctagccggctcagcatcgtggatctaaccagaggaggccacggctgttgctcctccctcggcaatggcgagggttcgagacaggacgaagcacttcaaaggggtcgcaatgctctcacatggatacatcgagaaaatgggaaccactcgaaaacgtcgctcactctggctgagagattgcagaggagcacgatggtttagagagtgttttagtgcctatgcaggggattgtggttaatgggaaaagtacttcagagctattgagtggctctgtatcattgaggtcagctgaggtggttggaacacctgttggacgaattgtgaagtgtgaggagtttctgaaggctgcaggacctgttatgctggttggcccttctagctaagttcaccatcttcaactttggtactcagaaggatgtctccaactggggcttgttcttctgtgttgcaattggtccatgggctggtctgattattggttttgtcacagaatactacactagcaatgcatacaagttcaaagcctacaagtctcttatgttttttcttctcatcgtttctttgtgatggtgttttaataatcctaacatgtttattctatggtagtcctgtgcaagacgttgcagattcctgcagaactggtgctgtcactaatgtcattttgggtcttgctcttggatacaagtcggttatcatcccgattttcgctatcgctgttatcatctatgttagtttctccattgctgcaatgtacgacatcgcagttgccgctcttggtatgctgagcacaatcgcaactggtcttgctattgatgcttatgctcccatcagtgacaatgctggtggtattgctgagaactgatgctgttgatgctgctggcaacaccactgccgctattggaaagggatttgccattggttcagctgctcttgtgtctctggcgctttttggtgcctttgtcagcagagctggagtcaaggttgtcgatgtcctctcccccaaggttttcattggtttgattgttggagccatgcttccctattggttctctgccatgaccgtgaagagtgttggaagtgctgccctaaagatggtggaggaggtccgcagacagttcaacaccattcctgggttgatggagggaactgccaagcctgactatgcaacctattggaagatctccactgatgcttccatcaaggagatgattcctcctggtgctctggtcatgctcactcccctcattgttggaaccctcttcggtgttgagactctctatggtgttcttgctggtgccctggtttctggagtgcaaccgtcgttttctcttaacagaaaagaactataaaaacgtcgccgctgtcaaaacccagaaattacgaggcgcgaaatggaaagcttccagcagattaacgatcggctagatttgattcattccgcccgcccactacctctcacggtcacggccaatccggccaacccagagatcacgtgtcagtgctattttgtgtacaagtactacttaatatatgtttgaaaacttttttaagtgatttccaaacttgaacgggaatcattcttattcttttaaatgtctgatagtagttattgtttgtgtgacattgtactgttttgtttcttaaacaaacaccattctacaaattttgcatcgtccctgtagtgcgcccgtaagggcgccgcctgttctagtatgatacattgcttcccc

SEQ ID NO: 217635 - DNA, 2188 bp, Zea Mays
  misc_feature (2188)..(2188): n is a, c, g, or t
ctcgactcctctttcccctccccgagcgtgcacgtctcgtcatcgccctactcgctcgccccatcccggagtctccccggctcccaaaccctagcgcctcccggacctcgcaggtgagggaggcggcgatgttcttctccggtgacccatcggcgcggcggcgggtcgacctcggcgggcggagcagcaaggagcgggaccgcaaggtgctgctcgagcagacgcgcgaggagcggcgccggcgccagggcctccgcctccagaacacctccgccacgaagatccagagggaagaaggctttggaattggcccgctcagaggttcggaagaatttttgctcaacttttggggagcattgcgagaggatagagtggaacatctttggcactaattctgactttcttcggcaattactgttcttcttcaatgcaaatgaagacaatgacatagctatactttgtcatgtctgcaatttgctgctgcaatatgttaaacaaggcggagatgttgtaactctcttcactggtgtgaatggctcctcgctgcaacctcttgttgctcaccgagtaaaaaaatttgccctcatctgtgtgcaagcagtctatcaaaagaggcatgattggggcagccaacttttaacaacacctggaaccacatcagtgccttctgtgtcattactggaaactgtaggttgcttgataaatccaaaatttctttggaactgcaaagtagttggttatcttcagcagagaaagatctattgcttatttcgtggcattatcgtatctgtaccgcaaaatgtcagaaattctggtcattttgatagtgcatctgtgctggagcaagtgcttatgcttgttgcttcgcatgttggccatcatccctgttgttgtctgaaagtggatccaagatggagtttctcgtctcagcttctgtccatcccttttctatggcatcgtttaccacaactcaagaaggttttctccgttaacgggctcaacaaatattatatccatcaaatagcttgccttttgcccagtcttgttgatgtccttccaaacgatatatcagctaatcatccaggatatgcgtgcgtccttgcaaatgttcttgaagctgcaacctggattttgtctgatgcaaagttagcttctgattcagcggctgacatcattgctgtttgtacctcgttgttggatacgttgccagcagtcacaacacctactgaaagggcagatgacgatgatgagatgcccatggatgtcaatattaaaattaatcttgatgttgatttggaaagacagataactgcagcaattgattcaaagctacttcaacatttggtgaatgccctcttcagaggtacattaagcacaaatgattctgatctgtctggaccatcagatgctgaagttgatgctgtaggatctatttgtgcttttcttcatgttacgttcaatacatttcctctagagcgaattatgactgtcctggcataccggactgaaattgttcctgcactatggaagttcataaaacgttgccatgcaagccgaagatggccattttttttgaagtttgcatcttcattacctgctgattctcctggttggctccttcccatgtctgtattctgtcccatatacaagcacatgttgaagatcattgataccggggagttctatgaacaggagaaacccctttcccttaaagatttgaagtccttggttctcattttaaaacaggcattatggcaacttctgtgggttattccatcctcttctactcagaaagtgtcacccaacccttcaggccttaaaaagttgtcagtggagaatgtcaagactagagctagggttgggttatctgaacttctcacacagttgcaagactggaacagccgactaccattcactgctgcaagtgatttctattctcaagaagctacgagcgaaaattttgtgtctcaagcaatacttggtaatactcgagcatcagagatcataaagcttgctccttttttggctccatttaccagtcgagtcaaaatattcacttcccaattaacgtgttctagacaatcaacatcacattctgcattgacaagacagcggttcaaaataagaagaagtcgacttttggaagatgcttttgatcagctaagtttgctttctgaagaagatctcn

SEQ ID NO: 217636 - DNA, 2152 bp, Zea Mays
  misc_feature (2152)..(2152): n is a, c, g, or t
ctcgactctcgactcctctttcccctccccgagcgtgcacgtctcgtcatcgccctactcgctcgccccatcccggagtctccccggctcccaaaccctagcgcctcccggacctcgcaggtgagggaggcggcgatgttcttctccggtgacccatcggcgcggcggcgggtcgacctcggcgggcggagcagcaaggagcgggaccgcaaggtgctgctcgagcagacgcgcgaggagcggcgccggcgccagggcctccgcctccagaacacctccgccacgaagatccagaaattcttcagagggaagaaggctttggaattggcccgctcagaggttcggaagaatttttgctcaacttttggggagcattgcgagaggatagagtggaacatctttggcactaattctgactttcttcggcaattactgttcttcttcaatgcaaatgaagacaatgacatagctatactttgtcatgtctgcaatttgctgctgcaatatgttaaacaaggcggagatgttgtaactctcttcactggtgtgaatggctcctcgctgcaacctcttgttgctcaccgagtaaaaaaatttgccctcatctgtgtgcaagcagtctatcaaaagaggcatgattggggcagccaacttttaacaacacctggaaccacatcagtgccttctgtgtcattactggaaactgtaggttgcttgataaatccaaaatttctttggaactgcaaagtagttggttatcttcagcagagaaagatctattgcttatttcgtggcattatcgtatctgtaccgcaaaatgtcagaaattctggtcattttgatagtgcatctgtgctggagcaagtgcttatgcttgttgcttcgcatgttggccatcatccctgttgttgtctgaaagtggatccaagatggagtttctcgtctcagcttctgtccatcccttttctatggcatcgtttaccacaactcaagaaggttttctccgttaacgggctcaacaaatattatatccatcaaatagcttgccttttgcccagtcttgttgatgtccttccaaacgatatatcagctaatcatccaggatatgcgtgcgtccttgcaaatgttcttgaagctgcaacctggattttgtctgatgcaaagttagcttctgattcagcggctgacatcattgctgtttgtacctcgttgttggatacgttgccagcagtcacaacacctactgaaagggcagatgacgatgatgagatgcccatggatgtcaatattaaaattaatcttgatgttgatttggaaagacagataactgcagcaattgattcaaagctacttcaacatttggtgaatgccctcttcagaggtacattaagcacaaatgattctgatctgtctggaccatcagatgctgaagttgatgctgtaggatctatttgtgcttttcttcatgttacgttcaatacatttcctctagagcgaattatgactgtcctggcataccggactgaaattgttcctgcactatggaagttcataaaacgttgccatgcaagccgaagatggccattttttttgaagtttgcatcttcattacctgctgattctcctggttggctccttcccatgtctgtattctgtcccatatacaagcacatgttgaagatcattgataccggggagttctatgaacaggagaaacccctttcccttaaagatttgaagtccttggttctcattttaaaacaggcattatggcaacttctgtgggttattccatcctcttctactcagaaagtgtcacccaacccttcaggccttaaaaagttgtcagtggagaatgtcaagactagagctagggttgggttatctgaacttctcacacagttgcaagactggaacagccgactaccattcactgctgcaagtgatttctattctcaagaagctacgagcgaaaattttgtgtctcaagcaatacttggtaatactcgagcatcagagatcataaagcttgctccttttttggctccatttaccagtcgagtcaaaatattcactcggttcaaaataagaagaagtcgacttttggaagatgcttttgatcagctaagtttgctttctgaagaagatctcn

SEQ ID NO: 217637 - DNA, 1394 bp, Zea Mays
atgccgttaggtatgttagtatgttcaaacgtggctatagtgactgtggcacttactgcacaatggccttgggcggctgacatcattgctgtttgtacctcgttgttggatacgttgccagcagtcacaacacctactgaaagggcagatgacgatgatgagatgcccatggatgtcaatattaaaattaatcttgatgttgatttggaaagacagataactgcagcaattgattcaaagctacttcaacatttggtgaatgccctcttcagaggtacattaagcacaaatgattctgatctgtctggaccatcagatgctgaagttgatgctgtaggatctatttgtgcttttcttcatgttacgttcaatacatttcctctagagcgaattatgactgtcctggcataccggactgaaattgttcctgcactatggaagttcataaaacgttgccatgcaagccgaagatggccattttttttgaagtttgcatcttcattacctgctgattctcctggttggctccttcccatgtctgtattctgtcccatatacaagcacatgttgaagatcattgataccggggagttctatgaacaggagaaacccctttcccttaaagatttgaagtccttggttctcattttaaaacaggcattatggcaacttctgtgggttattccatcctcttctactcagaaagtgtcacccaacccttcaggccttaaaaagttgtcagtggagaatgtcaagactagagctagggttgggttatctgaacttctcacacagttgcaagactggaacagccgactaccattcactgctgcaagtgatttctattctcaagaagctacgagcgaaaattttgtgtctcaagcaatacttggtaatactcgagcatcagagatcataaagcttgctccttttttggctccatttaccagtcgagtcaaaatattcacttgctgaataagacaggtgcgtactggttcaaatagtacaaattgcttgaaatacataactagcagcttaaataaagtggcgaaaagaatgcacagatagtaaaattcaggagtaaacttcgtaccatttgtgagggttgaggaaaaaaacatctgggatagcacaaaataaaaaatactttacacctgttgctgctgaaaattttcttttggttcaatgatgtgggatttatttgctccacgagtgtggcataaattcacttatagcctaaagctttgcagtgtttttctattttttttgagaagcatgtatgaatgttaaccaatttgcaatcattaaacttttgtgagctgagatattcccaaataagattgatacatcttctaaaacaatgtcttgaactttttttttccactttctgtgag

SEQ ID NO: 217638 - DNA, 2487 bp, Zea Mays
gactcctctttcccctccccgagcgtgcacgtctcgtcatcgccctactcgctcgccccatcccggagtctccccggctcccaaaccctagcgcctcccggacctcgtgagggaggcggcgatgttcttctccggtgacccatcggcgcggcggcgggtcgacctcggcgggcggagcagcaaggagcgggaccgcaaggtgctgctcgagcagacgcgcgaggagcggcgccggcgccagggcctccgcctccagaacacctccgccacgaagatccagaaattcttcagagggaagaaggctttggaattggcccgctcagaggttcggaagaatttttgctcaacttttggggagcattgcgagaggatagagtggaacatctttggcactaattctgactttcttcggcaattactgttcttcttcaatgcaaatgaagacaatgacatagctatactttgtcatgtctgcaatttgctgctgcaatatgttaaacaaggcggagatgttgtaactctcttcactggtgtgaatggctcctcgctgcaacctcttgttgctcaccgagtaaaaaaatttgccctcatctgtgtgcaagcagtctatcaaaagaggcatgattggggcagccaacttttaacaacacctggaaccacatcagtgccttctgtgtcattactggaaactgtaggttgcttgataaatccaaaatttctttggaactgcaaagtagttggttatcttcagcagagaaagatctattgcttatttcgtggcattatcgtatctgtaccgcaaaatgtcagaaattctggtcattttgatagtgcatctgtgctggagcaagtgcttatgcttgttgcttcgcatgttggccatcatccctgttgttgtctgaaagtggatccaagatggagtttctcgtctcagcttctgtccatcccttttctatggcatcgtttaccacaactcaagaaggttttctccgttaacgggctcaacaaatattatatccatcaaatagcttgccttttgcccagtcttgttgatgtccttccaaacgatatatcagctaatcatccaggatatgcgtgcgtccttgcaaatgttcttgaagctgcaacctggattttgtctgatgcaaagttagcttctgattcagcggctgacatcattgctgtttgtacctcgttgttggatacgttgccagcagtcacaacacctactgaaagggcagatgacgatgatgagatgcccatggatgtcaatattaaaattaatcttgatgttgatttggaaagacagataactgcagcaattgattcaaagctacttcaacatttggtgaatgccctcttcagaggtacattaagcacaaatgattctgatctgtctggaccatcagatgctgaagttgatgctgtaggatctatttgtgcttttcttcatgttacgttcaatacatttcctctagagcgaattatgactgtcctggcataccggactgaaattgttcctgcactatggaagttcataaaacgttgccatgcaagccgaagatggccattttttttgaagtttgcatcttcattacctgctgattctcctggttggctccttcccatgtctgtattctgtcccatatacaagcacatgttgaagatcattgataccggggagttctatgaacaggagaaacccctttcccttaaagatttgaagtccttggttctcattttaaaacaggcattatggcaacttctgtgggttattccatcctcttctactcagaaagtgtcacccaacccttcaggccttaaaaagttgtcagtggagaatgtcaagactagagctagggttgggttatctgaacttctcacacagttgcaagactggaacagccgactaccattcactgctgcaagtgatttctattctcaagaagctacgagcgaaaattttgtgtctcaagcaatacttggtaatactcgagcatcagagatcataaagcttgctccttttttggctccatttaccagtcgagtcaaaatattcacttgctgaataagacaggtgcgtactggttcaaatagtacaaattgcttgaaatacataactagcagcttaaataaagtggcgaaaagaatgcacagatagtaaaattcaggagtaaacttcgtaccatttgtgagggttgaggaaaaaaacatctgggatagcacaaaataaaaaatactttacacctgttgctgctgaaaattttcttttggttcaatgatgtgggatttatttgctccacgagtgtggcataaattcacttatagcctaaagctttgcagtgtttttctattttttttgagaagcatgtatgaatgttaaccaatttgcaatcattaaacttttgtgagctgagatattcccaaataagattgatacatcttctaaaacaatgtcttgaactttttttttccactttctgtgag

SEQ ID NO: 217639 - DNA, 2483 bp, Zea Mays
ctcgactcctctttcccctccccgagcgtgcacgtctcgtcatcgccctactcgctcgccccatcccggagtctccccggctcccaaaccctagcgcctcccggacctcgcaggtgagggaggcggcgatgttcttctccggtgacccatcggcgcggcggcgggtcgacctcggcgggcggagcagcaaggagcgggaccgcaaggtgctgctcgagcagacgcgcgaggagcggcgccggcgccagggcctccgcctccagaacacctccgccacgaagatccagagggaagaaggctttggaattggcccgctcagaggttcggaagaatttttgctcaacttttggggagcattgcgagaggatagagtggaacatctttggcactaattctgactttcttcggcaattactgttcttcttcaatgcaaatgaagacaatgacatagctatactttgtcatgtctgcaatttgctgctgcaatatgttaaacaaggcggagatgttgtaactctcttcactggtgtgaatggctcctcgctgcaacctcttgttgctcaccgagtaaaaaaatttgccctcatctgtgtgcaagcagtctatcaaaagaggcatgattggggcagccaacttttaacaacacctggaaccacatcagtgccttctgtgtcattactggaaactgtaggttgcttgataaatccaaaatttctttggaactgcaaagtagttggttatcttcagcagagaaagatctattgcttatttcgtggcattatcgtatctgtaccgcaaaatgtcagaaattctggtcattttgatagtgcatctgtgctggagcaagtgcttatgcttgttgcttcgcatgttggccatcatccctgttgttgtctgaaagtggatccaagatggagtttctcgtctcagcttctgtccatcccttttctatggcatcgtttaccacaactcaagaaggttttctccgttaacgggctcaacaaatattatatccatcaaatagcttgccttttgcccagtcttgttgatgtccttccaaacgatatatcagctaatcatccaggatatgcgtgcgtccttgcaaatgttcttgaagctgcaacctggattttgtctgatgcaaagttagcttctgattcagcggctgacatcattgctgtttgtacctcgttgttggatacgttgccagcagtcacaacacctactgaaagggcagatgacgatgatgagatgcccatggatgtcaatattaaaattaatcttgatgttgatttggaaagacagataactgcagcaattgattcaaagctacttcaacatttggtgaatgccctcttcagaggtacattaagcacaaatgattctgatctgtctggaccatcagatgctgaagttgatgctgtaggatctatttgtgcttttcttcatgttacgttcaatacatttcctctagagcgaattatgactgtcctggcataccggactgaaattgttcctgcactatggaagttcataaaacgttgccatgcaagccgaagatggccattttttttgaagtttgcatcttcattacctgctgattctcctggttggctccttcccatgtctgtattctgtcccatatacaagcacatgttgaagatcattgataccggggagttctatgaacaggagaaacccctttcccttaaagatttgaagtccttggttctcattttaaaacaggcattatggcaacttctgtgggttattccatcctcttctactcagaaagtgtcacccaacccttcaggccttaaaaagttgtcagtggagaatgtcaagactagagctagggttgggttatctgaacttctcacacagttgcaagactggaacagccgactaccattcactgctgcaagtgatttctattctcaagaagctacgagcgaaaattttgtgtctcaagcaatacttggtaatactcgagcatcagagatcataaagcttgctccttttttggctccatttaccagtcgagtcaaaatattcacttgctgaataagacaggtgcgtactggttcaaatagtacaaattgcttgaaatacataactagcagcttaaataaagtggcgaaaagaatgcacagatagtaaaattcaggagtaaacttcgtaccatttgtgagggttgaggaaaaaaacatctgggatagcacaaaataaaaaatactttacacctgttgctgctgaaaattttcttttggttcaatgatgtgggatttatttgctccacgagtgtggcataaattcacttatagcctaaagctttgcagtgtttttctattttttttgagaagcatgtatgaatgttaaccaatttgcaatcattaaacttttgtgagctgagatattcccaaataagattgatacatcttctaaaacaatgtcttgaactttttttttccactttctgtgag

SEQ ID NO: 217640 - DNA, 1781 bp, Zea Mays
ccaccgtctcgactctcgactcctctttcccctccccgagcgtgcacgtctcgtcatcgccctactcgctcgccccatcccggagtctccccggctcccaaaccctagcgcctcccggacctcgtgagggaggcggcgatgttcttctccggtgacccatcggcgcggcggcgggtcgacctcggcgggcggagcagcaaggagcgggaccgcaaggtgctgctcgagcagacgcgcgaggagcggcgccggcgccagggcctccgcctccagaacacctccgccacgaagatccagaaattcttcagagggaagaaggctttggaattggcccgctcagaggttcggaagaatttttgctcaacttttggggagcattgcgagaggatagagtggaacatctttggcactaattctgactttcttcggcaattactgttcttcttcaatgcaaatgaagacaatgacatagctatactttgtcatgtctgcaatttgctgctgcaatatgttaaacaaggcggagatgttgtaactctcttcactggtgtgaatggctcctcgctgcaacctcttgttgctcaccgagtaaaaaaatttgccctcatctgtgtgcaagcagtctatcaaaagaggcatgattggggcagccaacttttaacaacacctggaaccacatcagtgccttctgtgtcattactggaaactgtaggttgcttgataaatccaaaatttctttggaactgcaaagtagttggttatcttcagcagagaaagatctattgcttatttcgtggcattatcgtatctgtaccgcaaaatgtcagaaattctggtcattttgatagtgcatctgtgctggagcaagtgcttatgcttgttgcttcgcatgttggccatcatccctgttgttgtctgaaagtggatccaagatggagtttctcgtctcagcttctgtccatcccttttctatggcatcgtttaccacaactcaagaaggttttctccgttaacgggctcaacaaatattatatccatcaaatagcttgccttttgcccagtcttgttgatgtccttccaaacgatatatcagctaatcatccaggatatgcgtgcgtccttgcaaatgttcttgaagctgcaacctggattttgtctgatgcaaagttagcttctgattcagcggctgacatcattgctgtttgtacctcgttgttggatacgttgccagcagtcacaacacctactgaaagggcagatgacgatgatgagatgcccatggatgtcaatattaaaattaatcttgatgttgatttggaaagacagataactgcagcaattgattcaaagctacttcaacatttggtgaatgccctcttcagaggtacattaagcacaaatgattctgatctgtctggaccatcagatgctgaagttgatgctgtaggatctatttgtgcttttcttcatgttacgttcaatacatttcctctagagcgaattatgactgtcctggcataccggactgaaattgttcctgcactatggaagttcataaaacgttgccatgcaagccgaagatggccattttttttgaagtttgcatcttcattacctgctgattctcctggttggctccttcccatgtctgtattctgtcccatatacaagcacatgttgaagatcattgataccggggagttctatgaacaggagaaacccctttcccttaaagatttgaagtccttggttctcattttaaaacagtactacatcaatct

SEQ ID NO: 217641 - DNA, 4922 bp, Zea Mays
acctcgaacgcgatggcggcgccgctcgcccctctcactgcggccgcggtgctccgcctcgggagccgaggcctgcgccaccgcatcctcctcgcttcgctccgcccctgctcctccgcaaccccgccccatcgttccgccctcccggccgctgcacgccgggccccgccgcctcctcgccgtttcgcccacactcttgccgcgtctgcggccacggccatctccgagggtcaggcggatttagtgcctggttcaacaacttcaaccaagggacgcatctaccacgagacgtatggttgccaaatgaatataaatgacatggagattgtgctttctatcatgaaaaatgaaggctatgatgaaattgtccctgatcctgagagtgcagagataatatttatcaacacctgtgccatccgggacaatgcagagcagaaagtctggcagcgtctcaactacttttggtttttgaaaagggaatggaaagctaatgttgctgaaggtagagcaaaatctatgcgtcctccaaagattgctgtcctggggtgcatggcagaacgactgaaggagaaaatactcgattctgataagatggttgatgttgtttgtggacctgatgcatatagggatttgcctaggttgcttcaggaagtcgattacggccacaagggcatgaacacacttctatcactcgaggaaacttatgctgatatcaccccagtaaggatctctgacaattcaattacggcatttgtgtcaatcatgagaggttgcaataatatgtgctcattctgcatagttcccttcactagaggtagggaaaggtctcgcccagtgtcttctattgtccgtgaggttggtgagctatggaaagttggtgtgaaggaggtaatgcttcttggtcagaatgtaaacagctataatgacacttctgaagtagaagagttggagcctggcaaaaattggcaactcagtgaaggattttccagcatgtgcaaggtgaagaatatggggctgcgttttgctgatctcctggatcgattatctttggaataccctgagatgcggttcaggtttacctcaccacacccaaaggatttcccagatgagctactgtatttgatgcgggataggtataacatctgcaatcttattcacttaccagcacaaacaggcagtacagcggcgctggaacgaatgcggaggggttacactcgagaagcatacttagaacttgtccacaaaattcgtgatgtcattcctgatgttgggctaagcagtgatttcataactggcttttgtggagagacagaagacgagcacgccgagacccttagccttgtgagggctgttggatacgacatggcctacatgtttgcatacagcatgagagagaagacccacgctcaccggaactacgaggacgatgtacccgaaggtgtgaaacagaggcggctcatggaactgatcaacactttccgcgagaccacgaagaagaactacgactctcaagtcggcacagtgcagctcgttctcgtggaggggcccaacaagcgtgctcccaaaacggaagtgatagggaagactgatcggggccacaaggtgtcgtttgcccgcgtccctgtcccgcacacgttcgaaggcgaagaagcacgtgagccggcagtcggtgacttcgtcgagccaaatttctgtgcggtgttggtcctcccggaacaaattctgtgcagtgtcgcgaaaagcagcatacgcgcaaattcaaaaccacagattcacagcactacgctgcaaatcaaaacaaaactgaacgactcgagggagccctcgactgtcgaccatctccagccgtctatccgcggtcggacggtccaaacacgcatcaaatcaaacggacgaaaatatccccaatcccctaaaccccgttcgttgcccaccaacgccaccctctgtcatccaccaccatccatggccatggcgtcctccccggcctgccacttccgccacccgccccgcctccgcctcctcctcccgctgtccacctcggccccccacccgtggctctactcctggtcgcacccgcgccagcgcggccgactccgcgcgccgcccgccgcgctcgacctccgtccggagccgtccccgtcgtccgactccgacgatgaggacgccgtcggtgccagccgctcctccggccgctccaccatgtccctcatcctcagccgcctccgccgcgccggctactccggcgaggacccgcgtgccgccgccccaccgcacccgccgcgggggtcggtcgaggacgtcttccgcgccgacgatggcgtgctccccaacgcgcgcggcgggttcgacgccgacgacgaggagcgggcgctcggggacgcccgcttcccgtgggagcgccccatgccgccgcccgaggccgcgccgcggtccgcgcggtcgcccacgtggatggcggagctgacgctccccgccgcggagctcaggcggctgcggcacgccgccatcaggatcaagtccaggaccaaggtgggcggggccggggtcacgcgcgagatcgtggagaagattaaggagaaatggaagacggaggaggtggtcagggtcaaggtctctggcacgccggcgctcaatatgcgcctcttccacgagatactcgagagaaaaacaggaggattagtaatatggagatcagggacttctgtttctctgtaccggggagtagattatgatgaaccagaacccactaagaaatcaaagaagaattcacagtctcttgctatggatttcccaattaaggggtcttctaatccttccttactaccaactgagacagcgaacagtgtacgagacagcaatgtagctttagtttctaatgctgcgaaagaggaactagttgtacaagcaccagaaatcaagtatgaagatgaaattgacaaactgttggatgaacttggcccaagatacactgactggcctggatctgacccgttaccagtagatgcagatttacttcctgcaaacatgccaggttacaagccccctttcagagttctgccatatggtgttcggccatctcttagccgaagggacactaccaatttacgccgtcttgctcggggactgcctcctcactttgctctcggacgaagcagacaactccaaggcttagctaatgctatggtaaagttgtgggagaaaagttctattgctaaaattgctttgaagagaggagtacagcttaccaccagtgagaggatggctgaagatattaaaaaattaacaggtggtgtgatgctttcaaggaacaatgaatttatagtcttctacagagggaaggatttcttgtcctcagaacttgcagaggtgctactagagagggaaagattagcaaagtcacttcaagatgaagaagaagcacggcgaaaggcagcgtcttatttttcaagtgctgagacatatgcacagcccactgtagctggtactctaggagagactctggaggctaactctaaatatggaactaaacatgatgagaatcatgcagacaaaatggcaagaactattgaagctgcaagacatgctgacctcgtaagaaagctagagtggaagctttcacttgcacagaaaaagatggagaaagccgaaagggtactaggaaaggttgagacagccctgaggccaaccgaagattccagacctcctgaaacaataacagatgaagagagattcatgttccggaagcttggtctaaggatgaaggcatttctgctccttggaagaagaggagtttttgacggcacaattgagaacatgcacttgcactggaagtacagggagctggtgaagatactagtgaaagcgaagtcttttgcagacgtgaagaggatagcactgtcgctggaagccgagagcgggggaatcctagtttcagtcgacaaagtctccaaaggctatgccattgttgtgttccgagggaagaactacagacgcccttcctcgctcagacctagaaatctcctgtcaaagcggaaggctttggccagatccatcgagctccagagacatcaggccctgagtcgtcatttcgcaaagctaaacaggaaggtggagcggcttaaggcagaactggtccagatggaagacgtgaaggagcaaggagacgaggagctgtacgccaaactggatgccgcctattcgagcgacgacgaagacatggaggatgaggacgacgaggcctacctcaagcgctttgacaatgaggtcgccggtgctaccgccgacgacgatggcagcgacgactacacctccgccgccgacgaggccgattaccccgactcagacgacgaagctggtgattgctccgaagacgaaggcgaggacgacgaagatgaggcggctgccggagtctctgacgctggcttccacggcgaagtagtaggtttcagttccgacaccgacagacgaaaccacgacgtaaatgagtactagaacagtgctggttgtttgatgcatcggcgtcagcgcttcacgtggggttcgtcaggcttcgctggctggaatgcgcgtggtgtaggtggaaggccctacgctgcttggcggtgccggtgctgctgggggcgcatgaacgatgaatcctgcggctgacgccctcgtttccggcctcgggcccaatgcatcgagccaggaaggtgtccgctcctcaccgcgagagcaggcagttcgactttgcgcgtaccgtacgcaaccttccgtgttcctttgcatggtgactggtgaggtaatgccaaaacatcacagagcggtgagcactgcactttgtacgaaacgcgcaggacaatccactgtccatacccataagacataaaatacgtactccttctgtccacataaattagttattttaggtttgttctaag

SEQ ID NO: 217642 - DNA, 4796 bp, Zea Mays
gagagagtggtgtccggttcgagtttagtgcctggttcaacaacttcaaccaagggacgcatctaccacgagacgtatggttgccaaatgaatataaatgacatggagattgtgctttctatcatgaaaaatgaaggctatgatgaaattgtccctgatcctgagagtgcagagataatatttatcaacacctgtgccatccgggacaatgcagagcagaaagtctggcagcgtctcaactacttttggtttttgaaaagggaatggaaagctaatgttgctgaaggtagagcaaaatctatgcgtcctccaaagattgctgtcctggggtgcatggcagaacgactgaaggagaaaatactcgattctgataagatggttgatgttgtttgtggacctgatgcatatagggatttgcctaggttgcttcaggaagtcgattacggccacaagggcatgaacacacttctatcactcgaggaaacttatgctgatatcaccccagtaaggatctctgacaattcaattacggcatttgtgtcaatcatgagaggttgcaataatatgtgctcattctgcatagttcccttcactagaggtagggaaaggtctcgcccagtgtcttctattgtccgtgaggttggtgagctatggaaagttggtgtgaaggaggtaatgcttcttggtcagaatgtaaacagctataatgacacttctgaagtagaagagttggagcctggcaaaaattggcaactcagtgaaggattttccagcatgtgcaaggtgaagaatatggggctgcgttttgctgatctcctggatcgattatctttggaataccctgagatgcggttcaggtttacctcaccacacccaaaggatttcccagatgagctactgtatttgatgcgggataggtataacatctgcaatcttattcacttaccagcacaaacaggcagtacagcggcgctggaacgaatgcggaggggttacactcgagaagcatacttagaacttgtccacaaaattcgtgatgtcattcctgatgttgggctaagcagtgatttcataactgccaccgccggttggagactgcagcagtgcagcaggcgagcaggactgcaggagaaggggcagggtgctgtagctgccggtgtagccgccggcttttgtggagagacagaagacgagcacgccgagacccttagccttgtgagggctgttggatacgacatggcctacatgtttgcatacagcatgagagagaagacccacgctcaccggaactacgaggacgatgtacccgaaggtgtgaaacagaggcggctcatggaactgatcaacactttccgcgagaccacgaagaagaactacgactctcaagtcggcacagtgcagctcgttctcgtggaggggcccaacaagcgtgctcccaaaacggaagtgatagggaagactgatcggggccacaaggtgtcgtttgcccgcgtccctgtcccgcacacgttcgaaggcgaagaagcacgtgagccggcagtcggtgacttcgtcgagccaaatttctgtgcggtgttggtcctcccggaacaaattctgtgcagtgtcgcgaaaagcagcatacgcgcaaattcaaaaccacagattcacagcactacgctgcaaatcaaaacaaaactgaacgactcgagggagccctcgactgtcgaccatctccagccgtctatccgcggtcggacggtccaaacacgcatcaaatcaaacggacgaaaatatccccaatcccctaaaccccgttcgttgcccaccaacgccaccctctgtcatccaccaccatccatggccatggcgtcctccccggcctgccacttccgccacccgccccgcctccgcctcctcctcccgctgtccacctcggccccccacccgtggctctactcctggtcgcacccgcgccagcgcggccgactccgcgcgccgcccgccgcgctcgacctccgtccggagccgtccccgtcgtccgactccgacgatgaggacgccgtcggtgccagccgctcctccggccgctccaccatgtccctcatcctcagccgcctccgccgcgccggctactccggcgaggacccgcgtgccgccgccccaccgcacccgccgcgggggtcggtcgaggacgtcttccgcgccgacgatggcgtgctccccaacgcgcgcggcgggttcgacgccgacgacgaggagcgggcgctcggggacgcccgcttcccgtgggagcgccccatgccgccgcccgaggccgcgccgcggtccgcgcggtcgcccacgtggatggcggagctgacgctccccgccgcggagctcaggcggctgcggcacgccgccatcaggatcaagtccaggaccaaggtgggcggggccggggtcacgcgcgagatcgtggagaagattaaggagaaatggaagacggaggaggtggtcagggtcaaggtctctggcacgccggcgctcaatatgcgcctcttccacgagatactcgagagaaaaacaggaggattagtaatatggagatcagggacttctgtttctctgtaccggggagtagattatgatgaaccagaacccactaagaaatcaaagaagaattcacagtctcttgctatggatttcccaattaaggggtcttctaatccttccttactaccaactgagacagcgaacagtgtacgagacagcaatgtagctttagtttctaatgctgcgaaagaggaactagttgtacaagcaccagaaatcaagtatgaagatgaaattgacaaactgttggatgaacttggcccaagatacactgactggcctggatctgacccgttaccagtagatgcagatttacttcctgcaaacatgccaggttacaagccccctttcagagttctgccatatggtgttcggccatctcttagccgaagggacactaccaatttacgccgtcttgctcggggactgcctcctcactttgctctcggacgaagcagacaactccaaggcttagctaatgctatggtaaagttgtgggagaaaagttctattgctaaaattgctttgaagagaggagtacagcttaccaccagtgagaggatggctgaagatattaaaaaattaacaggtggtgtgatgctttcaaggaacaatgaatttatagtcttctacagagggaaggatttcttgtcctcagaacttgcagaggtgctactagagagggaaagattagcaaagtcacttcaagatgaagaagaagcacggcgaaaggcagcgtcttatttttcaagtgctgagacatatgcacagcccactgtagctggtactctaggagagactctggaggctaactctaaatatggaactaaacatgatgagaatcatgcagacaaaatggcaagaactattgaagctgcaagacatgctgacctcgtaagaaagctagagtggaagctttcacttgcacagaaaaagatggagaaagccgaaagggtactaggaaaggttgagacagccctgaggccaaccgaagattccagacctcctgaaacaataacagatgaagagagattcatgttccggaagcttggtctaaggatgaaggcatttctgctccttggaagaagaggagtttttgacggcacaattgagaacatgcacttgcactggaagtacagggagctggtgaagatactagtgaaagcgaagtcttttgcagacgtgaagaggatagcactgtcgctggaagccgagagcgggggaatcctagtttcagtcgacaaagtctccaaaggctatgccattgttgtgttccgagggaagaactacagacgcccttcctcgctcagacctagaaatctcctgtcaaagcggaaggctttggccagatccatcgagctccagagacatcaggccctgagtcgtcatttcgcaaagctaaacaggaaggtggagcggcttaaggcagaactggtccagatggaagacgtgaaggagcaaggagacgaggagctgtacgccaaactggatgccgcctattcgagcgacgacgaagacatggaggatgaggacgacgaggcctacctcaagcgctttgacaatgaggtcgccggtgctaccgccgacgacgatggcagcgacgactacacctccgccgccgacgaggccgattaccccgactcagacgacgaagctggtgattgctccgaagacgaaggcgaggacgacgaagatgaggcggctgccggagtctctgacgctggcttccacggcgaagtagtaggtttcagttccgacaccgacagacgaaaccacgacgtaaatgagtactagaacagtgctggttgtttgatgcatcggcgtcagcgcttcacgtggggttcgtcaggcttcgctggctggaatgcgcgtggtgtaggtggaaggccctacgctgcttggcggtgccggtgctgctgggggcgcatgaacgatgaatcctgcggctgacgccctcgtttccggcctcgggcccaatgcatcgagccaggaaggtgtccgctcctcaccgcgagagcaggcagttcgactttgcgcgtaccgtacgcaaccttccgtgttcctttgcatggtgactggtgaggtaatgccaaaacatcacagagcggtgagcactgcactttgtacgaaacgcgcaggacaatccactgtccatacccataagacataaaatacgtactccttctgtccacataaattagttattttaggtttgttctaag

SEQ ID NO: 217643 - DNA, 4795 bp, Zea Mays
ctctgagagagtggtgtccggttcgagtgcctggttcaacaacttcaaccaagggacgcatctaccacgagacgtatggttgccaaatgaatataaatgacatggagattgtgctttctatcatgaaaaatgaaggctatgatgaaattgtccctgatcctgagagtgcagagataatatttatcaacacctgtgccatccgggacaatgcagagcagaaagtctggcagcgtctcaactacttttggtttttgaaaagggaatggaaagctaatgttgctgaaggtagagcaaaatctatgcgtcctccaaagattgctgtcctggggtgcatggcagaacgactgaaggagaaaatactcgattctgataagatggttgatgttgtttgtggacctgatgcatatagggatttgcctaggttgcttcaggaagtcgattacggccacaagggcatgaacacacttctatcactcgaggaaacttatgctgatatcaccccagtaaggatctctgacaattcaattacggcatttgtgtcaatcatgagaggttgcaataatatgtgctcattctgcatagttcccttcactagaggtagggaaaggtctcgcccagtgtcttctattgtccgtgaggttggtgagctatggaaagttggtgtgaaggaggtaatgcttcttggtcagaatgtaaacagctataatgacacttctgaagtagaagagttggagcctggcaaaaattggcaactcagtgaaggattttccagcatgtgcaaggtgaagaatatggggctgcgttttgctgatctcctggatcgattatctttggaataccctgagatgcggttcaggtttacctcaccacacccaaaggatttcccagatgagctactgtatttgatgcgggataggtataacatctgcaatcttattcacttaccagcacaaacaggcagtacagcggcgctggaacgaatgcggaggggttacactcgagaagcatacttagaacttgtccacaaaattcgtgatgtcattcctgatgttgggctaagcagtgatttcataactgccaccgccggttggagactgcagcagtgcagcaggcgagcaggactgcaggagaaggggcagggtgctgtagctgccggtgtagccgccggcttttgtggagagacagaagacgagcacgccgagacccttagccttgtgagggctgttggatacgacatggcctacatgtttgcatacagcatgagagagaagacccacgctcaccggaactacgaggacgatgtacccgaaggtgtgaaacagaggcggctcatggaactgatcaacactttccgcgagaccacgaagaagaactacgactctcaagtcggcacagtgcagctcgttctcgtggaggggcccaacaagcgtgctcccaaaacggaagtgatagggaagactgatcggggccacaaggtgtcgtttgcccgcgtccctgtcccgcacacgttcgaaggcgaagaagcacgtgagccggcagtcggtgacttcgtcgagccaaatttctgtgcggtgttggtcctcccggaacaaattctgtgcagtgtcgcgaaaagcagcatacgcgcaaattcaaaaccacagattcacagcactacgctgcaaatcaaaacaaaactgaacgactcgagggagccctcgactgtcgaccatctccagccgtctatccgcggtcggacggtccaaacacgcatcaaatcaaacggacgaaaatatccccaatcccctaaaccccgttcgttgcccaccaacgccaccctctgtcatccaccaccatccatggccatggcgtcctccccggcctgccacttccgccacccgccccgcctccgcctcctcctcccgctgtccacctcggccccccacccgtggctctactcctggtcgcacccgcgccagcgcggccgactccgcgcgccgcccgccgcgctcgacctccgtccggagccgtccccgtcgtccgactccgacgatgaggacgccgtcggtgccagccgctcctccggccgctccaccatgtccctcatcctcagccgcctccgccgcgccggctactccggcgaggacccgcgtgccgccgccccaccgcacccgccgcgggggtcggtcgaggacgtcttccgcgccgacgatggcgtgctccccaacgcgcgcggcgggttcgacgccgacgacgaggagcgggcgctcggggacgcccgcttcccgtgggagcgccccatgccgccgcccgaggccgcgccgcggtccgcgcggtcgcccacgtggatggcggagctgacgctccccgccgcggagctcaggcggctgcggcacgccgccatcaggatcaagtccaggaccaaggtgggcggggccggggtcacgcgcgagatcgtggagaagattaaggagaaatggaagacggaggaggtggtcagggtcaaggtctctggcacgccggcgctcaatatgcgcctcttccacgagatactcgagagaaaaacaggaggattagtaatatggagatcagggacttctgtttctctgtaccggggagtagattatgatgaaccagaacccactaagaaatcaaagaagaattcacagtctcttgctatggatttcccaattaaggggtcttctaatccttccttactaccaactgagacagcgaacagtgtacgagacagcaatgtagctttagtttctaatgctgcgaaagaggaactagttgtacaagcaccagaaatcaagtatgaagatgaaattgacaaactgttggatgaacttggcccaagatacactgactggcctggatctgacccgttaccagtagatgcagatttacttcctgcaaacatgccaggttacaagccccctttcagagttctgccatatggtgttcggccatctcttagccgaagggacactaccaatttacgccgtcttgctcggggactgcctcctcactttgctctcggacgaagcagacaactccaaggcttagctaatgctatggtaaagttgtgggagaaaagttctattgctaaaattgctttgaagagaggagtacagcttaccaccagtgagaggatggctgaagatattaaaaaattaacaggtggtgtgatgctttcaaggaacaatgaatttatagtcttctacagagggaaggatttcttgtcctcagaacttgcagaggtgctactagagagggaaagattagcaaagtcacttcaagatgaagaagaagcacggcgaaaggcagcgtcttatttttcaagtgctgagacatatgcacagcccactgtagctggtactctaggagagactctggaggctaactctaaatatggaactaaacatgatgagaatcatgcagacaaaatggcaagaactattgaagctgcaagacatgctgacctcgtaagaaagctagagtggaagctttcacttgcacagaaaaagatggagaaagccgaaagggtactaggaaaggttgagacagccctgaggccaaccgaagattccagacctcctgaaacaataacagatgaagagagattcatgttccggaagcttggtctaaggatgaaggcatttctgctccttggaagaagaggagtttttgacggcacaattgagaacatgcacttgcactggaagtacagggagctggtgaagatactagtgaaagcgaagtcttttgcagacgtgaagaggatagcactgtcgctggaagccgagagcgggggaatcctagtttcagtcgacaaagtctccaaaggctatgccattgttgtgttccgagggaagaactacagacgcccttcctcgctcagacctagaaatctcctgtcaaagcggaaggctttggccagatccatcgagctccagagacatcaggccctgagtcgtcatttcgcaaagctaaacaggaaggtggagcggcttaaggcagaactggtccagatggaagacgtgaaggagcaaggagacgaggagctgtacgccaaactggatgccgcctattcgagcgacgacgaagacatggaggatgaggacgacgaggcctacctcaagcgctttgacaatgaggtcgccggtgctaccgccgacgacgatggcagcgacgactacacctccgccgccgacgaggccgattaccccgactcagacgacgaagctggtgattgctccgaagacgaaggcgaggacgacgaagatgaggcggctgccggagtctctgacgctggcttccacggcgaagtagtaggtttcagttccgacaccgacagacgaaaccacgacgtaaatgagtactagaacagtgctggttgtttgatgcatcggcgtcagcgcttcacgtggggttcgtcaggcttcgctggctggaatgcgcgtggtgtaggtggaaggccctacgctgcttggcggtgccggtgctgctgggggcgcatgaacgatgaatcctgcggctgacgccctcgtttccggcctcgggcccaatgcatcgagccaggaaggtgtccgctcctcaccgcgagagcaggcagttcgactttgcgcgtaccgtacgcaaccttccgtgttcctttgcatggtgactggtgaggtaatgccaaaacatcacagagcggtgagcactgcactttgtacgaaacgcgcaggacaatccactgtccatacccataagacataaaatacgtactccttctgtccacataaattagttattttaggtttgttctaag

SEQ ID NO: 217644 - DNA, 4923 bp, Zea Mays
ctgcgatccattgtcgagcttcgaggaatcgacggtcaagctttggcgaccaagtgatcgaactcttcgagcgggtatgaatgagtatggttgtgggtggggccaagaacatcaaattcacattggagcaacatatgttctttgcaatattagtttggtaatttgaggtggcagacgatattactccaatcaagattgagaacttcgattgatctctgagagagtggtgtccggttcgagtttagtgcctggttcaacaacttcaaccaagggacgcatctaccacgagacgtatggttgccaaatgaatataaatgacatggagattgtgctttctatcatgaaaaatgaaggctatgatgaaattgtccctgatcctgagagtgcagagataatatttatcaacacctgtgccatccgggacaatgcagagcagaaagtctggcagcgtctcaactacttttggtttttgaaaagggaatggaaagctaatgttgctgaaggtagagcaaaatctatgcgtcctccaaagattgctgtcctggggtgcatggcagaacgactgaaggagaaaatactcgattctgataagatggttgatgttgtttgtggacctgatgcatatagggatttgcctaggttgcttcaggaagtcgattacggccacaagggcatgaacacacttctatcactcgaggaaacttatgctgatatcaccccagtaaggatctctgacaattcaattacggcatttgtgtcaatcatgagaggttgcaataatatgtgctcattctgcatagttcccttcactagaggtagggaaaggtctcgcccagtgtcttctattgtccgtgaggttggtgagctatggaaagttggtgtgaaggaggtaatgcttcttggtcagaatgtaaacagctataatgacacttctgaagtagaagagttggagcctggcaaaaattggcaactcagtgaaggattttccagcatgtgcaaggtgaagaatatggggctgcgttttgctgatctcctggatcgattatctttggaataccctgagatgcggttcaggtttacctcaccacacccaaaggatttcccagatgagctactgtatttgatgcgggataggtataacatctgcaatcttattcacttaccagcacaaacaggcagtacagcggcgctggaacgaatgcggaggggttacactcgagaagcatacttagaacttgtccacaaaattcgtgatgtcattcctgatgttgggctaagcagtgatttcataactggcttttgtggagagacagaagacgagcacgccgagacccttagccttgtgagggctgttggatacgacatggcctacatgtttgcatacagcatgagagagaagacccacgctcaccggaactacgaggacgatgtacccgaaggtgtgaaacagaggcggctcatggaactgatcaacactttccgcgagaccacgaagaagaactacgactctcaagtcggcacagtgcagctcgttctcgtggaggggcccaacaagcgtgctcccaaaacggaagtgatagggaagactgatcggggccacaaggtgtcgtttgcccgcgtccctgtcccgcacacgttcgaaggcgaagaagcacgtgagccggcagtcggtgacttcgtcgagccaaatttctgtgcggtgttggtcctcccggaacaaattctgtgcagtgtcgcgaaaagcagcatacgcgcaaattcaaaaccacagattcacagcactacgctgcaaatcaaaacaaaactgaacgactcgagggagccctcgactgtcgaccatctccagccgtctatccgcggtcggacggtccaaacacgcatcaaatcaaacggacgaaaatatccccaatcccctaaaccccgttcgttgcccaccaacgccaccctctgtcatccaccaccatccatggccatggcgtcctccccggcctgccacttccgccacccgccccgcctccgcctcctcctcccgctgtccacctcggccccccacccgtggctctactcctggtcgcacccgcgccagcgcggccgactccgcgcgccgcccgccgcgctcgacctccgtccggagccgtccccgtcgtccgactccgacgatgaggacgccgtcggtgccagccgctcctccggccgctccaccatgtccctcatcctcagccgcctccgccgcgccggctactccggcgaggacccgcgtgccgccgccccaccgcacccgccgcgggggtcggtcgaggacgtcttccgcgccgacgatggcgtgctccccaacgcgcgcggcgggttcgacgccgacgacgaggagcgggcgctcggggacgcccgcttcccgtgggagcgccccatgccgccgcccgaggccgcgccgcggtccgcgcggtcgcccacgtggatggcggagctgacgctccccgccgcggagctcaggcggctgcggcacgccgccatcaggatcaagtccaggaccaaggtgggcggggccggggtcacgcgcgagatcgtggagaagattaaggagaaatggaagacggaggaggtggtcagggtcaaggtctctggcacgccggcgctcaatatgcgcctcttccacgagatactcgagagaaaaacaggaggattagtaatatggagatcagggacttctgtttctctgtaccggggagtagattatgatgaaccagaacccactaagaaatcaaagaagaattcacagtctcttgctatggatttcccaattaaggggtcttctaatccttccttactaccaactgagacagcgaacagtgtacgagacagcaatgtagctttagtttctaatgctgcgaaagaggaactagttgtacaagcaccagaaatcaagtatgaagatgaaattgacaaactgttggatgaacttggcccaagatacactgactggcctggatctgacccgttaccagtagatgcagatttacttcctgcaaacatgccaggttacaagccccctttcagagttctgccatatggtgttcggccatctcttagccgaagggacactaccaatttacgccgtcttgctcggggactgcctcctcactttgctctcggacgaagcagacaactccaaggcttagctaatgctatggtaaagttgtgggagaaaagttctattgctaaaattgctttgaagagaggagtacagcttaccaccagtgagaggatggctgaagatattaaaaaattaacaggtggtgtgatgctttcaaggaacaatgaatttatagtcttctacagagggaaggatttcttgtcctcagaacttgcagaggtgctactagagagggaaagattagcaaagtcacttcaagatgaagaagaagcacggcgaaaggcagcgtcttatttttcaagtgctgagacatatgcacagcccactgtagctggtactctaggagagactctggaggctaactctaaatatggaactaaacatgatgagaatcatgcagacaaaatggcaagaactattgaagctgcaagacatgctgacctcgtaagaaagctagagtggaagctttcacttgcacagaaaaagatggagaaagccgaaagggtactaggaaaggttgagacagccctgaggccaaccgaagattccagacctcctgaaacaataacagatgaagagagattcatgttccggaagcttggtctaaggatgaaggcatttctgctccttggaagaagaggagtttttgacggcacaattgagaacatgcacttgcactggaagtacagggagctggtgaagatactagtgaaagcgaagtcttttgcagacgtgaagaggatagcactgtcgctggaagccgagagcgggggaatcctagtttcagtcgacaaagtctccaaaggctatgccattgttgtgttccgagggaagaactacagacgcccttcctcgctcagacctagaaatctcctgtcaaagcggaaggctttggccagatccatcgagctccagagacatcaggccctgagtcgtcatttcgcaaagctaaacaggaaggtggagcggcttaaggcagaactggtccagatggaagacgtgaaggagcaaggagacgaggagctgtacgccaaactggatgccgcctattcgagcgacgacgaagacatggaggatgaggacgacgaggcctacctcaagcgctttgacaatgaggtcgccggtgctaccgccgacgacgatggcagcgacgactacacctccgccgccgacgaggccgattaccccgactcagacgacgaagctggtgattgctccgaagacgaaggcgaggacgacgaagatgaggcggctgccggagtctctgacgctggcttccacggcgaagtagtaggtttcagttccgacaccgacagacgaaaccacgacgtaaatgagtactagaacagtgctggttgtttgatgcatcggcgtcagcgcttcacgtggggttcgtcaggcttcgctggctggaatgcgcgtggtgtaggtggaaggccctacgctgcttggcggtgccggtgctgctgggggcgcatgaacgatgaatcctgcggctgacgccctcgtttccggcctcgggcccaatgcatcgagccaggaaggtgtccgctcctcaccgcgagagcaggcagttcgactttgcgcgtaccgtacgcaaccttccgtgttcctttgcatggtgactggtgaggtaatgccaaaacatcacagagcggtgagcactgcactttgtacgaaacgcgcaggacaatccactgtccatacccataagacataaaatacgtactccttctgtccacataaattagttattttaggtttgttctaag

SEQ ID NO: 217645 - DNA, 1879 bp, Zea Mays
cccggtcgtctttctttcgggcctctccgagtggtcaataaaccccgcctcccttctgtcatcccgtacgtctcgacctcgcagccgcaaacgcgaaaccctagcctcgagctctatctccggccacagctggtcaggtaggaccgtaggaatctcctttcctcatcgttcctcgggtggttcgtgccccgcgccccgctgctttctgggttagcgacgaaggatgagcaggcgctggagccgcacgatctacgtcgggaacctccccggcgacatccgggagagggaggtggaggatctgttctacaagtatggtaaaattgttgacattgacctgaaggtccccccaagaccacctggttatgcttttgttgagtttgaagatcctcgtgatgctgaggaggcaattgctggacgggatggatacaactttgatggacaccgtctaagagtggaggctgctcatggtggtagaggtaatgcttcctcgcatgatcgttcaagtggctttggtggcggtggtggagcacgtcgtggtgtgtcgagacactcagagtatcgtgttcttgtcactggactgccttcttctgcatcatggcaggatttaaaggatcatatgcggaaggctggtgatgtttgtttctctgaagtgtatcgcgaaggcggtggcaccgtaggaattgtggactacacaaattatgatgatatgaaatatgctataaagaagctggatgatactgaattcaggaacgcctttgggcgagcctatataagggtgaaggaatataacggcaaacgtggtcgctcctactcacgtagccgaagcccaagtcgtagttacagcaaaagcaggagtccgagtaaatcacccaggactcgccgttcatcatctagatcccggtcaagatctgtttcttctcgttcaaggtccccatcaaaaggacgttctccatcaagactcaattatcttgcccttttatctgggattgtgcggtgatctggggattgcgcattaagatattgaggatgggattttcacaatttgctacagttcagttgattttataagagtttggcataagcgcattgtttggaatactggacataggagcgttaaggattggtgatctggattatggtggtacagtggctaggaatgtacttggagttcaatgcttggggaatgagttttcttcgtacctcaggcacacttcagatggttgctgtagttcatatatgcactgtcgacattgttatacaacaatgttacatttgcacggaactgaacacttctattttcatgagcttttattgctttgattcgacgcggcatcatggcttttggaaccaagttgttaaagctgcattttggatattgaatcagttgtttctggaacgttttgcagatcaccagcaagatcgaaatctcctaatgtttctccagcaaatggtgaagcagcaagccccaagaagcagagcccaaacaggagcccatctggctcacgctctcctgatgcgaagcctgaataaaattgctatgctgttaaaggattgcagatggagtcaggagctcttcttttcttaacatttgtcctctgttctagtaccatcagtgtcttatcgcagtacgagattggatgatattaactatctgtatcagcttgtatcgatggactccaagtgttgtcactcttgttgtctagtgtgctgaaggacccatttacttttgctaaacttttccattggtgattgttggatgcatggtgtggatttgtgctgtgttggctaaatcatgttgttctagaccttatgcatttttttcatttcactaaattacctgacggttgctgcatattatgcacagttttgcaccttgtga

SEQ ID NO: 217646 - DNA, 2336 bp, Zea Mays
cccggtcgtctttctttcgggcctctccgagtggtcaataaaccccgcctcccttctgtcatcccgtacgtctcgacctcgcagccgcaaacgcgaaaccctagcctcgagctctatctccggccacagctggtcaggttagcgacgaaggatgagcaggcgctggagccgcacgatctacgtcgggaacctccccggcgacatccgggagagggaggtggaggatctgttctacaagtatggtaaaattgttgacattgacctgaaggtccccccaagaccacctggttatgcttttgttgagtttgaagatcctcgtgatgctgaggaggcaattgctggacgggatggatacaactttgatggacaccgtctaagagtggaggctgctcatggtggtagaggtaatgcttcctcgcatgatcgttcaagtggctttggtggcggtggtggagcacgtcgtggtgtgtcgagacactcagagtatcgtgttcttgtcactggactgccttcttctgcatcatggcaggatttaaaggatcatatgcggaaggctggtgatgtttgtttctctgaagtgtatcgcgaaggcggtggcaccgtaggaattgtggactacacaaattatgatgatatgaaatatgctataaagaagctggatgatactgaattcaggaacgcctttgggcgagcctatataagggtgaaggaatataacggcaaacgtggtcgctcctactcacgtagccgaagcccaagtcgtagttacagcaaaagcaggagtccgagtaaatcacccaggactcgccgttcatcatctagatcccggtcaagatctgtttcttctcgttcaaggtccccatcaaaaggacgttctccatcaaggtaacatacactttcaaattctgagctttgaatccttatatatgtcaagttcttttctactgttttctccaaatcacaatatatatgcattagtagaatatctggacaaattatgaatatgcctacttctgtatcataatttcttgttgcctaccctgtcggcctttttcctttgcaaagattgctgttgttttgtagtctaaaacagtggctatcaatctttattaaagtgctgtcattgttccgtaaccttcatcggtctgaatattttgtatatagtaataagcttatcagttaagttcaagttaacatagttacactcccatgcatgtatacaatgatgatggcttgctgtacagtctgattgcttgggggttccttctcaagtgctcagagtctaatgaacgatatgaactgcttagtctgttctgttttgtttttgaagactcaattatcttgcccttttatctgggattgtgcggtgatctggggattgcgcattaagatattgaggatgggattttcacaatttgctacagttcagttgattttataaggtatggttattaattgagagtttgtatgaaaagctaaaatcgtcccattattttacctaatgccctgtaactgattgacatcagagtttggcataagcgcattgtttggaatactggacataggagcgttaaggattggtgatctggattatggtggtacagtggctaggaatgtacttggagttcaatgcttggggaatgagttttcttcgtacctcaggcacacttcagatggttgctgtagttcatatatgcactgtcgacattgttatacaacaatgttacatttgcacggaactgaacacttctattttcatgagcttttattgctttgattcgacgcggcatcatggcttttggaaccaagttgttaaagctgcattttggatattgaatcagttgtttctggaacgttttgcagatcaccagcaagatcgaaatctcctaatgtttctccagcaaatggtgaagcagcaagccccaagaagcagagcccaaacaggagcccatctggctcacgctctcctgatgcgaagcctgaataaaattgctatgctgttaaaggattgcagatggagtcaggagctcttcttttcttaacatttgtcctctgttctagtaccatcagtgtcttatcgcagtacgagattggatgatattaactatctgtatcagcttgtatcgatggactccaagtgttgtcactcttgttgtctagtgtgctgaaggacccatttacttttgctaaacttttccattggtgattgttggatgcatggtgtggatttgtgctgtgttggctaaatcatgttgttctagaccttatgcatttttttcatttcactaaattacctgacggttgctgcatattatgcacagttttgcaccttgtga

SEQ ID NO: 217647 - DNA, 1802 bp, Zea Mays
cccggtcgtctttctttcgggcctctccgagtggtcaataaaccccgcctcccttctgtcatcccgtacgtctcgacctcgcagccgcaaacgcgaaaccctagcctcgagctctatctccggccacagctggtcagcgacgaaggatgagcaggcgctggagccgcacgatctacgtcgggaacctccccggcgacatccgggagagggaggtggaggatctgttctacaagtatggtaaaattgttgacattgacctgaaggtccccccaagaccacctggttatgcttttgttgagtttgaagatcctcgtgatgctgaggaggcaattgctggacgggatggatacaactttgatggacaccgtctaagagtggaggctgctcatggtggtagaggtaatgcttcctcgcatgatcgttcaagtggctttggtggcggtggtggagcacgtcgtggtgtgtcgagacactcagagtatcgtgttcttgtcactggactgccttcttctgcatcatggcaggatttaaaggatcatatgcggaaggctggtgatgtttgtttctctgaagtgtatcgcgaaggcggtggcaccgtaggaattgtggactacacaaattatgatgatatgaaatatgctataaagaagctggatgatactgaattcaggaacgcctttgggcgagcctatataagggtgaaggaatataacggcaaacgtggtcgctcctactcacgtagccgaagcccaagtcgtagttacagcaaaagcaggagtccgagtaaatcacccaggactcgccgttcatcatctagatcccggtcaagatctgtttcttctcgttcaaggtccccatcaaaaggacgttctccatcaagactcaattatcttgcccttttatctgggattgtgcggtgatctggggattgcgcattaagatattgaggatgggattttcacaatttgctacagttcagttgattttataagagtttggcataagcgcattgtttggaatactggacataggagcgttaaggattggtgatctggattatggtggtacagtggctaggaatgtacttggagttcaatgcttggggaatgagttttcttcgtacctcaggcacacttcagatggttgctgtagttcatatatgcactgtcgacattgttatacaacaatgttacatttgcacggaactgaacacttctattttcatgagcttttattgctttgattcgacgcggcatcatggcttttggaaccaagttgttaaagctgcattttggatattgaatcagttgtttctggaacgttttgcagatcaccagcaagatcgaaatctcctaatgtttctccagcaaatggtgaagcagcaagccccaagaagcagagcccaaacaggagcccatctggctcacgctctcctgatgcgaagcctgaataaaattgctatgctgttaaaggattgcagatggagtcaggagctcttcttttcttaacatttgtcctctgttctagtaccatcagtgtcttatcgcagtacgagattggatgatattaactatctgtatcagcttgtatcgatggactccaagtgttgtcactcttgttgtctagtgtgctgaaggacccatttacttttgctaaacttttccattggtgattgttggatgcatggtgtggatttgtgctgtgttggctaaatcatgttgttctagaccttatgcatttttttcatttcactaaattacctgacggttgctgcatattatgcacagttttgcaccttgtga

SEQ ID NO: 217648 - DNA, 1425 bp, Zea Mays
cccggtcgtctttctttcgggcctctccgagtggtcaataaaccccgcctcccttctgtcatcccgtacgtctcgacctcgcagccgcaaacgcgaaaccctagcctcgagctctatctccggccacagctggtcaggtaggaccgtaggaatctcctttcctcatcgttcctcgggtggttcgtgccccgcgccccgctgctttctggcgacgaaggatgagcaggcgctggagccgcacgatctacgtcgggaacctccccggcgacatccgggagagggaggtggaggatctgttctacaagtatggtaaaattgttgacattgacctgaaggtccccccaagaccacctggttatgcttttgttgagtttgaagatcctcgtgatgctgaggaggcaattgctggacgggatggatacaactttgatggacaccgtctaagagtggaggctgctcatggtggtagaggtaatgcttcctcgcatgatcgttcaagtggctttggtggcggtggtggagcacgtcgtggtgtgtcgagacactcagagtatcgtgttcttgtcactggactgccttcttctgcatcatggcaggatttaaaggatcatatgcggaaggctggtgatgtttgtttctctgaagtgtatcgcgaaggcggtggcaccgtaggaattgtggactacacaaattatgatgatatgaaatatgctataaagaagctggatgatactgaattcaggaacgcctttgggcgagcctatataagggtgaaggaatataacggcaaacgtggtcgctcctactcacgtagccgaagcccaagtcgtagttacagcaaaagcaggagtccgagtaaatcacccaggactcgccgttcatcatctagatcccggtcaagatctgtttcttctcgttcaaggtccccatcaaaaggacgttctccatcaagatcaccagcaagatcgaaatctcctaatgtttctccagcaaatggtgaagcagcaagccccaagaagcagagcccaaacaggagcccatctggctcacgctctcctgatgcgaagcctgaataaaattgctatgctgttaaaggattgcagatggagtcaggagctcttcttttcttaacatttgtcctctgttctagtaccatcagtgtcttatcgcagtacgagattggatgatattaactatctgtatcagcttgtatcgatggactccaagtgttgtcactcttgttgtctagtgtgctgaaggacccatttacttttgctaaacttttccattggtgattgttggatgcatggtgtggatttgtgctgtgttggctaaatcatgttgttctagaccttatgcatttttttcatttcactaaattacctgacggttgctgcatattatgcacagttttgcaccttgtga

SEQ ID NO: 217649 - DNA, 1910 bp, Zea Mays
cccggtcgtctttctttcgggcctctccgagtggtcaataaaccccgcctcccttctgtcatcccgtacgtctcgacctcgcagccgcaaacgcgaaaccctagcctcgagctctatctccggccacagctggtcagcgacgaaggatgagcaggcgctggagccgcacgatctacgtcgggaacctccccggcgacatccgggagagggaggtggaggatctgttctacaagtatggtaaaattgttgacattgacctgaaggtccccccaagaccacctggttatgcttttgttgagtttgaagatcctcgtgatgctgaggaggcaattgctggacgggatggatacaactttgatggacaccgtctaagagtggaggctgctcatggtggtagaggtaatgcttcctcgcatgatcgttcaagtggctttggtggcggtggtggagcacgtcgtggtgtgtcgagacactcagagtatcgtgttcttgtcactggactgccttcttctgcatcatggcaggatttaaaggatcatatgcggaaggctggtgatgtttgtttctctgaagtgtatcgcgaaggcggtggcaccgtaggaattgtggactacacaaattatgatgatatgaaatatgctataaagaagctggatgatactgaattcaggaacgcctttgggcgagcctatataagggtgaaggaatataacggcaaacgtggtcgctcctactcacgtagccgaagcccaagtcgtagttacagcaaaagcaggagtccgagtaaatcacccaggactcgccgttcatcatctagatcccggtcaagatctgtttcttctcgttcaaggtccccatcaaaaggacgttctccatcaaggtaacatacactttcaaattctgagctttgaatccttatatatgtcaagttcttttctactgttttctccaaatcacaatatatatgcattagtagaatatctggacaaattatgaatatgcctacttctgtatcataatttcttgttgcctaccctgtcggcctttttcctttgcaaagattgctgttgttttgtagtctaaaacagtggctatcaatctttattaaagtgctgtcattgttccgtaaccttcatcggtctgaatattttgtatatagtaataagcttatcagttaagttcaagttaacatagttacactcccatgcatgtatacaatgatgatggcttgctgtacagtctgattgcttgggggttccttctcaagtgctcagagtctaatgaacgatatgaactgcttagtctgttctgttttgtttttgaagactcaattatcttgcccttttatctgggattgtgcggtgatctggggattgcgcattaagatattgaggatgggattttcacaatttgctacagttcagttgattttataagatcaccagcaagatcgaaatctcctaatgtttctccagcaaatggtgaagcagcaagccccaagaagcagagcccaaacaggagcccatctggctcacgctctcctgatgcgaagcctgaataaaattgctatgctgttaaaggattgcagatggagtcaggagctcttcttttcttaacatttgtcctctgttctagtaccatcagtgtcttatcgcagtacgagattggatgatattaactatctgtatcagcttgtatcgatggactccaagtgttgtcactcttgttgtctagtgtgctgaaggacccatttacttttgctaaacttttccattggtgattgttggatgcatggtgtggatttgtgctgtgttggctaaatcatgttgttctagaccttatgcatttttttcatttcactaaattacctgacggttgctgcatattatgcacagttttgcaccttgtga

SEQ ID NO: 217650 - DNA, 1770 bp, Zea Mays
atatgccttagttgatgttctgtatgcaagcaacaatggatttatgagataccaaatatcatttatctccatgatgtaacgaatatttggcacatccctttgttgcttagagatcagaaggccaatgaagctattttggaagtgttagaccttcgatggtatgccattggaccaaagtattaattatatatgcaacgtttgtgtcatctgttccactaataccagcagtgtgctattgttgtttgttctggcctgctacttgcaactgttagccgattaacataagaatttaacaactttttaaacctaaggtgtctatgttggtgatccttctaagctcagtatgaaggctgcatttaggaaggtttggtggttgaaagaagctggtggtagtattattggtggaaccatcaagagaaattcaggagatgagcaagaatccaaaaccacccaaggatgcgtaagagacagatgcattttctttttgttccactaattggctgttcccggatatatatgcaacgctcgtgtcatctgttccaatacttgaagaagcagcacgctacgagttgagatatgggcacagaaatagagctacaagaagtctattttcttcttatccttttgattaatcatgtgtttatatgattcaatcatggaaacaactgtcagttttgatagtgtgcaggatgtggatattttggcatattacacgttgagtggtgaattcaagtatcagtttgggtctagaaggtgaagctgatcagttgctgctggatgagacctatcacttcatgctccccttgacaaattcatggaaaataaaccaaaagggagccacatagctaaaggaagatggcacgatggatcacaaatgccccagctaaaaagcttaacctgaatcatcatattattggaggagagcttctagaattgtcaaaaaatgaagtgcctcctgaagatattgttttccaccgtttatatttgaacaagactggcccagttaatcgtaaggcaaagcggaaggactcagttcttgatgaaggaaaagtgtgaggagcttgagtatttttgtaggttgcagattcctaaggaatcaaatgtcatgaatcagatacttaaatccaactacattgtcagaatgaggtcctataatgaagctgaatttgttaatatattgacaattaagtcgtaattgtctctacataaatatagaaattaggaaaattgttttagaggaggactagaccaggcgaatggcttgccatggaaacagtagcagttgcagatgaggatatactatcaaggctatgaaaatggctactgctaggaatctagatggacagattgacatggtgaaggtgcttgtcttaaagaacaagacaaacttgccctcaccaactcttcagtaaacctttggtggtagagccacaacaggcaatggttatgggttcacctttagaggatgcaagacatttggcccagagctacaatgggacgtgctgcgatcaagatgtaggtatcaaagtacttgagcctgagcgggttagtgttgatatgctacgtgagtttgcacaggaagtttatataatgaagtgagtgatgagctttacttatgcttggactaagaaaattgtgtaacagtcacttcatgatacaacattttagaatgatgttccatcatttatttatgactgcccaagcaaattggattcgttgtaatgacttctcatgtgggaagttacatgatgctaatttacgatttttgtg

SEQ ID NO: 217651 - DNA, 8278 bp, Zea Mays
tcgctcgcgagctggtccacagcgccccggattagaccgtcgcggcggacgacgaggaagcagactcgtcctcgtccccgtccttccccgcctcccacccaccccggcggtcgacgaccaccgctcccacgcttctcggccgcgggccctaaaccctcccgatccatggaggccgccgcgcccgatggggccgcgcaggcgtccccgccccccgcggaggccgaccgcccgcccgagcctcgccccccgccgctgccagccgcggggacgcacgatccgcacttcctgagctcgatcataggggacgcggcgcccccgcccccgccgccgccgctcgggcagaagcggaagcgggggaggccgcccaagaggaaggacggcgcggccgtggccgcggggccggtggtgccggcgccggcgccggcgctcgcccgggccgcccggagaaggcaggacgaggaggaggtcgtctgcttcatctgcttcgacgggggaaacctcgtcgtctgcgataggaggggttgccccaaggtctaccatccggcgtgcatcaagcgtgacgaggcattcttccagtcccggagcaagtggaactgcggctggcacatatgcagcagctgcgaaaaggcagtgcactacatgtgctacacttgtacatactccctctgcaaagtgtgcatcaagcaagatctgaaagggaagctttcattaacattggaagaactcactactgccaagaatagatggaatgttcctagcacttctgctaggaaagaaaaagaggagtcgtctgatgacctgtatgatgctaataatgatgatgatgctggttctgactgctcctcaggaaaacgaaggcgaactaattcaaggaaaaagggtcaaaaacgccgaaaggtaaatagagattgtagcattcttgaaaaaaaggtcgagcttccacttagaaatactgagagcattccggtggaagtgccaaatgaacgggtgccatatccggtacacacaaaagtaccaaatggacgagtacccatgccagtagacacaaaagtaccaaatgaaccagtgtccttggcagcaaacacaaaatgggcatcaccagagctattggagtttataggacacatgagaaatggcgatcaatctttcatttctcaatttgatgttcagactcttctgcttgattatatcaagaagaataaccttcgtgatcctcaaaggaaaagccagattatttgtgactcgagacttcacttcttgttcaggaaagcacgagttgctcactttgagatgttaaagcttttggaaatgcattttcttacgaatgagacttcaacagtaactaatagtagccaagtgactatcaatctcaattcagctcatgtagataccaatggacacaatgacacggctgcaaaagtttcccctgataagaggaggaggatctatagaaagatggaaagagatacacaagttaatcttgaggattatgcagcaattgacatgcataacataaatttgatttacatgaggcgcagcctaatggaggatttagttgatgatgtcaaattctcagataaaattcacggtggttttgtgaggataaaaatttctgatgtttgtcaaaaacaagacatataccgtctcgtaaaagttattggaacacataaggttccagaaaagtatagtattggaaagaagatgacaaatgttgcacttgagatattgaatttaaacaaaaaggagattattacaatggatacaatatctaatcatgattttacagaggaggagtgcaaacgtttaaggcagagcatgaagtgtgatttaattagcagactaaaagtgggtgatatcctagagaaagccaagatattgcaatatgtaagagtgaatgattggtttgaaaatgaaaagcagaggcttgggcatcttcgtgaccgtgcaagtgaaactgggcgcagaaaggaacttagagaatatgtagaaaagctgcagcttctcaacgattctgaggaaagaactcgcaggattattgaaattctggaattgcatgttgactcacatatggatcctaattatgagtctgctgaagaaacagatgagaaaggaactgttggaaagtcggtaaatcagacaagaccagatacaaccatatcacgaaggatatcgagatatcttagcactgtgcaaaaccatcctaaaaaagtttctgattctagccaccttccaaaaagcttgtccacagaaagtgcaatatgtggatcaggagcaagaagtttggagaacagcacagcaaacagaactatgtatggagctggaccactttcatcttctgtagtaacaatgacaaacgacacagagccagagaaagtctggcactacaaggatccttctgggaatgttcagggtccatttactcttttgcaactttcaaattggacaagttacttcccacgtgatctgagagtatggcttacatttgagagtgaagagagatcattgctgttgactgaagtgctttcaaaacagcagaaagattttactcaggctgcatcacatacaagtagcaaggcaacactggttggcactggacatacaaggaacaaccctagtgtggatcagaccaatgctttctcccctgttggtcatagcgtggttagttcttctggaatacctgttcagtataataagtattctgttccagaaagggaaagtgtgtactctccagatgatagcttgtcgctgtcaactagttcggttccaccaaaggatgcttatactgtgaatagccaagcacactgccagaataagcattctgttttcattcaatctcctgggagttcatatgggcacacagacttgaaccatgatggaatacagggaggatgctctggtgaatcaaaccaccatcacagcagtagagccctatggagtcctacagtggcacatgtgagttgtggacgtggtaacgtggaatctcatcagaatcagcatgtttcctggtcagaaagtcaacatgaatctaaaaatggttcacaaggaggatttgttaaagatctgaattcaaggcaggatctatcgaaaaacctacctgctcaacgtattgggaaagatgtttccagtcctttgtttgcttggagtccggccgagtcgaggacagcttcaagtcaacaggaagggtcttgcttaagttcaacaactaacccaagctttctcgatgaacttcattcttctattgcttctgcaaagcctaagagctgcgctccagcaacccccattgaagacagaggttctagttcaccatcagatatgctaagtcatgaagaaagagttccaatctgcagtccacaatcagcccctttagcatctgcttctgatatgtgcaagatggaggagatcatgaatcagcaaagaacacttgtggtggatacatcgaatgcttcagttaaccagtctcctgaatcaagggcttttcctgtatcctctcctgataaccaagatattgaccgcgagtttcctagtccagttccaagatctgagaataaggacattgctgtggacagctcagaattagcaccagcgtcacctgaaaatattactacgaatttgcctgtttcagatacatgcaagatggaggaggtagtgagtcaacaacaagtaattggggctgttgtatcgaattcttcagataaccattctcctcaatctaaagtttcccctgtatcttctaataatgaagatacgaaacataaataccccagttcaaccccaaggcccgagaataagaatcctgcggtggatagtttactttcaacgtcagctgctcctgaaaatctaacgacaacttcaacccatgattctgatacatgcaaaatggaggtagtgaatcagccaaaaacatttgaagcggatgcatcaaatgctccacttcatcaacttcctcattctcacagtttcctggtaccttctgacaatcaagatattgagtgtgaatgtccaggtccaactccaagatctgacagtgaggaagctcttatgaacaactcagcgacaactgcatcagcctctgatacaagcaaaatggaggagtttgtgaatcagcaaaaaacccttgaagcagattcatcaaatgctccacttaatcaatctcctcattctcacattttctcagtaccttctgacaagcaagatattgagcgtgaatgtccaggcccaactcaaagatctgacactaaggaacctcttatgaacaactccgtgttaacatcaggaccatctgaaattcagacgacagcctctgcagcctctgatacatgcaaaatggaggagtcagtggatcagccaaaagcgcttgaagcagatgcatcaaatgctccacttaatcatcatcctcattctcacattttccgtgtatcttctgataatcaagacaatcagtgtgaacatcctagcccaaatccaaaatctgacagtaaggaacctcttgtggacaactcagtattaacatcagtggtgcctggaatgctagcgacaacttctgcctctgataaatgcaaaatggaggagtttgcgaatcagcaaaaagcacttgaagtggatgcatcgaatgcttcatttaatcagcctcacattttcgctgtatcttccgataatcaagatatggagcgtgaacgtcctagcccaactccaaggtctgaatgcaaggaatcacttacggagaactcagtattaacatccttggcgcctgaaattctagcaagatcttctgcctctgcttctgataaatgcaaaacggaggagtttgtgaatcagcaaaaaccaattgaagcggatgcatcaaatgcttcacttaatcagcctcatgtttttgctgtaccttccgataatcaagatatagagcgtgagtgtcctagtccaactccaaggtctgaatgcaaggaatcttttatggagaactcagtattaacatcagcggtgcctgaaattgcaagatcttctgtatccgcttctgatacatgcaaaatggagtttgtgaatcagcaaagaccaattgaagcagatgcatcgaatgcttcacttaaccagcctcgcattttcgctatatcttctgataataaagatatagagcgtgaatgtcctaacccaactccaaggtctgaatgcaaggaatctattatggagaactcagtattaacatcagcggcgcctgaaattcttgcaatatcttctgcatccgcttctgatacatgcaaaatggagtttgtgaatcagcaaagaccaattgaagcagatgcatcgaatgcttcacttaaccagcctcacattttcgctatatcttctgataataaagatatagagcgcgaatgtcctagcccaactccaaggtctgaatgcaaggaatctcttatggagaactcagtattaacaccagcgacgcctgaaattcttgcaagatcttctgcatccgcttctgatacatgcaaaatggaggagtttgtgaagcagcaaagaccaaatgaagcggacgcatcgaatgcttcacttaaccagcctcacattttcactgtatcttctgataataaagatatagagcgtgaatgtcctagcccaactccaaggtctgaatgcaaggaatcccttatggagaactcagtattaacatcagcggcacctgaaagatcttctgcatccgcttctgatacatgcaaaatggagtttgtgaatcagcaaagaccaattgaagcagatgcaccaaatgcttcacttaatcagtgtcgcactttcgctgtatcttctgatactaaagatatagagcgtgaatgtcctagcccaactccaaggtctgaatgcaaggaatcccttatggagaattcagtattaacatcagcggcgcctgaaattcttgcaagatcttctgcatctgcttctgatacatgcaaaatggaggagtttgtgaatcagcaaagactaattgaagcggatgcatcaaatgcttcacttaatcagcctcacattttcgctgtatcttctgataataaagatatagagcgtgaatgtcctagcccaactccaaggtctgaatgcaaggaatctcttatggagaactcagtattaacatcagcggcgcctgaaattcttgtaagatcttctgcatccgcttctgatacatgcaaaatggaggagtttgtgaatcagcaaagaccaattgaagtggatgcatcgaatgcttcacttaatcagcctcctcgttgtcacattttcactgcttcttccaataatcaagatattgagcgtgaatgtcctagctcaactccaaggtctgacagtaaggaaccttttgtggacaacttagtgttaacatcagcagtgcctggaaatctactgacaagttctgcagttgcctctgatacatgcaagatggagatcttgaataagaaaataacacttgaagcagatgcatcaaatgctccacttaatcagcctcctctctctagcgttttcgcttcatcttctggtgatgaccaagataatgtgtgtggacgtcctagtccaaatccaagacctgagggtgagcagcctctcatgggtaactcagggttaatatcaacagtgcctcgaaatctaacttctacttctgcatctgcttccgacatatgcaaaatggagatcttgaatgagaaaagaacacttgaagcaaacccatcaaatggtttgattactcaatctcctcaacccaaggttttccttgtaccatctcctgatatcctagagtgtgaattttctagtgaaacacctaggcatgagtttaaggaacctgttgcggacagctctgggttaacttcagcagcacatgaaaatttagggactaagccacatgtccactcaccagatgcctttgtaccaccaaagtctggtgctctaactggggaattaggtgacacgaaatcagattttaaaggtgaagaaactattcaaaaagagcaatattttggaagtgaatctattgccgctacaagagagaatttgttaattgatccttcctctggtgttgagtcgatagatgtgtcagatgtactggattctttaatggaagaaaggagtggaacttcgtacatgccaggatcaatagaggacttcctagccgaagaagaaccacaatactctagccctatcgcattatctccttggggtgaacctagttactaccaaggtgatgctgttgattctgcgctatggggtactcaagatttgatcaatgatatgtggtcattgctttcaccaagacctatgctccaaccttcatctggtattggaactgaggggaaggaaacttttgatatcaacgaggtggctgtgacccatgttagtagtgattattttcaaaaaggatcaatgtttggggaggaaaatgtgaaccaggcaaacttgagtgctgctgcagactggatgctgcctgagcaggtcccatcaataccaaatggtatgtcaacatcgtcagtagatgagagcaccatagttttaggttctcagccatcaaccaatcagagcttagactggggtggtactacatggagtattggccagaatgccagcgtgtatagcaatgaaaaagcagagccctcgagtaaaagctattgggaagaaccaaggaagcaggaaaccgccaaatccagtgtttctatttcaggacaggccattggaaacaacaagggcttggaccctcgtgataatgctgctaatcggggcagccggctgagtcatcatcaccgtggcaggtactcccaaatcagtgaatcttggctacttagttcaagtcactctaggagtaggtctgatagatttggcagcggtgggtcatcaagatcaacttcaaaggggcaatctaggggctaatgtaaattgtcaagtgcaggagagaaatgatgcatcttgtagctaacctgcatccttgatctctgcagcaggaatagttttctttttaaaattctttgtcatatctttgcagtttgtataggctaattacagtttagtccactcagactgtagcaaggagcatatatgtttagcatagaggtatttgactgcccattgcccaaggagtagattcagctcttgggcatggtctgtatcatcctgacattctgttggatggagctccaattgtaccaccggcatctctgttgacaccgaaacgcctgatgcgttggaaacaattatatctgattgattggtttaacttcgtggaatccctattttcgaagatcacgaaacgaca

SEQ ID NO: 217652 - DNA, 8161 bp, Zea Mays
atggaggccgccgcgcccgatggggccgcgcaggcgtccccgccccccgcggaggccgaccgcccgcccgagcctcgccccccgccgctgccagccgcggggacgcacgatccgcacttcctgagctcgatcataggggacgcggcgcccccgcccccgccgccgccgctcgggcagaagcggaagcgggggaggccgcccaagaggaaggacggcgcggccgtggccgcggggccggtggtgccggcgccggcgccggcgctcgcccgggccgcccggagaaggcaggacgaggaggaggtcgtctgcttcatctgcttcgacgggggaaacctcgtcgtctgcgataggaggggttgccccaaggtctaccatccggcgtgcatcaagcgtgacgaggcattcttccagtcccggagcaagtggaactgcggctggcacatatgcagcagctgcgaaaaggcagtgcactacatgtgctacacttgtacatactccctctgcaaagtgtgcatcaagcaaggtaaattcttcagtgtcagggggacaaagggcttctgcgacacatgttatgggactatacttttgatagaatgcaaagatgaaagcgcaacaaaggttgattttgatgacatactcagctgggagtacctgttcaagctatattggctagatctgaaagggaagctttcattaacattggaagaactcactactgccaagaatagatggaatgttcctagcacttctgctaggaaagaaaaagaggagtcgtctgatgacctgtatgatgctaataatgatgatgatgctggttctgactgctcctcaggaaaacgaaggcgaactaattcaaggaaaaagggtcaaaaacgccgaaaggtaaatagagattgtagcattcttgaaaaaaaggtcgagcttccacttagaaatactgagagcattccggtggaagtgccaaatgaacgggtgccatatccggtacacacaaaagtaccaaatggacgagtacccatgccagtagacacaaaagtaccaaatgaaccagtgtccttggcagcaaacacaaaatgggcatcaccagagctattggagtttataggacacatgagaaatggcgatcaatctttcatttctcaatttgatgttcagactcttctgcttgattatatcaagaagaataaccttcgtgatcctcaaaggaaaagccagattatttgtgactcgagacttcacttcttgttcaggaaagcacgagttgctcactttgagatgttaaagcttttggaaatgcattttcttacgaatgagacttcaacagtaactaatagtagccaagtgactatcaatctcaattcagctcatgtagataccaatggacacaatgacacggctgcaaaagtttcccctgataagaggaggaggatctatagaaagatggaaagagatacacaagttaatcttgaggattatgcagcaattgacatgcataacataaatttgatttacatgaggcgcagcctaatggaggatttagttgatgatgtcaaattctcagataaaattcacggtggttttgtgaggataaaaatttctgatgtttgtcaaaaacaagacatataccgtctcgtaaaagttattggaacacataaggttccagaaaagtatagtattggaaagaagatgacaaatgttgcacttgagatattgaatttaaacaaaaaggagattattacaatggatacaatatctaatcatgattttacagaggaggagtgcaaacgtttaaggcagagcatgaagtgtgatttaattagcagactaaaagtgggtgatatcctagagaaagccaagatattgcaatatgtaagagtgaatgattggtttgaaaatgaaaagcagaggcttgggcatcttcgtgaccgtgcaagtgaaactgggcgcagaaaggaacttagagaatatgtagaaaagctgcagcttctcaacgattctgaggaaagaactcgcaggattattgaaattctggaattgcatgttgactcacatatggatcctaattatgagtctgctgaagaaacagatgagaaaggaactgttggaaagtcggtaaatcagacaagaccagatacaaccatatcacgaaggatatcgagatatcttagcactgtgcaaaaccatcctaaaaaagtttctgattctagccaccttccaaaaagcttgtccacagaaagtgcaatatgtggatcaggagcaagaagtttggagaacagcacagcaaacagaactatgtatggagctggaccactttcatcttctgtagtaacaatgacaaacgacacagagccagagaaagtctggcactacaaggatccttctgggaatgttcagggtccatttactcttttgcaactttcaaattggacaagttacttcccacgtgatctgagagtatggcttacatttgagagtgaagagagatcattgctgttgactgaagtgctttcaaaacagcagaaagattttactcaggctgcatcacatacaagtagcaaggcaacactggttggcactggacatacaaggaacaaccctagtgtggatcagaccaatgctttctcccctgttggtcatagcgtggttagttcttctggaatacctgttcagtataataagtattctgttccagaaagggaaagtgtgtactctccagatgatagcttgtcgctgtcaactagttcggttccaccaaaggatgcttatactgtgaatagccaagcacactgccagaataagcattctgttttcattcaatctcctgggagttcatatgggcacacagacttgaaccatgatggaatacagggaggatgctctggtgaatcaaaccaccatcacagcagtagagccctatggagtcctacagtggcacatgtgagttgtggacgtggtaacgtggaatctcatcagaatcagcatgtttcctggtcagaaagtcaacatgaatctaaaaatggttcacaaggaggatttgttaaagatctgaattcaaggcaggatctatcgaaaaacctacctgctcaacgtattgggaaagatgtttccagtcctttgtttgcttggagtccggccgagtcgaggacagcttcaagtcaacaggaagggtcttgcttaagttcaacaactaacccaagctttctcgatgaacttcattcttctattgcttctgcaaagcctaagagctgcgctccagcaacccccattgaagacagaggttctagttcaccatcagatatgctaagtcatgaagaaagagttccaatctgcagtccacaatcagcccctttagcatctgcttctgatatgtgcaagatggaggagatcatgaatcagcaaagaacacttgtggtggatacatcgaatgcttcagttaaccagtctcctgaatcaagggcttttcctgtatcctctcctgataaccaagatattgaccgcgagtttcctagtccagttccaagatctgagaataaggacattgctgtggacagctcagaattagcaccagcgtcacctgaaaatattactacgaatttgcctgtttcagatacatgcaagatggaggaggtagtgagtcaacaacaagtaattggggctgttgtatcgaattcttcagataaccattctcctcaatctaaagtttcccctgtatcttctaataatgaagatacgaaacataaataccccagttcaaccccaaggcccgagaataagaatcctgcggtggatagtttactttcaacgtcagctgctcctgaaaatctaacgacaacttcaacccatgattctgatacatgcaaaatggaggtagtgaatcagccaaaaacatttgaagcggatgcatcaaatgctccacttcatcaacttcctcattctcacagtttcctggtaccttctgacaatcaagatattgagtgtgaatgtccaggtccaactccaagatctgacagtgaggaagctcttatgaacaactcagcgacaactgcatcagcctctgatacaagcaaaatggaggagtttgtgaatcagcaaaaaacccttgaagcagattcatcaaatgctccacttaatcaatctcctcattctcacattttctcagtaccttctgacaagcaagatattgagcgtgaatgtccaggcccaactcaaagatctgacactaaggaacctcttatgaacaactccgtgttaacatcaggaccatctgaaattcagacgacagcctctgcagcctctgatacatgcaaaatggaggagtcagtggatcagccaaaagcgcttgaagcagatgcatcaaatgctccacttaatcatcatcctcattctcacattttccgtgtatcttctgataatcaagacaatcagtgtgaacatcctagcccaaatccaaaatctgacagtaaggaacctcttgtggacaactcagtattaacatcagtggtgcctggaatgctagcgacaacttctgcctctgataaatgcaaaatggaggagtttgcgaatcagcaaaaagcacttgaagtggatgcatcgaatgcttcatttaatcagcctcacattttcgctgtatcttccgataatcaagatatggagcgtgaacgtcctagcccaactccaaggtctgaatgcaaggaatcacttacggagaactcagtattaacatccttggcgcctgaaattctagcaagatcttctgcctctgcttctgataaatgcaaaacggaggagtttgtgaatcagcaaaaaccaattgaagcggatgcatcaaatgcttcacttaatcagcctcatgtttttgctgtaccttccgataatcaagatatagagcgtgagtgtcctagtccaactccaaggtctgaatgcaaggaatcttttatggagaactcagtattaacatcagcggtgcctgaaattgcaagatcttctgtatccgcttctgatacatgcaaaatggagtttgtgaatcagcaaagaccaattgaagcagatgcatcgaatgcttcacttaaccagcctcgcattttcgctatatcttctgataataaagatatagagcgtgaatgtcctaacccaactccaaggtctgaatgcaaggaatctattatggagaactcagtattaacatcagcggcgcctgaaattcttgcaatatcttctgcatccgcttctgatacatgcaaaatggagtttgtgaatcagcaaagaccaattgaagcagatgcatcgaatgcttcacttaaccagcctcacattttcgctatatcttctgataataaagatatagagcgcgaatgtcctagcccaactccaaggtctgaatgcaaggaatctcttatggagaactcagtattaacaccagcgacgcctgaaattcttgcaagatcttctgcatccgcttctgatacatgcaaaatggaggagtttgtgaagcagcaaagaccaaatgaagcggacgcatcgaatgcttcacttaaccagcctcacattttcactgtatcttctgataataaagatatagagcgtgaatgtcctagcccaactccaaggtctgaatgcaaggaatcccttatggagaactcagtattaacatcagcggcacctgaaagatcttctgcatccgcttctgatacatgcaaaatggagtttgtgaatcagcaaagaccaattgaagcagatgcaccaaatgcttcacttaatcagtgtcgcactttcgctgtatcttctgatactaaagatatagagcgtgaatgtcctagcccaactccaaggtctgaatgcaaggaatcccttatggagaattcagtattaacatcagcggcgcctgaaattcttgcaagatcttctgcatctgcttctgatacatgcaaaatggaggagtttgtgaatcagcaaagactaattgaagcggatgcatcaaatgcttcacttaatcagcctcacattttcgctgtatcttctgataataaagatatagagcgtgaatgtcctagcccaactccaaggtctgaatgcaaggaatctcttatggagaactcagtattaacatcagcggcgcctgaaattcttgtaagatcttctgcatccgcttctgatacatgcaaaatggaggagtttgtgaatcagcaaagaccaattgaagtggatgcatcgaatgcttcacttaatcagcctcctcgttgtcacattttcactgcttcttccaataatcaagatattgagcgtgaatgtcctagctcaactccaaggtctgacagtaaggaaccttttgtggacaacttagtgttaacatcagcagtgcctggaaatctactgacaagttctgcagttgcctctgatacatgcaagatggagatcttgaataagaaaataacacttgaagcagatgcatcaaatgctccacttaatcagcctcctctctctagcgttttcgcttcatcttctggtgatgaccaagataatgtgtgtggacgtcctagtccaaatccaagacctgagggtgagcagcctctcatgggtaactcagggttaatatcaacagtgcctcgaaatctaacttctacttctgcatctgcttccgacatatgcaaaatggagatcttgaatgagaaaagaacacttgaagcaaacccatcaaatggtttgattactcaatctcctcaacccaaggttttccttgtaccatctcctgatatcctagagtgtgaattttctagtgaaacacctaggcatgagtttaaggaacctgttgcggacagctctgggttaacttcagcagcacatgaaaatttagggactaagccacatgtccactcaccagatgcctttgtaccaccaaagtctggtgctctaactggggaattaggtgacacgaaatcagattttaaagatgtgtcagatgtactggattctttaatggaagaaaggagtggaacttcgtacatgccaggatcaatagaggacttcctagccgaagaagaaccacaatactctagccctatcgcattatctccttggggtgaacctagttactaccaaggtgatgctgttgattctgcgctatggggtactcaagatttgatcaatgatatgtggtcattgctttcaccaagacctatgctccaaccttcatctggtattggaactgaggggaaggaaacttttgatatcaacgaggtggctgtgacccatgttagtagtgattattttcaaaaaggatcaatgtttggggaggaaaatgtgaaccaggcaaacttgagtgctgctgcagactggatgctgcctgagcaggtcccatcaataccaaatggtatgtcaacatcgtcagtagatgagagcaccatagttttaggttctcagccatcaaccaatcagagcttagactggggtggtactacatggagtattggccagaatgccagcgtgtatagcaatgaaaaagcagagccctcgagtaaaagctattgggaagaaccaaggaagcaggaaaccgccaaatccagtgtttctatttcaggacaggccattggaaacaacaagggcttggaccctcgtgataatgctgctaatcggggcagccggctgagtcatcatcaccgtggcaggtactcccaaatcagtgaatcttggctacttagttcaagtcactctaggagtaggtctgatagatttggcagcggtgggtcatcaagatcaacttcaaaggggcaatctaggggctaatgtaaattgtcaagtgcaggagagaaatgatgcatcttgtagctaacctgcatccttgatctctgcagcaggaatagttttctttttaaaattctttgtcatatctttgcagtttgtataggctaattacagtttagtccactcagactgtagcaaggagcatatatgtttagcatagaggtatttgactgcccattgcccaaggagtagattcagctcttgggcatggtctgtatcatcctgacattctgttggatggagctccaattgtaccaccggcatctctgttgacaccgaaacgcctgatgcgttggaaacaattatatctgattgattggtttaacttcgtggaatccctattttcgaagatcacgaaacgaca

SEQ ID NO: 217653 - DNA, 8203 bp, Zea Mays
atggaggccgccgcgcccgatggggccgcgcaggcgtccccgccccccgcggaggccgaccgcccgcccgagcctcgccccccgccgctgccagccgcggggacgcacgatccgcacttcctgagctcgatcataggggacgcggcgcccccgcccccgccgccgccgctcgggcagaagcggaagcgggggaggccgcccaagaggaaggacggcgcggccgtggccgcggggccggtggtgccggcgccggcgccggcgctcgcccgggccgcccggagaaggcaggacgaggaggaggtcgtctgcttcatctgcttcgacgggggaaacctcgtcgtctgcgataggaggggttgccccaaggtctaccatccggcgtgcatcaagcgtgacgaggcattcttccagtcccggagcaagtggaactgcggctggcacatatgcagcagctgcgaaaaggcagtgcactacatgtgctacacttgtacatactccctctgcaaagtgtgcatcaagcaaggtaaattcttcagtgtcagggggacaaagggcttctgcgacacatgttatgggactatacttttgatagaatgcaaagatgaaagcgcaacaaaggttgattttgatgacatactcagctgggagtacctgttcaagctatattggctagatctgaaagggaagctttcattaacattggaagaactcactactgccaagaatagatggaatgttcctagcacttctgctaggaaagaaaaagaggagtcgtctgatgacctgtatgatgctaataatgatgatgatgctggttctgactgctcctcaggaaaacgaaggcgaactaattcaaggaaaaagggtcaaaaacgccgaaaggtaaatagagattgtagcattcttgaaaaaaaggtcgagcttccacttagaaatactgagagcattccggtggaagtgccaaatgaacgggtgccatatccggtacacacaaaagtaccaaatggacgagtacccatgccagtagacacaaaagtaccaaatgaaccagtgtccttggcagcaaacacaaaatgggcatcaccagagctattggagtttataggacacatgagaaatggcgatcaatctttcatttctcaatttgatgttcagactcttctgcttgattatatcaagaagaataaccttcgtgatcctcaaaggaaaagccagattatttgtgactcgagacttcacttcttgttcaggaaagcacgagttgctcactttgagatgttaaagcttttggaaatgcattttcttacgaatgagacttcaacagtaactaatagtagccaagtgactatcaatctcaattcagctcatgtagataccaatggacacaatgacacggctgcaaaagtttcccctgataagaggaggaggatctatagaaagatggaaagagatacacaagttaatcttgaggattatgcagcaattgacatgcataacataaatttgatttacatgaggcgcagcctaatggaggatttagttgatgatgtcaaattctcagataaaattcacggtggttttgtgaggataaaaatttctgatgtttgtcaaaaacaagacatataccgtctcgtaaaagttattggaacacataaggttccagaaaagtatagtattggaaagaagatgacaaatgttgcacttgagatattgaatttaaacaaaaaggagattattacaatggatacaatatctaatcatgattttacagagggtgatatcctagagaaagccaagatattgcaatatgtaagagtgaatgattggtttgaaaatgaaaagcagaggcttgggcatcttcgtgaccgtgcaagtgaaactgggcgcagaaaggaacttagagaatatgtagaaaagctgcagcttctcaacgattctgaggaaagaactcgcaggattattgaaattctggaattgcatgttgactcacatatggatcctaattatgagtctgctgaagaaacagatgagaaaggaactgttggaaagtcggtaaatcagacaagaccagatacaaccatatcacgaaggatatcgagatatcttagcactgtgcaaaaccatcctaaaaaagtttctgattctagccaccttccaaaaagcttgtccacagaaagtgcaatatgtggatcaggagcaagaagtttggagaacagcacagcaaacagaactatgtatggagctggaccactttcatcttctgtagtaacaatgacaaacgacacagagccagagaaagtctggcactacaaggatccttctgggaatgttcagggtccatttactcttttgcaactttcaaattggacaagttacttcccacgtgatctgagagtatggcttacatttgagagtgaagagagatcattgctgttgactgaagtgctttcaaaacagcagaaagattttactcaggctgcatcacatacaagtagcaaggcaacactggttggcactggacatacaaggaacaaccctagtgtggatcagaccaatgctttctcccctgttggtcatagcgtggttagttcttctggaatacctgttcagtataataagtattctgttccagaaagggaaagtgtgtactctccagatgatagcttgtcgctgtcaactagttcggttccaccaaaggatgcttatactgtgaatagccaagcacactgccagaataagcattctgttttcattcaatctcctgggagttcatatgggcacacagacttgaaccatgatggaatacagggaggatgctctggtgaatcaaaccaccatcacagcagtagagccctatggagtcctacagtggcacatgtgagttgtggacgtggtaacgtggaatctcatcagaatcagcatgtttcctggtcagaaagtcaacatgaatctaaaaatggttcacaaggaggatttgttaaagatctgaattcaaggcaggatctatcgaaaaacctacctgctcaacgtattgggaaagatgtttccagtcctttgtttgcttggagtccggccgagtcgaggacagcttcaagtcaacaggaagggtcttgcttaagttcaacaactaacccaagctttctcgatgaacttcattcttctattgcttctgcaaagcctaagagctgcgctccagcaacccccattgaagacagaggttctagttcaccatcagatatgctaagtcatgaagaaagagttccaatctgcagtccacaatcagcccctttagcatctgcttctgatatgtgcaagatggaggagatcatgaatcagcaaagaacacttgtggtggatacatcgaatgcttcagttaaccagtctcctgaatcaagggcttttcctgtatcctctcctgataaccaagatattgaccgcgagtttcctagtccagttccaagatctgagaataaggacattgctgtggacagctcagaattagcaccagcgtcacctgaaaatattactacgaatttgcctgtttcagatacatgcaagatggaggaggtagtgagtcaacaacaagtaattggggctgttgtatcgaattcttcagataaccattctcctcaatctaaagtttcccctgtatcttctaataatgaagatacgaaacataaataccccagttcaaccccaaggcccgagaataagaatcctgcggtggatagtttactttcaacgtcagctgctcctgaaaatctaacgacaacttcaacccatgattctgatacatgcaaaatggaggtagtgaatcagccaaaaacatttgaagcggatgcatcaaatgctccacttcatcaacttcctcattctcacagtttcctggtaccttctgacaatcaagatattgagtgtgaatgtccaggtccaactccaagatctgacagtgaggaagctcttatgaacaactcagcgacaactgcatcagcctctgatacaagcaaaatggaggagtttgtgaatcagcaaaaaacccttgaagcagattcatcaaatgctccacttaatcaatctcctcattctcacattttctcagtaccttctgacaagcaagatattgagcgtgaatgtccaggcccaactcaaagatctgacactaaggaacctcttatgaacaactccgtgttaacatcaggaccatctgaaattcagacgacagcctctgcagcctctgatacatgcaaaatggaggagtcagtggatcagccaaaagcgcttgaagcagatgcatcaaatgctccacttaatcatcatcctcattctcacattttccgtgtatcttctgataatcaagacaatcagtgtgaacatcctagcccaaatccaaaatctgacagtaaggaacctcttgtggacaactcagtattaacatcagtggtgcctggaatgctagcgacaacttctgcctctgataaatgcaaaatggaggagtttgcgaatcagcaaaaagcacttgaagtggatgcatcgaatgcttcatttaatcagcctcacattttcgctgtatcttccgataatcaagatatggagcgtgaacgtcctagcccaactccaaggtctgaatgcaaggaatcacttacggagaactcagtattaacatccttggcgcctgaaattctagcaagatcttctgcctctgcttctgataaatgcaaaacggaggagtttgtgaatcagcaaaaaccaattgaagcggatgcatcaaatgcttcacttaatcagcctcatgtttttgctgtaccttccgataatcaagatatagagcgtgagtgtcctagtccaactccaaggtctgaatgcaaggaatcttttatggagaactcagtattaacatcagcggtgcctgaaattgcaagatcttctgtatccgcttctgatacatgcaaaatggagtttgtgaatcagcaaagaccaattgaagcagatgcatcgaatgcttcacttaaccagcctcgcattttcgctatatcttctgataataaagatatagagcgtgaatgtcctaacccaactccaaggtctgaatgcaaggaatctattatggagaactcagtattaacatcagcggcgcctgaaattcttgcaatatcttctgcatccgcttctgatacatgcaaaatggagtttgtgaatcagcaaagaccaattgaagcagatgcatcgaatgcttcacttaaccagcctcacattttcgctatatcttctgataataaagatatagagcgcgaatgtcctagcccaactccaaggtctgaatgcaaggaatctcttatggagaactcagtattaacaccagcgacgcctgaaattcttgcaagatcttctgcatccgcttctgatacatgcaaaatggaggagtttgtgaagcagcaaagaccaaatgaagcggacgcatcgaatgcttcacttaaccagcctcacattttcactgtatcttctgataataaagatatagagcgtgaatgtcctagcccaactccaaggtctgaatgcaaggaatcccttatggagaactcagtattaacatcagcggcacctgaaagatcttctgcatccgcttctgatacatgcaaaatggagtttgtgaatcagcaaagaccaattgaagcagatgcaccaaatgcttcacttaatcagtgtcgcactttcgctgtatcttctgatactaaagatatagagcgtgaatgtcctagcccaactccaaggtctgaatgcaaggaatcccttatggagaattcagtattaacatcagcggcgcctgaaattcttgcaagatcttctgcatctgcttctgatacatgcaaaatggaggagtttgtgaatcagcaaagactaattgaagcggatgcatcaaatgcttcacttaatcagcctcacattttcgctgtatcttctgataataaagatatagagcgtgaatgtcctagcccaactccaaggtctgaatgcaaggaatctcttatggagaactcagtattaacatcagcggcgcctgaaattcttgtaagatcttctgcatccgcttctgatacatgcaaaatggaggagtttgtgaatcagcaaagaccaattgaagtggatgcatcgaatgcttcacttaatcagcctcctcgttgtcacattttcactgcttcttccaataatcaagatattgagcgtgaatgtcctagctcaactccaaggtctgacagtaaggaaccttttgtggacaacttagtgttaacatcagcagtgcctggaaatctactgacaagttctgcagttgcctctgatacatgcaagatggagatcttgaataagaaaataacacttgaagcagatgcatcaaatgctccacttaatcagcctcctctctctagcgttttcgcttcatcttctggtgatgaccaagataatgtgtgtggacgtcctagtccaaatccaagacctgagggtgagcagcctctcatgggtaactcagggttaatatcaacagtgcctcgaaatctaacttctacttctgcatctgcttccgacatatgcaaaatggagatcttgaatgagaaaagaacacttgaagcaaacccatcaaatggtttgattactcaatctcctcaacccaaggttttccttgtaccatctcctgatatcctagagtgtgaattttctagtgaaacacctaggcatgagtttaaggaacctgttgcggacagctctgggttaacttcagcagcacatgaaaatttagggactaagccacatgtccactcaccagatgcctttgtaccaccaaagtctggtgctctaactggggaattaggtgacacgaaatcagattttaaaggtgaagaaactattcaaaaagagcaatattttggaagtgaatctattgccgctacaagagagaatttgttaattgatccttcctctggtgttgagtcgatagatgtgtcagatgtactggattctttaatggaagaaaggagtggaacttcgtacatgccaggatcaatagaggacttcctagccgaagaagaaccacaatactctagccctatcgcattatctccttggggtgaacctagttactaccaaggtgatgctgttgattctgcgctatggggtactcaagatttgatcaatgatatgtggtcattgctttcaccaagacctatgctccaaccttcatctggtattggaactgaggggaaggaaacttttgatatcaacgaggtggctgtgacccatgttagtagtgattattttcaaaaaggatcaatgtttggggaggaaaatgtgaaccaggcaaacttgagtgctgctgcagactggatgctgcctgagcaggtcccatcaataccaaatggtatgtcaacatcgtcagtagatgagagcaccatagttttaggttctcagccatcaaccaatcagagcttagactggggtggtactacatggagtattggccagaatgccagcgtgtatagcaatgaaaaagcagagccctcgagtaaaagctattgggaagaaccaaggaagcaggaaaccgccaaatccagtgtttctatttcaggacaggccattggaaacaacaagggcttggaccctcgtgataatgctgctaatcggggcagccggctgagtcatcatcaccgtggcaggtactcccaaatcagtgaatcttggctacttagttcaagtcactctaggagtaggtctgatagatttggcagcggtgggtcatcaagatcaacttcaaaggggcaatctaggggctaatgtaaattgtcaagtgcaggagagaaatgatgcatcttgtagctaacctgcatccttgatctctgcagcaggaatagttttctttttaaaattctttgtcatatctttgcagtttgtataggctaattacagtttagtccactcagactgtagcaaggagcatatatgtttagcatagaggtatttgactgcccattgcccaaggagtagattcagctcttgggcatggtctgtatcatcctgacattctgttggatggagctccaattgtaccaccggcatctctgttgacaccgaaacgcctgatgcgttggaaacaattatatctgattgattggtttaacttcgtggaatccctattttcgaagatcacgaaacgaca

SEQ ID NO: 217654 - DNA, 7450 bp, Zea Mays
gggggacaaagggcttctgcgacacatgttatgggactatacttttgatagaatgcaaagatgaaagcgcaacaaaggttgattttgatgacatactcagctgggagtacctgttcaagctatattggctagatctgaaagggaagctttcattaacattggaagaactcactactgccaagaatagatggaatgttcctagcacttctgctaggaaagaaaaagaggagtcgtctgatgacctgtatgatgctaataatgatgatgatgctggttctgactgctcctcaggaaaacgaaggcgaactaattcaaggaaaaagggtcaaaaacgccgaaagactcttctgcttgattatatcaagaagaataaccttcgtgatcctcaaaggaaaagccagattatttgtgactcgagacttcacttcttgttcaggaaagcacgagttgctcactttgagatgttaaagcttttggaaatgcattttcttacgaatgagacttcaacagtaactaatagtagccaagtgactatcaatctcaattcagctcatgtagataccaatggacacaatgacacggctgcaaaagtttcccctgataagaggaggaggatctatagaaagatggaaagagatacacaagttaatcttgaggattatgcagcaattgacatgcataacataaatttgatttacatgaggcgcagcctaatggaggatttagttgatgatgtcaaattctcagataaaattcacggtggttttgtgaggataaaaatttctgatgtttgtcaaaaacaagacatataccgtctcgtaaaagttattggaacacataaggttccagaaaagtatagtattggaaagaagatgacaaatgttgcacttgagatattgaatttaaacaaaaaggagattattacaatggatacaatatctaatcatgattttacagaggaggagtgcaaacgtttaaggcagagcatgaagtgtgatttaattagcagactaaaagtggggtgatatcctagagaaagccaagatattgcaatatgtaagagtgaatgattggtttgaaaatgaaaagcagaggcttgggcatcttcgtgaccgtgcaagtgaaactgggcgcagaaaggaacttagagaatatgtagaaaagctgcagcttctcaacgattctgaggaaagaactcgcaggattattgaaattctggaattgcatgttgactcacatatggatcctaattatgagtctgctgaagaaacagatgagaaaggaactgttggaaagtcggtaaatcagacaagaccagatacaaccatatcacgaaggatatcgagatatcttagcactgtgcaaaaccatcctaaaaaagtttctgattctagccaccttccaaaaagcttgtccacagaaagtgcaatatgtggatcaggagcaagaagtttggagaacagcacagcaaacagaactatgtatggagctggaccactttcatcttctgtagtaacaatgacaaacgacacagagccagagaaagtctggcactacaaggatccttctgggaatgttcagggtccatttactcttttgcaactttcaaattggacaagttacttcccacgtgatctgagagtatggcttacatttgagagtgaagagagatcattgctgttgactgaagtgctttcaaaacagcagaaagattttactcaggctgcatcacatacaagtagcaaggcaacactggttggcactggacatacaaggaacaaccctagtgtggatcagaccaatgctttctcccctgttggtcatagcgtggttagttcttctggaatacctgttcagtataataagtattctgttccagaaagggaaagtgtgtactctccagatgatagcttgtcgctgtcaactagttcggttccaccaaaggatgcttatactgtgaatagccaagcacactgccagaataagcattctgttttcattcaatctcctgggagttcatatgggcacacagacttgaaccatgatggaatacagggaggatgctctggtgaatcaaaccaccatcacagcagtagagccctatggagtcctacagtggcacatgtgagttgtggacgtggtaacgtggaatctcatcagaatcagcatgtttcctggtcagaaagtcaacatgaatctaaaaatggttcacaaggaggatttgttaaagatctgaattcaaggcaggatctatcgaaaaacctacctgctcaacgtattgggaaagatgtttccagtcctttgtttgcttggagtccggccgagtcgaggacagcttcaagtcaacaggaagggtcttgcttaagttcaacaactaacccaagctttctcgatgaacttcattcttctattgcttctgcaaagcctaagagctgcgctccagcaacccccattgaagacagaggttctagttcaccatcagatatgctaagtcatgaagaaagagttccaatctgcagtccacaatcagcccctttagcatctgcttctgatatgtgcaagatggaggagatcatgaatcagcaaagaacacttgtggtggatacatcgaatgcttcagttaaccagtctcctgaatcaagggcttttcctgtatcctctcctgataaccaagatattgaccgcgagtttcctagtccagttccaagatctgagaataaggacattgctgtggacagctcagaattagcaccagcgtcacctgaaaatattactacgaatttgcctgtttcagatacatgcaagatggaggaggtagtgagtcaacaacaagtaattggggctgttgtatcgaattcttcagataaccattctcctcaatctaaagtttcccctgtatcttctaataatgaagatacgaaacataaataccccagttcaaccccaaggcccgagaataagaatcctgcggtggatagtttactttcaacgtcagctgctcctgaaaatctaacgacaacttcaacccatgattctgatacatgcaaaatggaggtagtgaatcagccaaaaacatttgaagcggatgcatcaaatgctccacttcatcaacttcctcattctcacagtttcctggtaccttctgacaatcaagatattgagtgtgaatgtccaggtccaactccaagatctgacagtgaggaagctcttatgaacaactcagcgacaactgcatcagcctctgatacaagcaaaatggaggagtttgtgaatcagcaaaaaacccttgaagcagattcatcaaatgctccacttaatcaatctcctcattctcacattttctcagtaccttctgacaagcaagatattgagcgtgaatgtccaggcccaactcaaagatctgacactaaggaacctcttatgaacaactccgtgttaacatcaggaccatctgaaattcagacgacagcctctgcagcctctgatacatgcaaaatggaggagtcagtggatcagccaaaagcgcttgaagcagatgcatcaaatgctccacttaatcatcatcctcattctcacattttccgtgtatcttctgataatcaagacaatcagtgtgaacatcctagcccaaatccaaaatctgacagtaaggaacctcttgtggacaactcagtattaacatcagtggtgcctggaatgctagcgacaacttctgcctctgataaatgcaaaatggaggagtttgcgaatcagcaaaaagcacttgaagtggatgcatcgaatgcttcatttaatcagcctcacattttcgctgtatcttccgataatcaagatatggagcgtgaacgtcctagcccaactccaaggtctgaatgcaaggaatcacttacggagaactcagtattaacatccttggcgcctgaaattctagcaagatcttctgcctctgcttctgataaatgcaaaacggaggagtttgtgaatcagcaaaaaccaattgaagcggatgcatcaaatgcttcacttaatcagcctcatgtttttgctgtaccttccgataatcaagatatagagcgtgagtgtcctagtccaactccaaggtctgaatgcaaggaatcttttatggagaactcagtattaacatcagcggtgcctgaaattgcaagatcttctgtatccgcttctgatacatgcaaaatggagtttgtgaatcagcaaagaccaattgaagcagatgcatcgaatgcttcacttaaccagcctcgcattttcgctatatcttctgataataaagatatagagcgtgaatgtcctaacccaactccaaggtctgaatgcaaggaatctattatggagaactcagtattaacatcagcggcgcctgaaattcttgcaatatcttctgcatccgcttctgatacatgcaaaatggagtttgtgaatcagcaaagaccaattgaagcagatgcatcgaatgcttcacttaaccagcctcacattttcgctatatcttctgataataaagatatagagcgcgaatgtcctagcccaactccaaggtctgaatgcaaggaatctcttatggagaactcagtattaacaccagcgacgcctgaaattcttgcaagatcttctgcatccgcttctgatacatgcaaaatggaggagtttgtgaagcagcaaagaccaaatgaagcggacgcatcgaatgcttcacttaaccagcctcacattttcactgtatcttctgataataaagatatagagcgtgaatgtcctagcccaactccaaggtctgaatgcaaggaatcccttatggagaactcagtattaacatcagcggcacctgaaagatcttctgcatccgcttctgatacatgcaaaatggagtttgtgaatcagcaaagaccaattgaagcagatgcaccaaatgcttcacttaatcagtgtcgcactttcgctgtatcttctgatactaaagatatagagcgtgaatgtcctagcccaactccaaggtctgaatgcaaggaatcccttatggagaattcagtattaacatcagcggcgcctgaaattcttgcaagatcttctgcatctgcttctgatacatgcaaaatggaggagtttgtgaatcagcaaagactaattgaagcggatgcatcaaatgcttcacttaatcagcctcacattttcgctgtatcttctgataataaagatatagagcgtgaatgtcctagcccaactccaaggtctgaatgcaaggaatctcttatggagaactcagtattaacatcagcggcgcctgaaattcttgtaagatcttctgcatccgcttctgatacatgcaaaatggaggagtttgtgaatcagcaaagaccaattgaagtggatgcatcgaatgcttcacttaatcagcctcctcgttgtcacattttcactgcttcttccaataatcaagatattgagcgtgaatgtcctagctcaactccaaggtctgacagtaaggaaccttttgtggacaacttagtgttaacatcagcagtgcctggaaatctactgacaagttctgcagttgcctctgatacatgcaagatggagatcttgaataagaaaataacacttgaagcagatgcatcaaatgctccacttaatcagcctcctctctctagcgttttcgcttcatcttctggtgatgaccaagataatgtgtgtggacgtcctagtccaaatccaagacctgagggtgagcagcctctcatgggtaactcagggttaatatcaacagtgcctcgaaatctaacttctacttctgcatctgcttccgacatatgcaaaatggagatcttgaatgagaaaagaacacttgaagcaaacccatcaaatggtttgattactcaatctcctcaacccaaggttttccttgtaccatctcctgatatcctagagtgtgaattttctagtgaaacacctaggcatgagtttaaggaacctgttgcggacagctctgggttaacttcagcagcacatgaaaatttagggactaagccacatgtccactcaccagatgcctttgtaccaccaaagtctggtgctctaactggggaattaggtgacacgaaatcagattttaaaggtgaagaaactattcaaaaagagcaatattttggaagtgaatctattgccgctacaagagagaatttgttaattgatccttcctctggtgttgagtcgatagatgtgtcagatgtactggattctttaatggaagaaaggagtggaacttcgtacatgccaggatcaatagaggacttcctagccgaagaagaaccacaatactctagccctatcgcattatctccttggggtgaacctagttactaccaaggtgatgctgttgattctgcgctatggggtactcaagatttgatcaatgatatgtggtcattgctttcaccaagacctatgctccaaccttcatctggtattggaactgaggggaaggaaacttttgatatcaacgaggtggctgtgacccatgttagtagtgattattttcaaaaaggatcaatgtttggggaggaaaatgtgaaccaggcaaacttgagtgctgctgcagactggatgctgcctgagcaggtcccatcaataccaaatggtatgtcaacatcgtcagtagatgagagcaccatagttttaggttctcagccatcaaccaatcagagcttagactggggtggtactacatggagtattggccagaatgccagcgtgtatagcaatgaaaaagcagagccctcgagtaaaagctattgggaagaaccaaggaagcaggaaaccgccaaatccagtgtttctatttcaggacaggccattggaaacaacaagggcttggaccctcgtgataatgctgctaatcggggcagccggctgagtcatcatcaccgtggcaggtactcccaaatcagtgaatcttggctacttagttcaagtcactctaggagtaggtctgatagatttggcagcggtgggtcatcaagatcaacttcaaaggggcaatctaggggctaatgtaaattgtcaagtgcaggagagaaatgatgcatcttgtagctaacctgcatccttgatctctgcagcaggaatagttttctttttaaaattctttgtcatatctttgcagtttgtataggctaattacagtttagtccactcagactgtagcaaggagcatatatgtttagcatagaggtatttgactgcccattgcccaaggagtagattcagctcttgggcatggtctgtatcatcctgacattctgttggatggagctccaattgtaccaccggcatctctgttgacaccgaaacgcctgatgcgttggaaacaattatatctgattgattggtttaacttcgtggaatccctattttcgaagatcacgaaacgaca

SEQ ID NO: 217655 - DNA, 6495 bp, Zea Mays
cagaggaggagtgcaaacgtttaaggcagagcatgaagtgtgatttaattagcagactaaaagtgggtgatatcctagagaaagccaagatattgcaatatgtaagagtgaatgattggtttgaaaatgaaaagcagaggcttgggcatcttcgtgaccgtgcaagtgaaactgggcgcagaaaggaacttagagaatatgtagaaaagctgcagcttctcaacgattctgaggaaagaactcgcaggattattgaaattctggaattgcatgttgactcacatatggatcctaattatgagtctgctgaagaaacagatgagaaaggaactgttggaaagtcggtaaatcagacaagaccagatacaaccatatcacgaaggatatcgagatatcttagcactgtgcaaaaccatcctaaaaaagtttctgattctagccaccttccaaaaagcttgtccacagaaagtgcaatatgtggatcaggagcaagaagtttggagaacagcacagcaaacagaactatgtatggagctggaccactttcatcttctgtagtaacaatgacaaacgacacagagccagagaaagtctggcactacaaggatccttctgggaatgttcagggtccatttactcttttgcaactttcaaattggacaagttacttcccacgtgatctgagagtatggcttacatttgagagtgaagagagatcattgctgttgactgaagtgctttcaaaacagcagaaagattttactcaggctgcatcacatacaagtagcaaggcaacactggttggcactggacatacaaggaacaaccctagtgtggatcagaccaatgctttctcccctgttggtcatagcgtggttagttcttctggaatacctgttcagtataataagtattctgttccagaaagggaaagtgtgtactctccagatgatagcttgtcgctgtcaactagttcggttccaccaaaggatgcttatactgtgaatagccaagcacactgccagaataagcattctgttttcattcaatctcctgggagttcatatgggcacacagacttgaaccatgatggaatacagggaggatgctctggtgaatcaaaccaccatcacagcagtagagccctatggagtcctacagtggcacatgtgagttgtggacgtggtaacgtggaatctcatcagaatcagcatgtttcctggtcagaaagtcaacatgaatctaaaaatggttcacaaggaggatttgttaaagatctgaattcaaggcaggatctatcgaaaaacctacctgctcaacgtattgggaaagatgtttccagtcctttgtttgcttggagtccggccgagtcgaggacagcttcaagtcaacaggaagggtcttgcttaagttcaacaactaacccaagctttctcgatgaacttcattcttctattgcttctgcaaagcctaagagctgcgctccagcaacccccattgaagacagaggttctagttcaccatcagatatgctaagtcatgaagaaagagttccaatctgcagtccacaatcagcccctttagcatctgcttctgatatgtgcaagatggaggagatcatgaatcagcaaagaacacttgtggtggatacatcgaatgcttcagttaaccagtctcctgaatcaagggcttttcctgtatcctctcctgataaccaagatattgaccgcgagtttcctagtccagttccaagatctgagaataaggacattgctgtggacagctcagaattagcaccagcgtcacctgaaaatattactacgaatttgcctgtttcagatacatgcaagatggaggaggtagtgagtcaacaacaagtaattggggctgttgtatcgaattcttcagataaccattctcctcaatctaaagtttcccctgtatcttctaataatgaagatacgaaacataaataccccagttcaaccccaaggcccgagaataagaatcctgcggtggatagtttactttcaacgtcagctgctcctgaaaatctaacgacaacttcaacccatgattctgatacatgcaaaatggaggtagtgaatcagccaaaaacatttgaagcggatgcatcaaatgctccacttcatcaacttcctcattctcacagtttcctggtaccttctgacaatcaagatattgagtgtgaatgtccaggtccaactccaagatctgacagtgaggaagctcttatgaacaactcagcgacaactgcatcagcctctgatacaagcaaaatggaggagtttgtgaatcagcaaaaaacccttgaagcagattcatcaaatgctccacttaatcaatctcctcattctcacattttctcagtaccttctgacaagcaagatattgagcgtgaatgtccaggcccaactcaaagatctgacactaaggaacctcttatgaacaactccgtgttaacatcaggaccatctgaaattcagacgacagcctctgcagcctctgatacatgcaaaatggaggagtcagtggatcagccaaaagcgcttgaagcagatgcatcaaatgctccacttaatcatcatcctcattctcacattttccgtgtatcttctgataatcaagacaatcagtgtgaacatcctagcccaaatccaaaatctgacagtaaggaacctcttgtggacaactcagtattaacatcagtggtgcctggaatgctagcgacaacttctgcctctgataaatgcaaaatggaggagtttgcgaatcagcaaaaagcacttgaagtggatgcatcgaatgcttcatttaatcagcctcacattttcgctgtatcttccgataatcaagatatggagcgtgaacgtcctagcccaactccaaggtctgaatgcaaggaatcacttacggagaactcagtattaacatccttggcgcctgaaattctagcaagatcttctgcctctgcttctgataaatgcaaaacggaggagtttgtgaatcagcaaaaaccaattgaagcggatgcatcaaatgcttcacttaatcagcctcatgtttttgctgtaccttccgataatcaagatatagagcgtgagtgtcctagtccaactccaaggtctgaatgcaaggaatcttttatggagaactcagtattaacatcagcggtgcctgaaattgcaagatcttctgtatccgcttctgatacatgcaaaatggagtttgtgaatcagcaaagaccaattgaagcagatgcatcgaatgcttcacttaaccagcctcgcattttcgctatatcttctgataataaagatatagagcgtgaatgtcctaacccaactccaaggtctgaatgcaaggaatctattatggagaactcagtattaacatcagcggcgcctgaaattcttgcaatatcttctgcatccgcttctgatacatgcaaaatggagtttgtgaatcagcaaagaccaattgaagcagatgcatcgaatgcttcacttaaccagcctcacattttcgctatatcttctgataataaagatatagagcgcgaatgtcctagcccaactccaaggtctgaatgcaaggaatctcttatggagaactcagtattaacaccagcgacgcctgaaattcttgcaagatcttctgcatccgcttctgatacatgcaaaatggaggagtttgtgaagcagcaaagaccaaatgaagcggacgcatcgaatgcttcacttaaccagcctcacattttcactgtatcttctgataataaagatatagagcgtgaatgtcctagcccaactccaaggtctgaatgcaaggaatcccttatggagaactcagtattaacatcagcggcacctgaaagatcttctgcatccgcttctgatacatgcaaaatggagtttgtgaatcagcaaagaccaattgaagcagatgcaccaaatgcttcacttaatcagtgtcgcactttcgctgtatcttctgatactaaagatatagagcgtgaatgtcctagcccaactccaaggtctgaatgcaaggaatcccttatggagaattcagtattaacatcagcggcgcctgaaattcttgcaagatcttctgcatctgcttctgatacatgcaaaatggaggagtttgtgaatcagcaaagactaattgaagcggatgcatcaaatgcttcacttaatcagcctcacattttcgctgtatcttctgataataaagatatagagcgtgaatgtcctagcccaactccaaggtctgaatgcaaggaatctcttatggagaactcagtattaacatcagcggcgcctgaaattcttgtaagatcttctgcatccgcttctgatacatgcaaaatggaggagtttgtgaatcagcaaagaccaattgaagtggatgcatcgaatgcttcacttaatcagcctcctcgttgtcacattttcactgcttcttccaataatcaagatattgagcgtgaatgtcctagctcaactccaaggtctgacagtaaggaaccttttgtggacaacttagtgttaacatcagcagtgcctggaaatctactgacaagttctgcagttgcctctgatacatgcaagatggagatcttgaataagaaaataacacttgaagcagatgcatcaaatgctccacttaatcagcctcctctctctagcgttttcgcttcatcttctggtgatgaccaagataatgtgtgtggacgtcctagtccaaatccaagacctgagggtgagcagcctctcatgggtaactcagggttaatatcaacagtgcctcgaaatctaacttctacttctgcatctgcttccgacatatgcaaaatggagatcttgaatgagaaaagaacacttgaagcaaacccatcaaatggtttgattactcaatctcctcaacccaaggttttccttgtaccatctcctgatatcctagagtgtgaattttctagtgaaacacctaggcatgagtttaaggaacctgttgcggacagctctgggttaacttcagcagcacatgaaaatttagggactaagccacatgtccactcaccagatgcctttgtaccaccaaagtctggtgctctaactggggaattaggtgacacgaaatcagattttaaaggtgaagaaactattcaaaaagagcaatattttggaagtgaatctattgccgctacaagagagaatttgttaattgatccttcctctggtgttgagtcgatagatgtgtcagatgtactggattctttaatggaagaaaggagtggaacttcgtacatgccaggatcaatagaggacttcctagccgaagaagaaccacaatactctagccctatcgcattatctccttggggtgaacctagttactaccaaggtgatgctgttgattctgcgctatggggtactcaagatttgatcaatgatatgtggtcattgctttcaccaagacctatgctccaaccttcatctggtattggaactgaggggaaggaaacttttgatatcaacgaggtggctgtgacccatgttagtagtgattattttcaaaaaggatcaatgtttggggaggaaaatgtgaaccaggcaaacttgagtgctgctgcagactggatgctgcctgagcaggtcccatcaataccaaatggtatgtcaacatcgtcagtagatgagagcaccatagttttaggttctcagccatcaaccaatcagagcttagactggggtggtactacatggagtattggccagaatgccagcgtgtatagcaatgaaaaagcagagccctcgagtaaaagctattgggaagaaccaaggaagcaggaaaccgccaaatccagtgtttctatttcaggacaggccattggaaacaacaagggcttggaccctcgtgataatgctgctaatcggggcagccggctgagtcatcatcaccgtggcaggtactcccaaatcagtgaatcttggctacttagttcaagtcactctaggagtaggtctgatagatttggcagcggtgggtcatcaagatcaacttcaaaggggcaatctaggggctaatgtaaattgtcaagtgcaggagagaaatgatgcatcttgtagctaacctgcatccttgatctctgcagcaggaatagttttctttttaaaattctttgtcatatctttgcagtttgtataggctaattacagtttagtccactcagactgtagcaaggagcatatatgtttagcatagaggtatttgactgcccattgcccaaggagtagattcagctcttgggcatggtctgtatcatcctgacattctgttggatggagctccaattgtaccaccggcatctctgttgacaccgaaacgcctgatgcgttggaaacaattatatctgattgattggtttaacttcgtggaatccctattttcgaagatcacgaaacgaca

SEQ ID NO: 217656 - DNA, 533 bp, Zea Mays
agaatttggaccgatatcgcagatggcgggggactggaaagaagatggttccttccgctgctcgtggtgtgcttgaatccagtagtggtacacattctggtggctttatgatgaaaagatgtggtcatccaagttccacccgatcgtggagagatccctccgcctgcacttcaccgttgaccccgatcaatgactaccattctgctctgagtttgctactttgctacgtggtcggtgttcttggagccgctgcagcctgcaagcctccatggaatctccaagctggacaagaaacaaacaaaaaaataacataccaatgccgataatcttgctgggagttgtgtttcagattactttgttgccccacatcgactaactgtgcctgttgacagagaactgagaatggatggatgaatgaatgaatctttgcaggccaagtgcttgactgagattgggagatgctcctgatgatccgagtttaacagatgtcaacaggcatgtgatcaggaatctcaactgcatctcttgttaac

SEQ ID NO: 217657 - DNA, 934 bp, Zea Mays
ctcaaagccaaaaagcccaagcatcagcaggctggccgctggcagcctgacacacatcatgctgtttgctgcgtggacatgtggttttttctttagagaaaagtggagcagctctctgaagaggtagattcattgaaggaaacccttgacaggcattctctgcgacagaaaaaacggattctggaagcaaaagaaagagctgagctatttgaaagagctaacggtgaatcttcacacgtcctccgaatattcgacgacgaagcccaagcaaagcaatcagcccgtaactcctcacgaatgctcgaagaagcttacgagacaggagtgggtatccttcacaagtacgctgaccagagggatcgactgaagagtgctcaaaggaaagctttggatgtcctgaacactgtcggtctgtcaaactccgttctgaaacttatcgagaggcggcaccgcgtggacaggtggatcgcgtatgctggtatggtcatcaccgtggtggtgatgattgcgttttggcggttaacgcattagtgctgggctgtgtttgttacatatttctatcccagatatcaatgtgcaaacaagggggatggggcagattcagatggtgcagttttttttcgctggtcgtggagcagttcaagtttgcctcgccggtccgtcgcgtgcatagttgatgccggacccccaaagtgggttaaatgttcaaattccattgtatgcaatgctgctgtgtagtctattgttacgacttccatgtaactacacaagcttttgcgggacacagaagagaaaaggcgctgtattatttctgcacgaaatattgtactcgtaatatctagcctgcagttgaatagcacaaaataacggaaacctgtgagacctgaattttcagatttaactgaggaaaagatatgtgtctagcatatgttcc

SEQ ID NO: 217658 - DNA, 2406 bp, Zea Mays
agccaacaccctaggaagcattcctgcatctaaaaatctctcatggtgaactcatgtgcacctgcagcatttcttcactcttctgcatcctggcaagctttacttgtcttttttatttctgtgactgcagttggtgccgcagatgctggaggccaagatgctggtggccaaggtccgtgtcctcatttctcctgtggtgatcttggcaacatatccaaacctttccgtaggccaggcgacccagaagagtgcggtgtaaaagcatacgagctggtctgtagcaacggcaaggctacaattcgcatcaacacggggacatattttgtcaccagcatcaactataccaatcgttccttctgggttgtggacgccaatttggatatgcacagcagctgccctcttcctcgttgggatcagtttccttacacttctgagggattgttctggagaagtggtaaacatacccatatcgatttgcccactgatgatgcctctttgtgggcatgctttgttaattgttcgagagcagttaggattacgaataacttggggtacaagcccgttacttgcctgagtgggagcagttcctttgtttatatatatgtacagtatggggcttgcacagtcggatctcttgaacctttttgtggatacttggccgagatttcctttggtaccaatccgaagggtactaatgcaagttatgcagatatcatacaagtggtaaagaagggattttctgttggattcccaaaggacgaatatgattatagctaccataatacttcttggatattcaagacatgcctaaataattttaccaggtacttccacgagcaattgtctagcggaggcatcgttggtataactcgtgctttcttttggagtgatgtatttcttctcaagtgcgcagagagttacaatgccacaactgttattttagatttcgatgtgatatccgtagtgactggtgttaaaatcacaacgttacttgtactgttcaggtttgtgttcacagcactagcagtacagatgttccttgcccacaagtactggaaaacaacgatagcaattgacgctgtcgagaaattcctccacatgcaacaaatgcttggtcctactaggtttgcctacactgacatcactgcgatcactggccatttcagagacaagttgggtcaaggaggatacggctccgtatacaagggtgcactactctcaggcaatatgcatgttgccgtcaagatgctgggcaactcgaactgcaatggggacgagttcatcagtgaggtctccaccatcggtaggattcaccacatcaatgtggttcgccttgtgggcttctgtgcagaggaaatgagaagggcactggtctatgagtacatgcccaatggttctcttgacaagtacatattctcggccgaaagaagtttttcttgggatatgctcaacgagattgctttgggcattgcaaggggaatcaactacctgcatctagggtgcgacatgcagatccttcactttgacatcaagccacacaacattcttttggacagcaattttgtcccaaaagtttctgactttggccttgccaagttgtacccgagagacaagagctttgtgccagcaagcgccatgcggggaactattgggtacatagctcctgaaatgatatctcgtagctttggtgccatatcaagcaaatctgatgtttatagttttggtatgctactgctcgagatggcaggagggcgaaggaacgcagaccaaaatgcagccaactcaagccgagcatactacccagcctgggtttatgaccgcctagcggaacaagacgctggcgagatttctgttgcggcagacatgcatgagttggagaggaaactgtgcatcgttgggctacgttgcattcaaatgaagccgcaggatcgtccgaccatgagcgaggttatagagatgctcgagtgtggcactcatggcctgggcctgcaaatgccttctaggccattcttctgtgatgatgatgatcctaatatgcctgcagcagattcttaccatttctcatcggagcttactgcaatatctgaggaagatggttgaagaaataatacatgtctttatgcattcagatgaagccacatgatcgtccaatgatgagtcaagtcgtagggatgcttcagtgatcatatggttcatacagattcttaccatttctcctcagacctgaatgcaattgtaacacccgggtttcggggcaccaagacccaggcgcgaacataatcaccaggtgtgctgggaccaagtctcacacatatgatgaatcatggcacatgatcgaatgtcacatatttactatataataggagttctatacaaaataattaattaattacattataaggagac

SEQ ID NO: 217659 - DNA, 1019 bp, Zea Mays
ctccggctgtccgcattccgcaagctagatcgccattccactccgccttcggttggaagctccgttcctaaccaacacaacacaacacccttctgtttgagagagtctcttgcgttgcgttggcggtcggtcggtgggtcgcgaggatgacgccggcgagcgtggtcgccatgcccaggagcgtcccgttggccttggcgttggcgccgttcccggcgcccgctagggccgaggagaggaggaacgcccggtccttcaggccctcggcgtgcggcgccggggacgaccagaagccgccgtccatggccgcgatgccggcgtcgctgcgcaccatccagaccaggaggaagcaggcggcggcgcagcgaggggtgccgcgggcgacggccacgagcgcggccgggtgcgccgtggcggctcttgtcaaggccatggaggccgtccagggcgcggcggctgggggcgccaccgaggccgcgcgcggcgccggggacgccgtggcgtgggtcttcagcaaggttcacctccagtcgccggacctcgccgtcgggctgccgctgctcgggatggtcgcctgctgcctcggcacgatcgtggaggcggcggaaatgggccgcgtggaggcgaagaagcccgaggcgtcgtcgggcgacgcagaggccgaccaccccgacggcaacggggacgcggccgccgaggaacccgaggacgacgacgacgacatgccggagctggtggaagcggacatcgagaaggagctgtggggccagatcggcatcttgcatggcggcggcctattcggggacagctcctacgtccatgaggaactcgacgaggaagagatcaaggagatcgacagcgcccgcgcgcggcgccggaaggcggcgtacgagagggccatcgcctcaggcggcgccaactcgctcatcatgtccaactacgcgcagctcctctacgagttcgacaaggacatcgacaggatcttgacgcgtgagtgcgtgaccacacggcacatgtac

SEQ ID NO: 217660 - DNA, 615 bp, Zea Mays
cggccatggaggccgcaagcccgcaagcaatcaggagccggggagatgtggagacgccggcgacgaggcgaagaagaaggaggcggcgcttgcatcaagcaggctcctcgacccggcgttcaagccctccaaactatcccaggaccggctcgacaagtttaaggaattacacaagaaacggttacagataactgaaaagccgaagtataaaagaaaactgaaaggaaccgctgggagaagtaccaaagtaaccagtgattacaaattcactaatacggatgcatctgctgatagttctccaagagatgtacatcatacgtcatcaattacaggaatccaagggccgaattgtctcctcccccggagccctttgagtcacaaacaaaccccaaagcaaaaagtgaagatgaaattattaagatggccgaagctattatggacaaagttgtacctcaactgctaaacgaagctgcggaagtagttctgaaagaagactagctattgttgtaaaaacattcggagtactgatgtaatatttgctgaacaaagtgtgtaatattctataattttgaaagtaatatatataagttgtatgtaattcaattctttacgatg

SEQ ID NO: 217661 - DNA, 527 bp, Zea Mays
cggccatggaggccgcaagcccgcaagcaatcaggagccggggagatgtggagacgccggcgacgaggcgaagaagaaggaggcggcgcttgcatcaagcaggctcctcgacccggcgttcaagccctccaaactatcccaggaccggctcgacaagtttaaggaattacacaagaaacggttacagataactgaaaagccgaagtataaaagaaaactgaaaggatcctgcatcaggcctgtcctcgaggaacaaaagaaagctacattgggggcttgatattaaaggacgatggggaaggaaggcaaacatgtaaaaatctgaagacccaaccgcaaaagcatatccacagttccacaccccacttgattcagatttgaaaggagaaggacagaggaaagtggcaggccttttccacggatcatcaggttgcttgtaaggttcatgtttgtgacagcaaccagaaacactggagcgtggacagcagtctcagaactaagcaaagagccagctacacaattctgcg

SEQ ID NO: 217662 - DNA, 646 bp, Zea Mays
cggccatggaggccgcaagcccgcaagcaatcaggagccggggagatgtggagacgccggcgacgaggcgaagaagaaggaggcggcgcttgcatcaagcaggctcctcgacccggcgttcaagccctccaaactatcccaggaccggctcgacaagtttaaggaattacacaagaaacggttacagataactgaaaagccgaagtataaaagaaaactgaaaggaaccgctgggagaagtaccaaagtaaccagtgattacaaattcactaatacggatgcatctgctgatagttctccaagagatgtacatcatacgtcatcaattacaggaatccaaggggatcctgcatcaggcctgtcctcgaggaacaaaagaaagctacattgggggcttgatattaaaggacgatggggaaggaaggcaaacatgtaaaaatctgaagacccaaccgcaaaagcatatccacagttccacaccccacttgattcagatttgaaaggagaaggacagaggaaagtggcaggccttttccacggatcatcaggttgcttgtaaggttcatgtttgtgacagcaaccagaaacactggagcgtggacagcagtctcagaactaagcaaagagccagctacacaattctgcg

SEQ ID NO: 217663 - DNA, 2366 bp, Zea Mays
atggcgcccgtaaagatgttaatccgcccagttggagcccgacagagcgggcgagtagtcgccggatcccgtgctggtgctgagcacgaccacgacccagtcgccctcgctcgcgatcccggcgccggagaactggctgtcgttgaggaaccggttgtactgcgacttggtgtagttagcgaggacgacgacggggacgaggcccagcacgcacgccggcatcacctggccgtcctcggtcaccgacgcgttgaggtggcagcggtccagggctcaacctataaaccagcaaaaagaggagctccacatcggacagcatccaggtcccaccgttcagtggacgtaagaaagacacccggatcctgcgctctccttaccctctccacttccgtttccggatcccgtttccagctccgatccaacccagcatctgtaccgcgccgcgcgagcacgtccggcgccggtgcggcaggcgaaatccgagagcactcctcccccgctacgccgcaccgcccatggccgcagctagccgcagatagagagaggcgcaggcgagggcgtgcagatccagatccggtgggcgggaaggacttgatcgcccccaccaccatggccggcgcggtgtcggcgctcttcctgctggacatgaagggccgcgttctcgtctggcgcgactaccgcggcgatgtctccgcgctccaggccgagcgcttcttcaccaagctcctcgacaaggagggcgattcggaagtgcactcgcctgtggtctacgacgacgctggcgtcacttacatgttcatccagcacaacaatgtcttcctcctcaccgccgctcgccagaactgtaacgcggccagcatcctcctcttcctccaccgtgtaatagatgtgtttaagcactacttcgaggagctggaggaagagtcgctcagagataacttcgtcgttgtgtatgagttgctcgatgagatgatggattttgggtacccacaatacacggaggcgaagatattgagtgagttcatcaagacagatgcatacaggatggaggtcacacagcgtccacccatggccgtgacaaatgctgtgtcatggaggagcgaggggatccggtacaagaagaatgaagtcttcttggatgtagtggagagtgttaacattctagttaacagcaatggccagattgtgagatcagatgtggttggggcactgaagatgcgaacatatttgagtggaatgccggagtgcaaacttggcttgaatgatagggttcttttggaggctcaaggcagagcaactaaaggcaaagcgatagacctcgatgatatcaaatttcatcagtgtgtacgtttggctagatttgagaatgatagaactatatcgttcatacctcctgatggatcttttgatctaatgacatacaggcttagcactcaggtaaaacctcttatctgggtcgaagcacagattgagaaacattctagaagccgtatagaactcatggtgaaggcaaggagtcagtttaaagaaagaagcacagcaacgaatgttgaaattgaagtgcctgttccttcagatgccacaaacccaaatataagaacttcaatggggtctgctgcatatgctcctgagagagatgcaatggtttggaaaataaaatcattccctggtggcaagcaacctatcctataggaatacatgtgcagagcagaatttagtcttcctagcataacagcggaagaaggggccccagaaaagaaggcgccgatacgggtgaaatttgagataccatatttcaccgtatcaggtattcaggtccgttatctgaagataattgaaaagagtggttatcaggcactcccctgggttagatatatcacaatggctggtgaatatgagctgagacttatatgagttctctcttctctggctgccggacgacttttgaagctgcaggacactaaagatacatatttgctatcgacacagcgaacagttttcatttggatgttggcctggaagtcttctgccgaccatacccctccccgtggtggggcttgctgttcatcttgttaggctcaccttaccctggttattgtaagttaccaatcaagtacagttttggaggaaaggatattcagttttcagttcacttgtattgttattgatttattttgtgggtaccaaactagatttgtttcgttctgtattacacggaaaacatgggctgatttgagttcaacaaaacattgccacatctggcgatgattctggggtgcgggttgaaacaaatttgcccttttttttactgtaaatgtcgtgaacaattccctttcagttccatcacgttcaaaattgctcttttc

SEQ ID NO: 217664 - DNA, 2310 bp, Zea Mays
atggcgcccgtaaagatgttaatccgcccagttggagcccgacagagcgggcgagtagtcgccggatcccgtgctggtgctgagcacgaccacgacccagtcgccctcgctcgcgatcccggcgccggagaactggctgtcgttgaggaaccggttgtactgcgacttggtgtagttagcgaggacgacgacggggacgaggcccagcacgcacgccggcatcacctggccgtcctcggtcaccgacgcgttgaggtggcagcggtccagggctcaacctataaaccagcaaaaagaggagctccacatcggacagcatccaggtcccaccgttcagtggacgtaagaaagacacccggatcctgcgctctccttaccctctccacttccgtttccggatcccgtttccagctccgatccaacccagcatctgtaccgcgccgcgcgagcacgtccggcgccggtgcggcaggcgaaatccgagagcactcctcccccgctacgccgcaccgcccatggccgcagctagccgcagatagagagaggcgcaggcgagggcgtgcagatccagatccggtgggcgggaaggacttgatcgcccccaccaccatggccggcgcggtgtcggcgctcttcctgctggacatgaagggccgcgttctcgtctggcgcgactaccgcggcgatgtctccgcgctccaggccgagcgcttcttcaccaagctcctcgacaaggagggcgattcggaagtgcactcgcctgtggtctacgacgacgctggcgtcacttacatgttcatccagcacaacaatgtcttcctcctcaccgccgctcgccagaactgtaacgcggccagcatcctcctcttcctccaccgtgtaatagatgtgtttaagcactacttcgaggagctggaggaagagtcgctcagagataacttcgtcgttgtgtatgagttgctcgatgagatgatggattttgggtacccacaatacacggaggcgaagatattgagtgagttcatcaagacagatgcatacaggatggaggtcacacagcgtccacccatggccgtgacaaatgctgtgtcatggaggagcgaggggatccggtacaagaagaatgaagtcttcttggatgtagtggagagtgttaacattctagttaacagcaatggccagattgtgagatcagatgtggttggggcactgaagatgcgaacatatttgagtggaatgccggagtgcaaacttggcttgaatgatagggttcttttggaggctcaaggcagagcaactaaaggcaaagcgatagacctcgatgatatcaaatttcatcagtgtgtacgtttggctagatttgagaatgatagaactatatcgttcatacctcctgatggatcttttgatctaatgacatacaggcttagcactcaggtaaaacctcttatctgggtcgaagcacagattgagaaacattctagaagccgtatagaactcatggtgaaggcaaggagtcagtttaaagaaagaagatgccacaaacccaaatataagaacttcaatggggtctgctgcatatgctcctgagagagatgcaatggtttggaaaataaaatcattccctggtggcaaggaatacatgtgcagagcagaatttagtcttcctagcataacagcggaagaaggggccccagaaaagaaggcgccgatacgggtgaaatttgagataccatatttcaccgtatcaggtattcaggtccgttatctgaagataattgaaaagagtggttatcaggcactcccctgggttagatatatcacaatggctggtgaatatgagctgagacttatatgagttctctcttctctggctgccggacgacttttgaagctgcaggacactaaagatacatatttgctatcgacacagcgaacagttttcatttggatgttggcctggaagtcttctgccgaccatacccctccccgtggtggggcttgctgttcatcttgttaggctcaccttaccctggttattgtaagttaccaatcaagtacagttttggaggaaaggatattcagttttcagttcacttgtattgttattgatttattttgtgggtaccaaactagatttgtttcgttctgtattacacggaaaacatgggctgatttgagttcaacaaaacattgccacatctggcgatgattctggggtgcgggttgaaacaaatttgcccttttttttactgtaaatgtcgtgaacaattccctttcagttccatcacgttcaaaattgctcttttc

SEQ ID NO: 217665 - DNA, 1203 bp, Zea Mays
gcgtggtggagagagggatttctacatgtgctctctatcttctagataagagatggttcgtttcggcgtccatgcagggtgtggaatggatccagtttgtcccagttcggaaatcggaatggtgaacacatatgagatgagcttcccggatatgtattatcaagaaaataagaagaaaagaaacagatggctactttgagggcgacagtgggcatgctgctcggcgtcgaggacatgcacaggttcccggtgcgctccccgtggatggaccgcggcgacctcatccgcagtcccgccgcgcgatagatcgtgtccaactacttcagcatgttcgggccggtgcaggacgtgcgcatcccgtatcagcagaagcgcatgttcggcttcgtcaccttcgtgtacgctgagacggtgaaggtcatcctgagcaagggcaacccgcactttgtgtgcgacgctcgcgtgctcgtcaagccctacaaggagaagggcaaggtccccggtaggtttaggaagctgcagcacacgcaccatggcggagccgagttcgtcggttgcgcgtcgcccactggattgctggattccagggacccctacgccctcctgcttctttcaggtgcccagaatttctccaggttttctcctgggcatgaagccattgggctatgatgtgtgaggtgcacagagcaaaaaagggggagggcccccctccattcctctaatctgggagggactactaatatggctacatgatggccggtcccatcaaccgagcatagagaagctttgataaagaaaaaagaaatacctttggagaggtgtaatcttcttcagagtgggagaaggaggggacagtgaagacaacaacagagaagaaacaagtccagtttgttttttagctcttaggcctatgataagtatatgatagtaagtgagtgagtagtaggcataaataatagtagtagtagttaattagtagtcgtttattagtagctgctgccagtgtcaagaaggtgatgaaaaggcacactccagctctctcctatgctcgtttgtggcatggatggatctctcactgttgctatgatatgttgttttatttataatatcgtgtgtataaatatttcatgtttttcactttgtttgatttgcggtaccacatatataacgatttcatgtgttttccgtggcaacgcacggaca

SEQ ID NO: 217666 - DNA, 1183 bp, Zea Mays
aacagatggctactttgagatcttgtcccccaccgcctgatctgactacttttgagctgatttggtcaggaaaggtgccatttttacccagcggcttcctcgccaccaaattaaaggttgcattttgtctccggtctcaccattcccattttattctctgcgtgttgctgtctgctccagggcgacagtgggcatgctgctcggcgtcgaggacatgcacaggttcccggtgcgctccccgtggatggaccgcggcgacctcatccgcagtcccgccgcgcgatagatcgtgtccaactacttcagcatgttcgggccggtgcaggacgtgcgcatcccgtatcagcagaagcgcatgttcggcttcgtcaccttcgtgtacgctgagacggtgaaggtcatcctgagcaagggcaacccgcactttgtgtgcgacgctcgcgtgctcgtcaagccctacaaggagaagggcaaggtccccggtaggtttaggaagctgcagcacacgcaccatggcggagccgagttcgtcggttgcgcgtcgcccactggattgctggattccagggacccctacgccctcctgcttctttcaggtgcccagaatttctccaggttttctcctgggcatgaagccattgggctatgatgtgtgaggtgcacagagcaaaaaagggggagggcccccctccattcctctaatctgggagggactactaatatggctacatgatggccggtcccatcaaccgagcatagagaagctttgataaagaaaaaagaaatacctttggagaggtgtaatcttcttcagagtgggagaaggaggggacagtgaagacaacaacagagaagaaacaagtccagtttgttttttagctcttaggcctatgataagtatatgatagtaagtgagtgagtagtaggcataaataatagtagtagtagttaattagtagtcgtttattagtagctgctgccagtgtcaagaaggtgatgaaaaggcacactccagctctctcctatgctcgtttgtggcatggatggatctctcactgttgctatgatatgttgttttatttataatatcgtgtgtataaatatttcatgtttttcactttgtttgatttgcggtaccacatatataacgatttcatgtgttttccgtggcaacgcacggaca

SEQ ID NO: 217667 - DNA, 1837 bp, Zea Mays
atggccttggtgggcgtggtcggcattggcataaccaagcgaccgtcgcagcaatgcctggacgccgtcgagagcgcggcccgacgcgccgaggcagaagagggtacggtggagcagaacacaccgccatggatggcgacaaagaaggtcacagcgctcgccgccatctgcctcgttgcgttgcccatcctgatggtgaccacggttagccggcgggacgtgccgcggacgcccgcgtccttctggcccttggcgaccctcgcgaggcaagcttgtcggcggcctgctcgtgccggggttcgacgagcggtcgtgcctcagccgctaccagtccgcgttctaccgcaagaacctggcgcggtcgccgtccgcgcacctcatcaggcggctgcgccagcacgaggcgctgcagcgccggtgcggcccgggcaccgaggcgtacagggccgcggcggcgcggctcagatcgtcgtcgcaccgcaatggcagcaacgacgacaacgacacccgcggcgcctgcaggtacctggtgctggtgccgtaccgggggctcgggaacaggatcctggccgtggcgtcggcgttcctctacgccgtgctcgccgaccgcgtcctgctcctcggcggcgagacgtcgctgggcgacgtcttctgcgagccgttcccggggacgtcgtggctgctgccgccgcggttcccgatcggcgacctccagaacctgacgggcgacgtgcgggagagctacgggaacctggtgcagcagaacgacagcgcggcggcggcggcggcgtccgggctccggtacgtgttcgtggacctcgaccactcgtgcacgtaccacgacaagctcttcttctgcgacgacggcgagcggcagttcctccggcgcgcggcgtggctggtgatgaggacggacgggtacttcgtgccggcgctgttcctgaacccggcgtaccaggacgagctcgacgggatgttccctcggaaggactcggtgttctacctcctggcgcactacctgttccacccgacgaacgaggtttgggggctggtgacgaggttccacaggtcgtacctgaggggctcggacgaaaggctgggcatccaggtgagggtgttcgacggagacgccccgttccagcacatcctggaccagatcctcgcctgcacttcgcaggaacacctgctccccgacgtggcggtgacgcaagagccgtcggcgggccgcggcgcgcggtccaaggccgtcctgatgaccggcctcagctcgtggtactacgagaagatacggtggaagtactggcagtcggcgacggccaccggagaggtcgtgagcgtgtaccagccgagccacgaggagcaccagctctccggctacacgacgcacgacatgaaggcggtggcggagatgtacctgctgggcatgaccgacaagatcgtcaccagcggctggtcgacgttcggctacgtcgggcacggcctcggcgggctcacgccgtggatcatgttcaggcctgagaaccacaccacgccttacccgccgtgccgccgggccaagtccatggagccgtgcatgcacgggccgccgttctacgactgcagggccaagcacggcgccgacacggggaagctggtgccgcacgtccagcactgcgaagacatgagctgggggctcaaacttgttcatcccgagtgaaacagcaataatagtgaaaagaatatcttttttttatggttcgaattcctgtgctattctgcggctttgttcatttccacaccgatttggacgaagcgccaggaacacgaacgcaacgcagacacgaaggtgaaaactcct

SEQ ID NO: 217668 - DNA, 1428 bp, Zea Mays
acccatccctcgtacgaggtcggcccctttctccttctgccgcccgcaccaaccctccgccaacactgccctgcttgcaccaaccctccgccctaggtccccgcccagcctgcgccaaccctgcgccctcgagctccctgcctcgcccagctcgtggaggtgagcagatgcttcaacatttaatccaccctccttcaactccctggccacggcgatggcggcgcgccggtgcatggccggctcgaggcgggattggatgaattgaggaccggataggtacacgatggagtgggatgcacggacgttgaggtgagatggccaaagcagaaggcgtcgtcacacccgcagtcggagcacaacagacaatgggagtggtggcacgccggagattggagacactcatcgtccatggaatggggcacacagtagcggacgagggagggccatagtagaaggtgtctgcgctgaagatctttggctcccatctcgccggctgcagcgaggcgccatgctttgagggttgctccgccatgcagatgctctccgacatccacttccagcgcgcctgggtccagggtgtgatcctgcctgtcagcaaactacaacaaagctggcgaacgacccttgaggaaatgataggtcctgtgtcgtcgaccttttcgtcgtgccaaaataagcagagagacgattctggcggccagagttcagagacacttatctagctatcaagacgtcgactcgatatctctggaaagttctcagttgtggaaacgctaataggtaaagtggttcagagagcgacatctcctaggtcgcgtgtatggcgggaggaaggttctgtgtcatcgtcgctgagcgattatttggtgtcttcttccagagagtgtaagactcttttcctctcccttccccctctctccccttctctctcttatacttccgccgcagcgtgttcacccggaccttggagacgtgtgcgaagatggatggtgtggtgcctgtccggcgacgcgtagttcaccgtacaacagtatatgttccctctcattgtcctgcagcctctccagcagacgaccaccattcactcccggtcgctcacctctggcgcggacgggtagcggacgttgaggtccgcctctcacccagccacgccacatctgtcgccgccgtcgacggtggccatggacaccggctgtgaagtttctagaggcaacaagacgtagtaccgacaagaaggatcgaggagcgtgcagaacaaggaggttcgcgatgcgtccaaggcaagactgtgtcgtcatgatgtagccgttgattggaaatctgacgcctagatatatttgagccgacgtggacaatgttatagtcgtcgtttccttacggcttaataggtgcaattactatggctcgacaataagaaatacttagaat

SEQ ID NO: 217669 - DNA, 1496 bp, Zea Mays
tttatataaaaactgtgcatcatatgggaatcacaaggtatcccaacaataatgtacctgccatcgttgcttcatatctgaatgtggatccagctacaggcgattattatcctacagtattcttcaacgagttttggcttttgagggataaattaatagcgctcaatgagtctgtgaaggaattgcccttaaaccttgaagttggtcctattagcatgaccaagtggcagttttttttacagattgagcagtccttccaggttcatcgtagttatggaagtatgcttgaaggcgaggctgatgaactcaagagggttttccttgaaggaaatccttatcttcttggattgactatgattgtttctctattacactctctgtttgatttcctggccttcaaaaatgatattcagttctggaacaagaacaagtccatggaaggtctatcggcaaaatctgtggttctgaattttgtgtgtcaactaattgttttcctgtaccttcttgacaatgacacttcatggatgatccttgctagctctggaattggtgtttgcattgagttttggaagatcggaaaagcgatgcatattgaagtcgatagaagtggaaaaattcccatgttgaggttccgagatcgtgaatcatatgcacagaataagaccaaagagtacgatgctattgcaatgaagtacctcacctatgtcctcttcctccttgtgatcggtttctctatctattcactaaagtatgaaaagcacaagagctggtactcatggatactttcttctatgacaagttgtgtgtacatgtttggtttcatcatgatgtgcccccaattatttatcaactacaagctgaagtctgttgctcatatgccatggagacaaatgacctacaagttcctcaacactataattgatgacctttttgcattcgtcattaaaatgccaatgcttcatcgtctctcggttttcagagatgatgttatcttcttgatatacgtctaccagaggtggaaatatccggtcgacaagaagcgtgtcaacgagtttggcttcggaggcgaggaggaacccgcagcccaggagactttggaaggaagtgatccagcagctgcagcagcagcagccgagccaacggaggacaagaaaaccaagtgatctccaatcgttcgatcatccaaatgtagcacgccactcagcagcacctgccctcccacagcgggtgtgaaatttttcgctgaactggatgctggactcttgcggtcttgccttactgagatactgacgataagataagttgtgtgtgtaacaggggatacaatagtgtttctagggcagcgggcgaacaggcacactatcgcaattacgtttctagtttgtcttttagcagccattactaggcgatatgcttgtttatattgcttttttgtacaattttgtgcatcatttttcaaaatacataacggcgattcttagcttcctaataatgtt

SEQ ID NO: 217670 - DNA, 524 bp, Zea Mays
gtcggaagtagaaaagacaactttaatcgacacggcaaaggggaccggtatctgaagccgttcgtgattccaaaaccagaggtcacggtcgttcccagggcgaaagatgacgactgtctcatcctcgcaagcgatgggctgtgggatgtggtgacgaacgaagaggcatgcaaagctgcgcgccggcaaatccaagtgtggcacaagaacaacggtgccgctggcgcatcgtggtcgttgtgcgacgagggtgatggatccaccaccgaccccgctgcccaagccgcagcggattatctcgtgagggtcgcgctgaagaagggtaccgaggacaacgtcaccgtcatcgtggttgacctgaaacctcgaaagaaaagctcaggagcaactcgtagcatcgggcgttctgggtccatcacagtagagctgagctgaccatggcatggccaaagaactgctgctaggtgctagctggtcgtccgcacgagacttgaccggcccacagttttttttttgggtccgtt

SEQ ID NO: 217671 - DNA, 964 bp, Zea Mays
cccacagagcccacttcacgcagtgggggaccatggctacaagacaattgttacgattggtgatggcgcaactgatctggaggatactcaggttttttgtttcttcagtcagatatcatacacgagtacaaatgagattaatgattggataggagctccgaacgcgagccatagacgggagttgatgccactgggcgatggatggtcgcatcctcaggacctcggcgtgcaacaacagcgactgtcatttttctcatcgcctacttcaatagcctacaacattagcagcgaaggatcgacaaaggtggcatctgaggcagcagatataggaagaccagccttgtttccagcttctggtttatcaaacacttttgggttcaaggttcaggacaagcaagggagaatgcaaagatttaactgtgaaatgagcagcttgacagacctgataactagcattcttcagagggtcggcgatgacattgacagaaaacacctgccacaaatttcgtatgaagatgaggaccatgataaggtcatattgtcgtcggacagtgaccttatagctgccatagaccacacaagacagatcggttggaagagcctaaggctgcacttggactacgcccgccagaagagaggggacggttcctcagacttcgagtacgctggcaaggatgcatgggcttctgcatactttggagtcatcaaacatctaacatttacacttgaactgtttggtgaaatgcttgggagaaagaggccagcaagaatggagtcatggaacatcggcaggaggggtgcagcagcggcaaccgatgtatcccttgaacaatctggttttgacaagatgcaaatcaatctagtgtacactgtattccacacttttacagattgtttggctaattacaagattatctcagtgttttggtttggatttagagtacacttatgtatgaaatattga

SEQ ID NO: 217672 - DNA, 2293 bp, Zea Mays
gttcatctgagccaatggtttagtacttccattttcaattttattggaaggtgacctcgaaaaaccttcactatgttcattagcacaaaagtgtaaacatcaatgtggtttgcttgaggaaatagtattgccctcaaggaacatgggatctttaccaaatgcagaagaatcaccatttggcctagagtctttgttctggcaggaaagcatacatgaatctgtggaatatggtgcacctgcttctgcaacaactcatactgaaaatggatttggtgaatcaaaaggttgccatgtcaagtctgcactcgaaaatactcatgtgtcagaacctttttcccaccatgatactgaagaaaatatttccaaaattggtggttgcatgcatacatcccagcaagataatggaatggaagatgctatcgagaatcctttaattagtttatcaactcctggttgcaagcatgaaggtgctttgtctgaggaagcagtgcacacaatgaaggattatgctggaacatgctcatcaaatcccagggtacccatgcagttgcatgacgaccttgcattcccaggtcctgaaaaatcaggagatgaatcagtcaatattgaggttaaagtacaccatggttctaatctgtctcagttaggatcaactgatctcttggatgatactgaattgcttcaccagggccataactataaagatcgatccaatgaggatatgctagagcaggctgcttctgaaccctgcacaaatggggatgatatcgtggaggctgcggctgctaccaaatgcttagaaagtggagcgatgctggttccatccgaagagagatcaaatttgaacgataggcagcttacccccaagctggaaagcccagacatcatggaatctggccttaactgtgataaagatgctcgcaatactttggacaatggatctgttgtggctgttgctggtaagagaactccatctggttctggtcactatgaacacaatgtctaccaagtttcaggcatttgtgctacgtctgaagctgcaccagtcggagtggtagaaactggaatagctgtggaaacgtcatccctggtagatgaccaacctaatcctgtgctggatggtgatgaagttgagaagcacagcttaaactgtgaggcagacactggtcggattcttggtactggatctgttacgagcaacacaacccttgtgcccaaggacggtcacaccatttgttgccaggaactggagctaccaaatggcttatcctcgtttctatttcccgaagaatctggaatttgtcagtatgcgagtgtctcaggatcagggccttgcctgcagcacgtaaatgaaagcaccagtacgcaagcgacttacaatattgaaacgctcaatcagcagcatcacgaggagtacgaccaaaccgctcgtggtatcctggctagcagttttcctgaagctgtagggattgaacagtcaggtctggcccctgctgcagaagcaccagtgttggcagtgccagatgggcagcctaacagcaagctggagggcaacgaagtggatgagcacagctgtagctatgatgccgagttcctgaacagagaagcgtctaaccttcacaaagatctgtttagtgaagatagtcatcgaagtcatctaccttctctgagatctcctcaacgatctgcctattttcacaacggaaatgattcgggttcagtagacggactccgcgctaagcggcagagtttcaaagtttccagcagcataaaaggaagctacgtcgccaagactagcgtccctcgtccgaagccaggggacagcctgagccagtctgcgatagcgctgcgcggggtcaggaagaacacgaccgctgttgaagttggtggccatcctgtgagtttgaagccaaacgctgttcgctcggtcgccaaggacccatcatccagcagaggaccacccagggatagcctgagccagtctgcgatagcgctgcctaaacacagaaaggacgccactgctgttaagagcaagactaataataaaccttggctataataaggcagcaggcttacatacatcactactccgatttcatactccactgtacaaacattgtaatttgatggttgtgtggttccggatttattttcagcacggaaagaaggaaaaaaaagaaggaaatcagaaaatagtcctgttcgttgttatcgcgatcatttcaaccgtacaaaactgggtccattagcaggtggcagaagttgcagtcgaagagagacaccggtgctgtcg

SEQ ID NO: 217673 - DNA, 3585 bp, Zea Mays
agaaccaggagaatgataagggtgttgttctcagcgctcaggttggagcttcgtccagagttacaagaagatcaagcttggcggtggctgctgctgtgttgcctcctcttgttgaaccgaagagagggaggggagaagcagctggcgttcagacttctactcaggtggaagtaccggctaggattacaagatctcgctcaatagcaccggttgtaatgtcacctactgtggttgagaacaagaggaggaagaatggagatgcacaaacaaatgtagagctgcctacggtttcagatgtgcctagaaatgatgctcctgtcaccaggtctttgagaaatagagttgtccaggttaacaacagtgtggtggacgcgaacaaaccggcaactaaagaacctgttaggggattgagacgaagatctgttgtctcagaattgcacgagaaagagaaagatgtggagaaacaattaattgtgaagcaacctgttaggcgctcatcacgtaaatctgttctacctgatatgcttgagaacaatatccaaagcggtaaatctcaagataatgagaaggaacagaaactaaaggaaccaattaggcgatcaaggagatctgttgccacagtgttgcttgaggaacaaaacagtggtcttcatgaggaaaaattgtcaaaacttactatgaggagatcaacacgtaaatctgttgcacttaatggtgttgaaaagacgagcatggatcacactgaaatagttgtgcagtccgaaactttaaagggaaggtcttcaaagaggagacggacaattgatccagtagaaatgatgcctgtcaaggaggcaaatgatgacatgattatcagggaagcaacaatagacacacacaaagctactcatgagtacaataagtctactagcagaattcaagaaagttgtcagagtatacatgaagtggtacctgggtcagaatctggtgacaatgcaaaggaaaatttagataagagtaaacagcctcaggaacatcatgacattcaagctgttgatagccatttatctgaaacaagaagtggggaattagatcaatcatcatgcattgcaggactagtaccacacaattgtgttgcctcagatgacaaagctttgatcagtggagatcgtgtagagcaaagccctgtatctggagaagggagagttggcttggaagcaaatgccattgagtctggagaaaagaacctaactggcatcatgtccactgctctctacaccaaaagtctgcaacatgatattgacatagtagctgaagagactgccaaagggtgacctcgaaaaaccttcactatgttcattagcacaaaagtgtaaacatcaatgtggtttgcttgaggaaatagtattgccctcaaggaacatgggatctttaccaaatgcagaagaatcaccatttggcctagagtctttgttctggcaggaaagcatacatgaatctgtggaatatggtgcacctgcttctgcaacaactcatactgaaaatggatttggtgaatcaaaaggttgccatgtcaagtctgcactcgaaaatactcatgtgtcagaacctttttcccaccatgatactgaagaaaatatttccaaaattggtggttgcatgcatacatcccagcaagataatggaatggaagatgctatcgagaatcctttaattagtttatcaactcctggttgcaagcatgaaggtgctttgtctgaggaagcagtgcacacaatgaaggattatgctggaacatgctcatcaaatcccagggtacccatgcagttgcatgacgaccttgcattcccaggtcctgaaaaatcaggagatgaatcagtcaatattgaggttaaagtacaccatggttctaatctgtctcagttaggatcaactgatctcttggatgatactgaattgcttcaccagggccataactataaagatcgatccaatgaggatatgctagagcaggctgcttctgaaccctgcacaaatggggatgatatcgtggaggctgcggctgctaccaaatgcttagaaagtggagcgatgctggttccatccgaagagagatcaaatttgaacgataggcagcttacccccaagctggaaagcccagacatcatggaatctggccttaactgtgataaagatgctcgcaatactttggacaatggatctgttgtggctgttgctggtaagagaactccatctggttctggtcactatgaacacaatgtctaccaagtttcaggcatttgtgctacgtctgaagctgcaccagtcggagtggtagaaactggaatagctgtggaaacgtcatccctggtagatgaccaacctaatcctgtgctggatggtgatgaagttgagaagcacagcttaaactgtgaggcagacactggtcggattcttggtactggatctgttacgagcaacacaacccttgtgcccaaggacggtcacaccatttgttgccaggaactggagctaccaaatggcttatcctcgtttctatttcccgaagaatctggaatttgtcagtatgcgagtgtctcaggatcagggccttgcctgcagcacgtaaatgaaagcaccagtacgcaagcgacttacaatattgaaacgctcaatcagcagcatcacgaggagtacgaccaaaccgctcgtggtatcctggctagcagttttcctgaagctgtagggattgaacagtcaggtctggcccctgctgcagaagcaccagtgttggcagtgccagatgggcagcctaacagcaagctggagggcaacgaagtggatgagcacagctgtagctatgatgccgagttcctgaacagagaagcgtctaaccttcacaaagatctgtttagtgaagatagtcatcgaagtcatctaccttctctgagatctcctcaacgatctgcctattttcacaacggaaatgattcgggttcagtaggagtctgtcaaagcagcaggcgaggaggtgtagacggactccgcgctaagcggcagagtttcaaagtttccagcagcataaaaggaagctacgtcgccaagactagcgtccctcgtccgaagccaggggacagcctgagccagtctgcgatagcgctgcgcggggtcaggaagaacacgaccgctgttgaagttggtggccatcctgtgagtttgaagccaaacgctgttcgctcggtcgccaaggacccatcatccagcagaggaccacccagggatagcctgagccagtctgcgatagcgctgcctaaacacagaaaggacgccactgctgttaagagcaagactaataataaaccttggctataataaggcagcaggcttacatacatcactactccgatttcatactccactgtacaaacattgtaatttgatggttgtgtggttccggatttattttcagcacggaaagaaggaaaaaaaagaaggaaatcagaaaatagtcctgttcgttgttatcgcgatcatttcaaccgtacaaaactgggtccattagcaggtggcagaagttgcagtcgaagagagacaccggtgctgtcg

SEQ ID NO: 217674 - DNA, 3584 bp, Zea Mays
agaaccaggagaatgataagggtgttgttctcagcgctcaggttggagcttcgtccagagttacaagaagatcaagcttggcggtggctgctgctgtgttgcctcctcttgttgaaccgaagagagggaggggagaagcagctggcgttcagacttctactcaggtggaagtaccggctaggattacaagatctcgctcaatagcaccggttgtaatgtcacctactgtggttgagaacaagaggaggaagaatggagatgcacaaacaaatgtagagctgcctacggtttcagatgtgcctagaaatgatgctcctgtcaccaggtctttgagaaatagagttgtccaggttaacaacagtgtggtggacgcgaacaaaccggcaactaaagaacctgttaggggattgagacgaagatctgttgtctcagaattgcacgagaaagagaaagatgtggagaaacaattaattgtgaagcaacctgttaggcgctcatcacgtaaatctgttctacctgatatgcttgagaacaatatccaaagcggtaaatctcaagataatgagaaggaacagaaactaaaggaaccaattaggcgatcaaggagatctgttgccacagtgttgcttgaggaacaaaacagtggtcttcatgaggaaaaattgtcaaaacttactatgaggagatcaacacgtaaatctgttgcacttaatggtgttgaaaagacgagcatggatcacactgaaatagttgtgcagtccgaaactttaaagggaaggtcttcaaagaggagacggacaattgatccagtagaaatgatgcctgtcaaggaggcaaatgatgacatgattatcagggaagcaacaatagacacacacaaagctactcatgagtacaataagtctactagcagaattcaagaaagttgtcagagtatacatgaagtggtacctgggtcagaatctggtgacaatgcaaaggaaaatttagataagagtaaacagcctcaggaacatcatgacattcaagctgttgatagccatttatctgaaacaagaagtggggaattagatcaatcatcatgcattgcaggactagtaccacacaattgtgttgcctcagatgacaaagctttgatcagtggagatcgtgtagagcaaagccctgtatctggagaagggagagttggcttggaagcaaatgccattgagtctggagaaaagaacctaactggcatcatgtccactgctctctacaccaaaagtctgcaacatgatattgacatagtagctgaagagactgccaaaggtgacctcgaaaaaccttcactatgttcattagcacaaaagtgtaaacatcaatgtggtttgcttgaggaaatagtattgccctcaaggaacatgggatctttaccaaatgcagaagaatcaccatttggcctagagtctttgttctggcaggaaagcatacatgaatctgtggaatatggtgcacctgcttctgcaacaactcatactgaaaatggatttggtgaatcaaaaggttgccatgtcaagtctgcactcgaaaatactcatgtgtcagaacctttttcccaccatgatactgaagaaaatatttccaaaattggtggttgcatgcatacatcccagcaagataatggaatggaagatgctatcgagaatcctttaattagtttatcaactcctggttgcaagcatgaaggtgctttgtctgaggaagcagtgcacacaatgaaggattatgctggaacatgctcatcaaatcccagggtacccatgcagttgcatgacgaccttgcattcccaggtcctgaaaaatcaggagatgaatcagtcaatattgaggttaaagtacaccatggttctaatctgtctcagttaggatcaactgatctcttggatgatactgaattgcttcaccagggccataactataaagatcgatccaatgaggatatgctagagcaggctgcttctgaaccctgcacaaatggggatgatatcgtggaggctgcggctgctaccaaatgcttagaaagtggagcgatgctggttccatccgaagagagatcaaatttgaacgataggcagcttacccccaagctggaaagcccagacatcatggaatctggccttaactgtgataaagatgctcgcaatactttggacaatggatctgttgtggctgttgctggtaagagaactccatctggttctggtcactatgaacacaatgtctaccaagtttcaggcatttgtgctacgtctgaagctgcaccagtcggagtggtagaaactggaatagctgtggaaacgtcatccctggtagatgaccaacctaatcctgtgctggatggtgatgaagttgagaagcacagcttaaactgtgaggcagacactggtcggattcttggtactggatctgttacgagcaacacaacccttgtgcccaaggacggtcacaccatttgttgccaggaactggagctaccaaatggcttatcctcgtttctatttcccgaagaatctggaatttgtcagtatgcgagtgtctcaggatcagggccttgcctgcagcacgtaaatgaaagcaccagtacgcaagcgacttacaatattgaaacgctcaatcagcagcatcacgaggagtacgaccaaaccgctcgtggtatcctggctagcagttttcctgaagctgtagggattgaacagtcaggtctggcccctgctgcagaagcaccagtgttggcagtgccagatgggcagcctaacagcaagctggagggcaacgaagtggatgagcacagctgtagctatgatgccgagttcctgaacagagaagcgtctaaccttcacaaagatctgtttagtgaagatagtcatcgaagtcatctaccttctctgagatctcctcaacgatctgcctattttcacaacggaaatgattcgggttcagtaggagtctgtcaaagcagcaggcgaggaggtgtagacggactccgcgctaagcggcagagtttcaaagtttccagcagcataaaaggaagctacgtcgccaagactagcgtccctcgtccgaagccaggggacagcctgagccagtctgcgatagcgctgcgcggggtcaggaagaacacgaccgctgttgaagttggtggccatcctgtgagtttgaagccaaacgctgttcgctcggtcgccaaggacccatcatccagcagaggaccacccagggatagcctgagccagtctgcgatagcgctgcctaaacacagaaaggacgccactgctgttaagagcaagactaataataaaccttggctataataaggcagcaggcttacatacatcactactccgatttcatactccactgtacaaacattgtaatttgatggttgtgtggttccggatttattttcagcacggaaagaaggaaaaaaaagaaggaaatcagaaaatagtcctgttcgttgttatcgcgatcatttcaaccgtacaaaactgggtccattagcaggtggcagaagttgcagtcgaagagagacaccggtgctgtcg

SEQ ID NO: 217675 - DNA, 3556 bp, Zea Mays
acagggccagccagcacgtctgcccagccagctgcgcagcgcacgcgcacagccgcggacgccgacggcatattctgcagacagccactcactgctgcttggcgcccgtggccgtggcccgtgccgtggatgcgcgggcacctcgcttcggctcggctccacgtttcggcgccgcgggacgggacgggacgcagcagcgcgcgctaagcgacgagaggcggcagcacaactactcccaccgccgaggcaacacaagacggccggtgtcgtgttgcccgcaccgcacggccggtgccatgccgctctgctcccctccactccacgcagggcggcaggcggtggaccatgttagatatattaggtgtagtagatgagctatgggttatgtgggcttgaggagatataaatataggctgagtcagctgtaaaaggcatcaaacaacgaaatacaaaataccaatttacttagaccccgtctagctctcgtcttccttccgtcttcctagctctaatctctgatctcctttcttctaccttctgtggtgctaacatttggtatcagaggaggaatccatggatactgtgctgcaacgacttctggacgaactgacgcacatggaggcgcgcttgacatgtgtgttggctggccgttgtggcgagcagtctgcacgcgcgcgcactccctcctccgacgatggatccacaccgtcctacctcgcccccaccagcgaggccgtcgacaagctccgtcaggacctcaacccttgctgcgtctaccgagacagcatccagcaccaccgagtcgaagatccctctgcagaggaggacctgcaaccgcaagcggaggtggtggagtcgttcgagtcggagtccgctcctcctcccatcgtctacgactgctacgacgagccgaaccacgacgagattgccgaggtgctcgcgctactagagtacaacgaggggacttcgtcggccacagtcctcgtcgactataccaccaccagcatgtcgcctaccaagtgttcgacgatggatttctccgacgccgacagcgccaggacttgcgatgtcaccgacgtccccatcgtgcactccgcactcaaggcgttcgtcaaaatgctcaacggcgggagtgagcatccgcaggaggtgacgcaaacctccatcgcgcgcctgatggacagctcacggagctggatcttcaccgagctcggccaaccaacatactgcccagagactttcccggaggtgccatttgagagaccaactccacccataattttcttcgacgaggaacatatcttcgaggaagagtcgtcttcttccaccacggcgacaccaagaaatccgtccgatccgaagcaggcgggtggcgacctcgattccatcgctactgcggcgctgtcggcgtcggaggagatcccccagtccctgctcgtcatcgacctcgagcgcgccacctccaagtgcatcaggacccacgctgtcaacgatgtcccagctgtgcactccattatcaagggcctgcaactggagcggatcggtctggcggggagcgcgcccgacctggacaccctcaccaccgcccgccattgtggcagtgagctcagctgccagctcggcagcaacaagcgggatgtcagcctccgagttgggtgcgaccaaagctatgagtgggtcgacccggagaccctggacaggagcttcgtcgtgctagataatgcttgtgctacccatgaggtgttcgaggtattgcctctaagcttccctgctgcttgggttaatgttggcaagctcccaaccactttatgttggaaaattccatggccacctcccgttttgtgggtgaatttgcatgctggcggtcgttatataacttcattgttggaagaatgtcagctagtgttcaccatattcttcggtggtgtttgctcacttgccaagattcagtggccttatatggtgttggaataccttgctaatttgcatgtgattcatgggaaaattcatatgcatccggtacaagtttgtgtcaggtcctatgcagtgatgccatctgctaagggtcttgtggcagagacgcacctccacttcatcggcacctacaggggcgtcgtcagcaccgccttctgtactgagattgttgagtctgcagatgcctatatctttgcaggctccattttcaaggactacagctccgtcggttactcattcctcctcaagaaggccaaggccatcattgtccagcctgagcgtgtgggagtgggaaatgggttgtcattcagatgtttgatgatgaaggagtactggactgaaattgctaagaaggttaaaaagaacaccactacgtatgagaactacaagaggaactttgtacctgaagggcaggcgctggagagcgagccgaatgagccactgcgagtcaatgtgctcttcaaatacatccagaagatgatgacagttaatagtgtcgtgatggctgagaccgatgattcttggttcaactgccataagctcaagctgccagaaagctgtggatatcaattccaaatgcagtatggtttaattggatggtcaatgggtgcactgcttggctatgctcaggtttgctatgaccatgatattataatggatgctgccggttttggtgatgagctggtggtcatcagcttgggtgctgactgccaaattattgcatcctaccacaggtggcctttcggacagactggaactggtcatttctccccaattggtggctaccaggttagacaagatatggtgctcatcttggatgttgctcgtttcattccattacaatttttttgggaagccatgaatacaactaatgactcaactctgagagggtccatgcttatatcaagaaaggttgcagagtcttcattgttgtacacagtgagttgcagagatgaaaactggaaaatcatgccaaagttttgtgttgaagatttaccaagtcttctgaaggcagggattggtgcttgcgtgggcttggttacctctggtctgagtgttgtcagcagtggccaaggcaatttttcagtatttgtttgggatcctggtgatagcggcttggttacctctagtctgagtgccgtcagcagtgaccaaggcaaattttcagtctttgtttgggatcctggtgatcgtggcttggttacctatggtctgagagttgtcagtattgcaagagttactgctattatgtcaggcacatatgcaagaggtgctgctacaacttcctctccgaagatgcgccagacccagttcagatggagggccgaggagaggcatgatgcattcaacaatgatgctaatccacagataaagttgatcctacaccgtcagcggcttgggggcaagccgtatttcaaggagtggggaatgttagatatattaggtgtagtagatgagctatgggttatgtgggcttgaggagatataaatataggctgagtcagctgtaaaaggcatcaaacaacgaaatacaaaataccaatttacttagaccccgtctagctctcgtcttccttccgtc

SEQ ID NO: 217676 - DNA, 3189 bp, Zea Mays
ttctagaaaaaccgtgttagcatttcaatggaacttgtgacagctgtgttaggagatcatgggcaaaggcccaaggatgattatgctgtggttacagctgtgactgagttgggcaatggcaagccaaaattctattctactccagaggtgattgcattctgtcggaagtggcgcctacctaccaaccatgtgtggttattttcgacaaggaaatctgcctcctcattttttgctgcttatgatgcattatgtgaagaaggaactgcaacacctgtatgcaaaacccttgatgaaatagctgatatagctgtaccagggtcaaaagatcatgtaaaagtgcaaggtgagatccttgaaggtctggttgcccggattgtgcctcgtcaaagtttagtgcaaatggaagaggttttgaaaaactttcctcaggctccatttgacgccggtaaggcgactcagatttgggaccaagtttacgagaaatttgtgctgctaataggtcagatgaaaagcagcaaatcaaggcactgcttgaaaatgttggagcttcaatgtgtccagatcattcggattggtttggaactggtggacttgatgctcagtcgcgaaatgctgatagatcagttgttacaaaatttttgcaagcacatcctgcagactatgcaactaagaaactgcaggagatgattcgcttgatgaaacagaggcacttctcagcagctttcaaatgctactggaactaccacaagatcgattctctttcaaatgacaatttgtattacaaaatggttatccatgtgcataatgattctgtttttagacgataccagcaagagatgaggagaaaccaagggctgtggcctctgtatagaggtttctttgttgatgtgaatttgttcaaggcaaacaataagaaggcagctgaactagccaaagatggtaacactttactgaaaaatatcaatggtgccttggattcaaatggttcagttgtggatggtttggctgatgaggattcaaatctaatggttaaactaaaattcttgacatacaagttgcgaacatttttaattcgtaatggattgtctacccttttcaaagatggaccatctgcttatagaacttactacctaaggcaaatgaagaactggggaacatcaacaaacaaacagagagagcttatcaaattgttggacgagtgggctgtattcattagaaggaagtacgggaataagccactctcatcctcgacatatcttagtgaagcagagcctttccttgaacaatacgccaaacgaagccctgcaaaccaggctttgattggggctgctggtaaccttgttcaaactgaaaatttcttggccattcttgacgcaaagagggatgaagagggtgatctccggacagatcatggggcagcaccttctggtcctgtgtcaacatctgttgatgtggttcccaaaacagagggccttatagtgttctttccgggtatacctggttgtgcaaagtcagctctgtgtaaggaaatattgaacacacctggtggccttggagatgatcgcccttttcatagcttgatgggggatcttattaaaggaagatactggcaaaaggtcgctgatgaaagaagaaagaagccagctagaataacccttgctgataaaaatgcaccaaatgaagaagtttggaagcagatcgaggatatgtgtgggtccacaaaggcagctgctgtccctgtggttcctgactcagaaggcacggattcaaatccattttctcttgaggctcttgccgttttcatgtttcgcgtcctccagcgggtcaatcatcctggaaatctggacaaggcctcacctaatgcaggctatgttttgctaatgttttaccacttgtatgatggcaagagtcgaagagaatttgaaaatgaactttatgaacgttttggctcccttgttaagatgcctctcctgaagccagatagagcgccattgcctgatgcggtgaaagccatcttagatgaggggattagcttgttcaagatgcatcggagcaggcatggaagagcagagccatcaaaaggttcatacgctaaagaatgggcacaatgggaacaaaggttgcgtgcgaccttgtttgggaatgctgatcatcttaactcaattcaggttccttttgactatgctgtgaaagcagtactggaacagttaaaagctgttgcaaagggtgatctcaaaacacctgatactgggaagcggaagtttggaaatatcatgtttgctgctgttcgattaaccccgcctgatatattgggccttctccgtaaggtggcagagaaggacacggctgtcgacagttttgtgaacaagataagactggaggacaacctaacgaaggttcacgtcacccttgcccacaaacgaggccatggtgtgtctgctgtcgcaagctatggcatctaccagcaccaggaagtccccgtgtcattcaacgcattgtactacactgacaagatggccgctctcgaggcacagctgggagcagtaaacgatgagccgatcaattccaggaacgagtggccacatgccactctgtggacggctccaggcgtcactccaaaggaggcaaacatgctgccgcagctggcttcagaaggaaaagcagaacgggtgccgattgaccctcccatcaccatatcgggggtggtggacttctactgatttgtctcctcggttttaggatacggatgtgcagaggtgaaggtggaataaagaataatttgctgctgcgggccttacgttattagctgattgtggacaagacaatcgtcgagtcttacaccacataaatttttgatactataggactgacctggactgctgcatttctacttccatgttttccaataagtgcaagataccatcgattttttaagccagcacttagcactagaggagataattatctgtatagcaagcacatcattctactttctagtgtatttttgaatttccagaggccgtttgacaggacagttgaccagaaataaagttcgtgttggtggtatgttacctttattttgtgtacttattacaaagttgcaacaccgaatgcttcgttgactggctaacataatgctggtgagtggaaaacagaatcaattttgaataatgaagctgaaggattagg

SEQ ID NO: 217677 - DNA, 3138 bp, Zea Mays
ttctagaaaaaccgtgttagcatttcaatggaacttgtgacagctgtgttaggagatcatgggcaaaggcccaaggatgattatgctgtggttacagctgtgactgagttgggcaatggcaagccaaaattctattctactccagaggtgattgcattctgtcggaagtggcgcctacctaccaaccatgtgtggttattttcgacaaggaaatctgcctcctcattttttgctgcttatgatgcattatgtgaagaaggaactgcaacacctgtatgcaaaacccttgatgaaatagctgatatagctgtaccagggtcaaaagatcatgtaaaagtgcaaggtgagatccttgaaggtctggttgcccggattgtgcctcgtcaaagtttagtgcaaatggaagaggttttgaaaaactttcctcaggctccatttgacgccggcgactcagatttgggaccaagtttacgagaaatttgtgctgctaataggtcagatgaaaagcagatcattcggattggtttggaactggtggacttgatgctcagtcgcgaaatgctgatagatcagttgttacaaaatttttgcaagcacatcctgcagactatgcaactaagaaactgcaggagatgattcgcttgatgaaacagaggcacttctcagcagctttcaaatgctactggaactaccacaagatcgattctctttcaaatgacaatttgtattacaaaatggttatccatgtgcataatgattctgtttttagacgataccagcaagagatgaggagaaaccaagggctgtggcctctgtatagaggtttctttgttgatgtgaatttgttcaaggcaaacaataagaaggcagctgaactagccaaagatggtaacactttactgaaaaatatcaatggtgccttggattcaaatggttcagttgtggatggtttggctgatgaggattcaaatctaatggttaaactaaaattcttgacatacaagttgcgaacatttttaattcgtaatggattgtctacccttttcaaagatggaccatctgcttatagaacttactacctaaggcaaatgaagaactggggaacatcaacaaacaaacagagagagcttatcaaattgttggacgagtgggctgtattcattagaaggaagtacgggaataagccactctcatcctcgacatatcttagtgaagcagagcctttccttgaacaatacgccaaacgaagccctgcaaaccaggctttgattggggctgctggtaaccttgttcaaactgaaaatttcttggccattcttgacgcaaagagggatgaagagggtgatctccggacagatcatggggcagcaccttctggtcctgtgtcaacatctgttgatgtggttcccaaaacagagggccttatagtgttctttccgggtatacctggttgtgcaaagtcagctctgtgtaaggaaatattgaacacacctggtggccttggagatgatcgcccttttcatagcttgatgggggatcttattaaaggaagatactggcaaaaggtcgctgatgaaagaagaaagaagccagctagaataacccttgctgataaaaatgcaccaaatgaagaagtttggaagcagatcgaggatatgtgtgggtccacaaaggcagctgctgtccctgtggttcctgactcagaaggcacggattcaaatccattttctcttgaggctcttgccgttttcatgtttcgcgtcctccagcgggtcaatcatcctggaaatctggacaaggcctcacctaatgcaggctatgttttgctaatgttttaccacttgtatgatggcaagagtcgaagagaatttgaaaatgaactttatgaacgttttggctcccttgttaagatgcctctcctgaagccagatagagcgccattgcctgatgcggtgaaagccatcttagatgaggggattagcttgttcaagatgcatcggagcaggcatggaagagcagagccatcaaaaggttcatacgctaaagaatgggcacaatgggaacaaaggttgcgtgcgaccttgtttgggaatgctgatcatcttaactcaattcaggttccttttgactatgctgtgaaagcagtactggaacagttaaaagctgttgcaaagggtgatctcaaaacacctgatactgggaagcggaagtttggaaatatcatgtttgctgctgttcgattaaccccgcctgatatattgggccttctccgtaaggtggcagagaaggacacggctgtcgacagttttgtgaacaagataagactggaggacaacctaacgaaggttcacgtcacccttgcccacaaacgaggccatggtgtgtctgctgtcgcaagctatggcatctaccagcaccaggaagtccccgtgtcattcaacgcattgtactacactgacaagatggccgctctcgaggcacagctgggagcagtaaacgatgagccgatcaattccaggaacgagtggccacatgccactctgtggacggctccaggcgtcactccaaaggaggcaaacatgctgccgcagctggcttcagaaggaaaagcagaacgggtgccgattgaccctcccatcaccatatcgggggtggtggacttctactgatttgtctcctcggttttaggatacggatgtgcagaggtgaaggtggaataaagaataatttgctgctgcgggccttacgttattagctgattgtggacaagacaatcgtcgagtcttacaccacataaatttttgatactataggactgacctggactgctgcatttctacttccatgttttccaataagtgcaagataccatcgattttttaagccagcacttagcactagaggagataattatctgtatagcaagcacatcattctactttctagtgtatttttgaatttccagaggccgtttgacaggacagttgaccagaaataaagttcgtgttggtggtatgttacctttattttgtgtacttattacaaagttgcaacaccgaatgcttcgttgactggctaacataatgctggtgagtggaaaacagaatcaattttgaataatgaagctgaaggattagg

SEQ ID NO: 217678 - DNA, 3217 bp, Zea Mays
ttctagaaaaaccgtgttagcatttcaatggaacttgtgacagctgtgttaggagatcatgggcaaaggcccaaggatgattatgctgtggttacagctgtgactgagttgggcaatggcaagccaaaattctattctactccagaggtgattgcattctgtcggaagtggcgcctacctaccaaccatgtgtggttattttcgacaaggaaatctgcctcctcattttttgctgcttatgatgcattatgtgaagaaggaactgcaacacctgtatgcaaaacccttgatgaaatagctgatatagctgtaccagggtcaaaagatcatgtaaaagtgcaaggtgagatccttgaaggtctggttgcccggattgtgcctcgtcaaagtttagtgcaaatggaagaggttttgaaaaactttcctcaggctccatttgacgccggcgactcagatttgggaccaagtttacgagaaatttgtgctgctaataggtcagatgaaaagcagcaaatcaaggcactgcttgaaaatgttggagcttcaatgtgtccagatcattcggattggtttggaactggtggacttgatgctcagtcgcgaaatgctgatagatcagttgttacaaaatttttgcaagcacatcctgcagactatgcaactaagaaactgcaggagatgattcgcttgatgaaacagaggcacttctcagcagctttcaaatgctactggaactaccacaagatcgattctctttcaaatgacaatttgtattacaaaatggttatccatgtgcataatgattctgtttttagacgataccagcaagagatgaggagaaaccaagggctgtggcctctgtatagaggtttctttgttgatgtgaatttgttcaaggcaaacaataagaaggcagctgaactagccaaagatggtaacactttactgaaaaatatcaatggtgccttggattcaaatggttcagttgtggatggtttggctgatgaggattcaaatctaatggttaaactaaaattcttgacatacaagttgcgaacatttttaattcgtaatggattgtctacccttttcaaagatggaccatctgcttatagaacttactacctaaggcaaatgaagaactggggaacatcaacaaacaaacagagagagcttatcaaattgttggacgagtgggctgtattcattagaaggaagtacgggaataagccactctcatcctcgacatatcttagtgaagcagagcctttccttgaacaatacgccaaacgaagccctgcaaaccaggctttgattggggctgctggtaaccttgttcaaactgaaaatttcttggccattcttgacgcaaagagggatgaagagggtgatctccggacagatcatggggcagcaccttctggtcctgtgtcaacatctgttgatgtggttcccaaaacagagggccttatagtgttctttccgggtatacctggttgtgcaaagtcagctctgtgtaaggaaatattgaacacacctggtggccttggagatgatcgcccttttcatagcttgatgggggatcttattaaaggaagatactggcaaaaggtcgctgatgaaagaagaaagaagccagctagaataacccttgctgataaaaatgcaccaaatgaagaagctactttaacagtagagatagaactgataaatcattgtttccagatcgaggatatgtgtgggtccacaaaggcagctgctgtccctgtggttcctgactcagaaggcacggattcaaatccattttctcttgaggctcttgccgttttcatgtttcgcgtcctccagcgggtcaatcatcctggaaatctggacaaggcctcacctaatgcaggctatgttttgctaatgttttaccacttgtatgatggcaagagtcgaagagaatttgaaaatgaactttatgaacgttttggctcccttgttaagatgcctctcctgaagccagatagagcgccattgcctgatgcggtgaaagccatcttagatgaggggattagcttgttcaagatgcatcggagcaggcatggaagagcagagccatcaaaaggttcatacgctaaagaatgggcacaatgggaacaaaggttgcgtgcgaccttgtttgggaatgctgatcatcttaactcaattcaggttccttttgactatgctgtgaaagcagtactggaacagttaaaagctgttgcaaagggtgatctcaaaacacctgatactgggaagcggaagtttggaaatatcatgtttgctgctgttcgattaaccccgcctgatatattgggccttctccgtaaggtggcagagaaggacacggctgtcgacagttttgtgaacaagataagactggaggacaacctaacgaaggttcacgtcacccttgcccacaaacgaggccatggtgtgtctgctgtcgcaagctatggcatctaccagcaccaggaagtccccgtgtcattcaacgcattgtactacactgacaagatggccgctctcgaggcacagctgggagcagtaaacgatgagccgatcaattccaggaacgagtggccacatgccactctgtggacggctccaggcgtcactccaaaggaggcaaacatgctgccgcagctggcttcagaaggaaaagcagaacgggtgccgattgaccctcccatcaccatatcgggggtggtggacttctactgatttgtctcctcggttttaggatacggatgtgcagaggtgaaggtggaataaagaataatttgctgctgcgggccttacgttattagctgattgtggacaagacaatcgtcgagtcttacaccacataaatttttgatactataggactgacctggactgctgcatttctacttccatgttttccaataagtgcaagataccatcgattttttaagccagcacttagcactagaggagataattatctgtatagcaagcacatcattctactttctagtgtatttttgaatttccagaggccgtttgacaggacagttgaccagaaataaagttcgtgttggtggtatgttacctttattttgtgtacttattacaaagttgcaacaccgaatgcttcgttgactggctaacataatgctggtgagtggaaaacagaatcaattttgaataatgaagctgaaggattagg

SEQ ID NO: 217679 - DNA, 3168 bp, Zea Mays
ttctagaaaaaccgtgttagcatttcaatggaacttgtgacagctgtgttaggagatcatgggcaaaggcccaaggatgattatgctgtggttacagctgtgactgagttgggcaatggcaagccaaaattctattctactccagaggtgattgcattctgtcggaagtggcgcctacctaccaaccatgtgtggttattttcgacaaggaaatctgcctcctcattttttgctgcttatgatgcattatgtgaagaaggaactgcaacacctgtatgcaaaacccttgatgaaatagctgatatagctgtaccagggtcaaaagatcatgtaaaagtgcaaggtgagatccttgaaggtctggttgcccggattgtgcctcgtcaaagtttagtgcaaatggaagaggttttgaaaaactttcctcaggctccatttgacgccggcgactcagatttgggaccaagtttacgagaaatttgtgctgctaatagcaaatcaaggcactgcttgaaaatgttggagcttcaatgtgtccagatcattcggattggtttggaactggtggacttgatgctcagtcgcgaaatgctgatagatcagttgttacaaaatttttgcaagcacatcctgcagactatgcaactaagaaactgcaggagatgattcgcttgatgaaacagaggcacttctcagcagctttcaaatgctactggaactaccacaagatcgattctctttcaaatgacaatttgtattacaaaatggttatccatgtgcataatgattctgtttttagacgataccagcaagagatgaggagaaaccaagggctgtggcctctgtatagaggtttctttgttgatgtgaatttgttcaaggcaaacaataagaaggcagctgaactagccaaagatggtaacactttactgaaaaatatcaatggtgccttggattcaaatggttcagttgtggatggtttggctgatgaggattcaaatctaatggttaaactaaaattcttgacatacaagttgcgaacatttttaattcgtaatggattgtctacccttttcaaagatggaccatctgcttatagaacttactacctaaggcaaatgaagaactggggaacatcaacaaacaaacagagagagcttatcaaattgttggacgagtgggctgtattcattagaaggaagtacgggaataagccactctcatcctcgacatatcttagtgaagcagagcctttccttgaacaatacgccaaacgaagccctgcaaaccaggctttgattggggctgctggtaaccttgttcaaactgaaaatttcttggccattcttgacgcaaagagggatgaagagggtgatctccggacagatcatggggcagcaccttctggtcctgtgtcaacatctgttgatgtggttcccaaaacagagggccttatagtgttctttccgggtatacctggttgtgcaaagtcagctctgtgtaaggaaatattgaacacacctggtggccttggagatgatcgcccttttcatagcttgatgggggatcttattaaaggaagatactggcaaaaggtcgctgatgaaagaagaaagaagccagctagaataacccttgctgataaaaatgcaccaaatgaagaagtttggaagcagatcgaggatatgtgtgggtccacaaaggcagctgctgtccctgtggttcctgactcagaaggcacggattcaaatccattttctcttgaggctcttgccgttttcatgtttcgcgtcctccagcgggtcaatcatcctggaaatctggacaaggcctcacctaatgcaggctatgttttgctaatgttttaccacttgtatgatggcaagagtcgaagagaatttgaaaatgaactttatgaacgttttggctcccttgttaagatgcctctcctgaagccagatagagcgccattgcctgatgcggtgaaagccatcttagatgaggggattagcttgttcaagatgcatcggagcaggcatggaagagcagagccatcaaaaggttcatacgctaaagaatgggcacaatgggaacaaaggttgcgtgcgaccttgtttgggaatgctgatcatcttaactcaattcaggttccttttgactatgctgtgaaagcagtactggaacagttaaaagctgttgcaaagggtgatctcaaaacacctgatactgggaagcggaagtttggaaatatcatgtttgctgctgttcgattaaccccgcctgatatattgggccttctccgtaaggtggcagagaaggacacggctgtcgacagttttgtgaacaagataagactggaggacaacctaacgaaggttcacgtcacccttgcccacaaacgaggccatggtgtgtctgctgtcgcaagctatggcatctaccagcaccaggaagtccccgtgtcattcaacgcattgtactacactgacaagatggccgctctcgaggcacagctgggagcagtaaacgatgagccgatcaattccaggaacgagtggccacatgccactctgtggacggctccaggcgtcactccaaaggaggcaaacatgctgccgcagctggcttcagaaggaaaagcagaacgggtgccgattgaccctcccatcaccatatcgggggtggtggacttctactgatttgtctcctcggttttaggatacggatgtgcagaggtgaaggtggaataaagaataatttgctgctgcgggccttacgttattagctgattgtggacaagacaatcgtcgagtcttacaccacataaatttttgatactataggactgacctggactgctgcatttctacttccatgttttccaataagtgcaagataccatcgattttttaagccagcacttagcactagaggagataattatctgtatagcaagcacatcattctactttctagtgtatttttgaatttccagaggccgtttgacaggacagttgaccagaaataaagttcgtgttggtggtatgttacctttattttgtgtacttattacaaagttgcaacaccgaatgcttcgttgactggctaacataatgctggtgagtggaaaacagaatcaattttgaataatgaagctgaaggattagg

SEQ ID NO: 217680 - DNA, 2645 bp, Zea Mays
gttagagccatcgataaaaaaaactccaaagctcaagttgttcggtcaccaagttcgacctgccgccgcccttaccggagatcccaccgcacaacaacaattctaaaatattcttgtgtgctttggacaactcacgaaatcaaagttatctggttactatggtgcacgaggggcagctgaagaacactgaaccggatatcggcgtcaacatgggagatgatgagttaatctatctgccagacatagaagaatatgatatggatgctctcatgggagacgaggaccagttgaacactgatcaggctattttttgtgaggaacacaacctcgacaaggtgtcatcgtccaagcgtcccaaacgcttcaccgtgcagcagcttcagcaacttgaatcttcgttccaaaagtgtagccatccagatgatgaaatgcgccaggaactggctgccaaggttggtataagtgcaaggcaggttaagttttggtttcaaaaccgacgctctcagattaaggtgaggtcctgtggaactgagaacaacaaatatcggcgacaaaacgctgagctgctcgcaacgaacatggaactcaaggagcaactgaaaggaatgacatgcagtagatgcgatgccccaacaataatgcagaaatggcagttgatggatgaaaatgctaagcttagggaaatgtactcgctcgccagtgcagaactgaccaagctcatgcaggaagcaaatctccctccctctgtgatactagaggatatggcattagttacttccatgaacccattgtccagcaatgctagcagcagtcgtagcaccatcaaccaggatgagcttctctcatatgttgagtgtgctatcaaagagtttgagatgctagtaagggatggtacgccgttgtggctgccgaccatcggtggcgacgtgctcaacagtaaggagtatgcctgccagagattcccaagattacatgggacgatccgcccagaagggtttgttgtggaggccacaagggacactgccatagtcaagggatcagccccagacattgttgacatcctcactgatgtgccacgatggtacaaggcgttcccttgcattgtagcagcactaagggcctaccacgtcatctttagtggaccttttgcatctggcaacgtgctaattcaggagataaatgtagatctatctgtggaatcacctcgcccgcctcttcgcaacatgaaatttctaaggattaccaagcagaatgcaaatggggactttgttgtagtggatgtgtcaatcaatgatgtccaaggaattcatgaacaacaaggcagccaacataagcataccatgctaccctctggttgcctcattaaagacaagggcgatggctattgtcaggtcacatggattgtccatgcagagtacgaggaggcctccgtgccacccctcttccgacagttctaccagtctgggctggcattcggtgcaagccgttggcttgcatcactccaaaggcactgtgaatacatggttgttaagcattccatccaagttccaactggttgtgtctctggctcaggggtgctcaccttgtctgctctgggtagatggaacctcctagagctggcacagcggatgatggcgatcttctacaagactacatctgggctgcccaccgtggaaccaggcaacattgtcaccaggtggggtcgtggctgcatgggcactacaggcgagatgcttgagccagctgtgcgcatggtactagggaattactttggcgccatggatgggcagccatcgcccctccaagtgctaagcgccaccacaactgtgtggctgccaggaacgcctccggagagtgtttttaactacctgtgcaatgggcaacgccgtggcgagtgggatgccttcgtctgtgccggcgcagtgcaggagttgagctcagttgccacgtgcccccaccttcatggcaatgctgtttctgttctctgccctaatgtgaccaatgcagctaacaacgccatgctgttcctgcaacagacaagcatcgatgtctcgcgcgcgctagttgtgtacagcgttgttgaagagaccatgcttcgttccgtcctggatgttagcgacgacacttcaaacttagtcctcctgccatctggattcgccatcctcccagatggccatggcagggctcaccatgccgctgcttccaactcctccagcgctcttgccggactcaacggaactgcaggatgtcttctcaccgcagcctaccaggtaccggtgccattcaacaatctccgtcatccagatgtgcaagagacctacgagaatgctggaaagcggatctgccatgcgataaagaagatcatggatgctgttggggcacctattgttgtcccaatctaatgcgggtttatttgttacataaacatggcggtgataccatttgggtcaaggttggagcaaactttttactcttatttccgcagcagctttgtttctgaaagacgactccatgacttctgttatccaattaagttagtttaccgaattttaagaaccattttgttttccagactatacaatacaatgccaccatgaactaattatgctggttttaattatgccgactatttatgatttgttgtg

SEQ ID NO: 217681 - DNA, 1094 bp, Zea Mays
agcgcttcgagccctggcccctagctcgcattgcgagttccagcgagccaaccaaaccattagaccaaccaccgctccgtcagtccctctccttccttcctagttcattccctcacctcatctaaccaagctcccgagagcagagagctgagagagggagagaaaaagtaatccgacggaaacgacaagggcgcggcgagggcggggacgggaaggccctgggcgcggaggcgccgagcacatggcatcgtcgagggtgataccgtcgtcctcgccgtcgcacacggcctcggatctcgcgcgcctagcgcaggccgccagcaggcccggcggcgggggcagcgggccgggctccatgaacgtcgaggagctcctccgcggcatctacagcgacatgcccaccccggcgccgcccgcgtcggaacccggacgcccgatgcccccggccccggcgccggtgagcgccacgcggaagacggcggaggaggtgtggaaggagatcactggcggaggtgacgctggaggacttcctggccagggagagcgcggtgaaggaggatgaggttaagatttctgtcccccccgcgccggtcatggggttaccgggcggagcggagggcgtgagtgtgcctggcggcggaggcgggagggaacggaagcggcagcttgtgagtacagtggatcgcgctcgctctgctatccagcgagagaaacgaatgataaaaaaccgcgagtctgctgccaggtcacgggagaggaagcaggcctatatcgccgagctagaatacatggtaacgcggctcgcggaggagaaagctgagttgttgagacaacaggaagagcagttccagacgcggcttgaagagttcttacagaaatggaaggaaaacatataaatgcccttgcgacttctgaggcttcaggacataaggtgaaggggatattgatcgtatagctgcgtagcatcagcaatgaagatacttccagagtcgcaccaccctgctatcacatccgatttgaaaacaagaaggttgtcaacaaacatatatgtatttttcatgcacacgttcgctggcaagcctatattctgcatt

SEQ ID NO: 217682 - DNA, 855 bp, Zea Mays
cgggcatggagctcgcccaagctccacctcccaagcgctctccctcacagccgcgctctcctccacctgcagctcgcccccatctcctcctctccccatggtggctccccctggatccctccctgcgcgggctccctgctccccatggttgtcggcttcccctacgagcagctcctccagggagcacggcctccctcctctcatgcgctctggagccgagctcctccttcaacaccggccgcggggcttgccctgcaccaactccggccgcgccccagttctgatgaaggttgtcttccctactcgccctccctctgtgccctgctccctgtgcgacgccctcctctgcgtcgtgctcgctagatcgggcctcgcgtcgtcgatctgcgcaactcctgttcggctatcggttccgcctccgtcgatctcctccatgcatgaacagcagcaaccccgagcctcctctgcatcgtgccatcgacccgcccgatggaatgccgcagcgagctctacccgatctgcagcgcttgcgcgctatcgtcgaaatccccgcaaccgtgttggtccgcaacagcacgtcgtcgatctgcaatccctggccttgtggtcgaccttggatgatgatggcgaaggtcgatgagccaaagctggttttgcggcattgggggccttaggaattccttttgccgatatctatagaaactcttggaaactctttgtacaaggaaatgtattatttgacaaaagagttgttattgaaagcgaacaaattattgtaaatgtttgtaaatgtcacctgctttggtgtggacaaaaccgacacttgtagctttttgtgccgaaggcgaaaaatac

SEQ ID NO: 217683 - DNA, 366 bp, Zea Mays
gctctgtttccttgaatgtgtggatctctttcctttccaactttctccattgatggaaggtggaaatcggcagtgtcctcaccggctataaatgtagccacatcctaagtttctatctcctctattttttcgcgcctccagatcgctgtgagttctcttcttcctcacaccaacgccggccagtttctgccaacagcagcggcaccagattcctcacgccaacgccggccagttttcggcaacagcagcggcacctcagcttttgccgtgcaagcttcgccaagcaccacaagcatccgtttcctttcgagcggcgctgtcatgcatgggcatcaaatccgcttggttccccggcgtcgacacatg

SEQ ID NO: 217684 - DNA, 808 bp, Zea Mays
ggacacaaattactttatgattaactgactcatacaccaccgagaaagccctaaagaaagtaaaacgtttgccaacctcggttcctcagaaaattaatgtcactaatgtaactatggacggcaaaggtgatggtgaattggaaaagcaatctgtgcagatgcatagtgatgttcagcagataagcaaagatccaccaactatggtcaaggccagcagccgtgaggatgcccaaccaatgactgaatcatctaatgctgaggtgaacacatcaagtgctgtggctgctggagagtctgagtcccatgaaattggatcgccgaagagtctaaaagatgctatcaaaccaaaacataaaagaaagaagaagaaaagtgacaggagttagtttagttgcaagcctgtaattttgtatgccccagataaatcaacgacagtctacaacacctcaaactcctgattgattaggtttcatccggggtgccatacatgggttttttgtgtgttttcaatcgtgactggtgctagtagtgacaggcaaattttgtacaagctgtagaattgtattttaggaatggttcagttaagctttcagtcaactttgcagctagttctgtgatgcgtgatgtcccagcactcttacatttcattgtactgctcaccgttaatcttccattgtccaaacggtcgtaaggattgccatatttgttccaacagtcttcagttgtggtctactggtcttagcttgaaaacaacattaaatcttgtctttgctacttctttcagtctgttttcgtgaggagagtaaat

SEQ ID NO: 217685 - DNA, 856 bp, Zea Mays
caaactaccaaagcatttaatgtgaaggttgacgctccagaaaaggacacaaattactttatgattaactggtagactcatacaccaccgagaaagccctaaagaaagtaaaacgtttgccaacctcggttcctcagaaaattaatgtcactaatgtaactatggacggcaaaggtgatggtgaattggaaaagcaatctgtgcagatgcatagtgatgttcagcagataagcaaagatccaccaactatggtcaaggccagcagccgtgaggatgcccaaccaatgactgaatcatctaatgctgaggtgaacacatcaagtgctgtggctgctggagagtctgagtcccatgaaattggatcgccgaagagtctaaaagatgctatcaaaccaaaacataaaagaaagaagaagaaaagtgacaggagttagtttagttgcaagcctgtaattttgtatgccccagataaatcaacgacagtctacaacacctcaaactcctgattgattaggtttcatccggggtgccatacatgggttttttgtgtgttttcaatcgtgactggtgctagtagtgacaggcaaattttgtacaagctgtagaattgtattttaggaatggttcagttaagctttcagtcaactttgcagctagttctgtgatgcgtgatgtcccagcactcttacatttcattgtactgctcaccgttaatcttccattgtccaaacggtcgtaaggattgccatatttgttccaacagtcttcagttgtggtctactggtcttagcttgaaaacaacattaaatcttgtctttgctacttctttcagtctgttttcgtgaggagagtaaat

SEQ ID NO: 217686 - DNA, 1961 bp, Zea Mays
cgctaacacgggtgcccagccgccgcagtctttcgaactgaggaaccctaggcccagcactcggcgacggcggcgcgccaccggcgacgggatcagcggcatcactcccctccttccccggcgcggcggcgccccgcacctaggccctagcactgcagcactcgacaacaggatcagcggtcgcgcccccctcctccttccccggcgcggcggcgccctgtagctgcagatctgccactgtccgcctgccggtcatggagcacctccggtggcgccccacagtgaacgagcgcgacttcattgagtgtgcgctccagtctgacctccgtgttgacggccgccactcctttgacttccgcaagctcaagatcaccttcggcagggaggatggctcgtcagaggtgcagctcggggagacacacgtgatgggctacgtgaccgtgcagctggtgcagccataccgtgacaggccgaatgaggggacgctggccatattcaccgagttctcacccatggccgacccctcctttgagcctgggcgtcctggggaattagcaattgagcttggccgagttattgaccgtggcctcagggagagtcgagctgttgacatggagtccttgtgtgttgttgctgggaagcatgtctggtctgtgcgtgtggaccttcacatcttggataacggagggaatctcattgatgcagctaatatcgctgcattggcagctttatctactttccggaggcctgaatgcacggttggtggggacgatggtcagcaagttacagtgcatgatcctgaggttagggatccacttcctcttacgatacaccatatgcccatagctgtaacatttgcatattttggtgaaggtaacatcgtggttcttgatcccacatacaaggaagaagcagtaatgggagggaggatgactgctatagttaactcaaatggggatgtttgtgccattcagaaagctggtggagagggtgtcatgtcaagtgttatcatgcagtgtttaagaattgcttcggtaaaggctgctgatataacaagcaaaataaagaaagcagtagactcatacaccaccgagaaagccctaaagaaagtaaaacgtttgccaacctcggttcctcagaaaattaatgtcactaatgtaactatggacggcaaaggtgatggtgaattggaaaagcaatctgtgcagatgcatagtgatgttcagcagataagcaaaggtgatgagaaccagcaaagtataaaaaggaattcacccttgactagggaccgaattgcaaaacacaaacaaacatccacattcattggtggcccatcaaattgatccaccaactatggtcaaggccagcagccgtgaggatgcccaaccaatgactgaatcatctaatgctgaggtgaacacatcaagtgctgtggctgctggagagtctgagtcccatgaaattggatcgccgaagagtctaaaagatgctatcaaaccaaaacataaaagaaagaagaagaaaagtgacaggagttagtttagttgcaagcctgtaattttgtatgccccagataaatcaacgacagtctacaacacctcaaactcctgattgattaggtttcatccggggtgccatacatgggttttttgtgtgttttcaatcgtgactggtgctagtagtgacaggcaaattttgtacaagctgtagaattgtattttaggaatggttcagttaagctttcagtcaactttgcagctagttctgtgatgcgtgatgtcccagcactcttacatttcattgtactgctcaccgttaatcttccattgtccaaacggtcgtaaggattgccatatttgttccaacagtcttcagttgtggtctactggtcttagcttgaaaacaacattaaatcttgtctttgctacttctttcagtctgttttcgtgaggagagtaaat

SEQ ID NO: 217687 - DNA, 2696 bp, Zea Mays
gtcctatacgctaacacgggtgcccagccgccgcagtctttcgaactgaggaaccctaggcccagcactcggcgacggcggcgcgccaccggcgacgggatcagcggcatcactcccctccttccccggcgcggcggcgccccgcacctaggccctagcactgcagcactcgacaacaggatcagcggtcgcgcccccctcctccttccccggcgcggcggcgccctgtagctgcagatctgccactgtccgcctgccggtcatggagcacctccggtggcgccccacagtgaacgagcgcgacttcattgagtgtgcgctccagtctgacctccgtgttgacggccgccactcctttgacttccgcaagctcaagatcaccttcggcagggaggatggctcgtcagaggtgcagctcggggagacacacgtgatgggctacgtgaccgtgcagctggtgcagccataccgtgacaggccgaatgaggggacgctggccatattcaccgagttctcacccatggccgacccctcctttgagcctgggcgtcctggggaattagcaattgagcttggccgagttattgaccgtggcctcagggagagtcgagctgttgacatggagtccttgtgtgttgttgctgggaagcatgtctggtctgtgcgtgtggaccttcacatcttggataacggagggaatctcattgatgcagctaatatcgctgcattggcagctttatctactttccggaggcctgaatgcacggttggtggggacgatggtcagcaagttacagtgcatgatcctgaggttagggatccacttcctcttacgatacaccatatgcccatagctgtaacatttgcatattttggtgaaggtaacatcgtggttcttgatcccacatacaaggaagaagcagtaatgggagggaggatgactgctatagttaactcaaatggggatgtttgtgccattcagaaagctggtggagagggtgtcatgtcaagtgttatcatgcagtgtttaagaattgcttcggtaaaggctgctgatataacaagcaaaataaagaaagcagtagactcatacaccaccgagaaagccctaaagaaagtaaaacgtttgccaacctcggttcctcagaaaattaatgtcactaatgtaactatggacggcaaaggtgatggtgaattggaaaagcaatctgtgcagatgcatagtgatgttcagcagataagcaaaggtgatgagaaccagcaaagtataaaaaggaattcacccttgactagggaccgaattgcaaaacacaaacaaacatccacattcattggtggcccatcaaattggtagtgattggtctgatgttttgtttcccaatttctagatatttagcataaacatttgctcgacacaagttttttttgccaactggtccttttttttttgccatgtagggacccatattctaaaggagttacattaagatccctcaaaatttctgatttgccgggtactgttaacattgtttacatgttatgggttttcttcttgcatgctaactctcagtaacacctctgtgatgtacttgcagtcatttttttggttggcatttttggtgctcattgatgattaaaatatggcatgccattctccactgtttctgctttatagccatgtttttaggagggcagacctagtgccggagaggctcccacatgaagtgggtctggagaagggataaaccatggcaagccttcgtccacaaatgtggagaggctgtttcgaacaagctctcgccactgcactatgcctgcccttcaaattctgttgtctataaattgtgattcccttttatacttatttttttagggctggtagaaatactacataaatctgtgttcctttaaattttgatgtctataattctgcctcctgccagtctagagtaatccttcagatttcagtcattttgatttgacatgtgtaacctgatgtaatcgttcttgaggaatactttgccaagatttgttctctcttgagtctggaatcacttatttgcttcgcatgatgtagatccaccaactatggtcaaggccagcagccgtgaggatgcccaaccaatgactgaatcatctaatgctgaggtgaacacatcaagtgctgtggctgctggagagtctgagtcccatgaaattggatcgccgaagagtctaaaagatgctatcaaaccaaaacataaaagaaagaagaagaaaagtgacaggagttagtttagttgcaagcctgtaattttgtatgccccagataaatcaacgacagtctacaacacctcaaactcctgattgattaggtttcatccggggtgccatacatgggttttttgtgtgttttcaatcgtgactggtgctagtagtgacaggcaaattttgtacaagctgtagaattgtattttaggaatggttcagttaagctttcagtcaactttgcagctagttctgtgatgcgtgatgtcccagcactcttacatttcattgtactgctcaccgttaatcttccattgtccaaacggtcgtaaggattgccatatttgttccaacagtcttcagttgtggtctactggtcttagcttgaaaacaacattaaatcttgtctttgctacttctttcagtctgttttcgtgaggagagtaaat

SEQ ID NO: 217688 - DNA, 1266 bp, Zea Mays
atcgtcgcttgtcgtcatcagcaagctacaacatatcgaagaacaaaggatcagaaatggctatgcaggccacaaggaggctagcgtctttgagcctccaacgacgcctactccttctctctcagaccgaggccccaagcatcccaaccgcggcggcggcggccttcctccactcccatgccaccagcttcgggtacaagcagattcgcgaagaggataagagcaaattggttggcaacgtgttcagcagtgtggcttccagctacgacctcatgaacgatctcatgagtgtcggcctgcataggctgtggaaggacaggcttatttccaagctgaacccctttccggcaatgaagcatctcgatgtggctggtggaacaggtgatgttgcttttcgtgtactggaaagaattaagagtgtgagtcacagagctatgcagggtacacttactgaaaccgaagaagacacccacatttatgtctgtgacattaatccaaatatgctaaatgttgggaaaaagcgtgctgcagaaagaggttatagcgaagagcattgtcttagctggatacaaggagacgcagaagctctgagttttgaggatggatctatggatggttacactattgcatttgggatcagaaatgtgacgcacattgagaaagctctatcagaagcttacagggttctaaagcgaggggggaggttcctatgcttggagttgagtcatgtggatgtccctgtttttaaagagatttatgatgtttactcgttttctgtgattccgactattggagagctggttgctggtgatcggcagtcgtaccaatacttggttgagagcatccgtcggtttccaaatcaggaaaagtttgctcagatgattcaggaagccggattccagagggtggaatatgagaacctcgtgggtggtgtagttgccattcattctggactgaaactgtagagctgaatacggatggatgttttttatcattcatgcgtgcaccgcaccttctaaaaacaataaattctacaataagcagtactcctgcaatatattttgttaatgttgtttttgaaatgaattctataacatcaaactgattttattacatatctcctgcaatatattttgataaagaattcatttgaacaatccaccaaggcaaagatgtatgtatctatctattcggagggcaagaacatgctttgcttgctaccttggcagcttggccagaaacctcatgtccaccggctgcttcggg

SEQ ID NO: 217689 - DNA, 1204 bp, Zea Mays
ggaatctggaaaatctgaggaacaaaggatcagaaatggctatgcaggccacaaggaggctagcgtctttgagcctccaacgacgcctactccttctctctcagaccgaggccccaagcatcccaaccgcggcggcggcggccttcctccactcccatgccaccagcttcgggtacaagcagattcgcgaagaggataagagcaaattggttggcaacgtgttcagcagtgtggcttccagctacgacctcatgaacgatctcatgagtgtcggcctgcataggctgtggaaggacaggcttatttccaagctgaacccctttccggcaatgaagcatctcgatgtggctggtggaacaggtgatgttgcttttcgtgtactggaaagaattaagagtgtgagtcacagagctatgcagggtacacttactgaaaccgaagaagacacccacatttatgtctgtgacattaatccaaatatgctaaatgttgggaaaaagcgtgctgcagaaagaggttatagcgaagagcattgtcttagctggatacaaggagacgcagaagctctgagttttgaggatggatctatggatggttacactattgcatttgggatcagaaatgtgacgcacattgagaaagctctatcagaagcttacagggttctaaagcgaggggggaggttcctatgcttggagttgagtcatgtggatgtccctgtttttaaagagatagctggttgctggtgatcggcagtcgtaccaatacttggttgagagcatccgtcggtttccaaatcaggaaaagtttgctcagatgattcaggaagccggattccagagggtggaatatgagaacctcgtgggtggtgtagttgccattcattctggactgaaactgtagagctgaatacggatggatgttttttatcattcatgcgtgcaccgcaccttctaaaaacaataaattctacaataagcagtactcctgcaatatattttgttaatgttgtttttgaaatgaattctataacatcaaactgattttattacatatctcctgcaatatattttgataaagaattcatttgaacaatccaccaaggcaaagatgtatgtatctatctattcggagggcaagaacatgctttgcttgctaccttggcagcttggccagaaacctcatgtccaccggctgcttcggg

SEQ ID NO: 217690 - DNA, 812 bp, Zea Mays
atgccatttctgaatgttattcttgcactctgtgtacaagaaccagttcaacaggtcaatgaaggcgatagtttggatgatggaaatgatgacatggatgagcaagctagatcttcacaacacctgtcctcatcaacagctgagatttccttgcccccatctgaggatagtgatcgaatgagtgggcaagtagagaatgatgatgggctgggattagttcagagtgacactccagttggagcagcagatggtgacagtacccagatcacctcgactttgactactttttcggcttattgtcataaagatcctaatattcatacaaccaatgaggcccagctatatgaactggtggagcctaatgtacatccacaagcattagcttcctcttctcaggctcttaaagtcccttactctcatcagggatacccttcagaaaatccagaagcagataatgttgtgcaagtctacaggatgccagattctaatgttcactcacaagttctcccgtccacatctgagcttccttccggtggttggggagaaagctatttatcatctcaagaccaggcttgcagctacatgaccaacattttgaagacaaccaatttgtacataaggttctgcattttccttgaggacaaccaatttctccttaacggaaatccatttcatcttagcaatctcaatatgaggttgaattcattaacaccttgttgataccttttgtacattatgttctacattttcttgaggagaaccaatttctccttaacaggaatccatttcttcaatcaaagaaagtaataatg

SEQ ID NO: 217691 - DNA, 1308 bp, Zea Mays
ggtcgatggcgtggatcgaaaccgcccgggcgccttggtgtcatccaaccaacgccgagctccatctgcaacaaattcgagtggccacgcctcctctctcggtcagcagacccggtcgtgcagatcgccaggaactgtgcccccatcggtgagcagtcaccgacttcatctccaacgactccggcgaagacaggcggctccagagcgcgcgtcacggagatctccatcatcaccgtgtccagcagcggggtcccatgcctcacgtttgggacatggaatgcatcgttcctcttggaggtgccactcggcgtcactgtctcgctcttcgatgagggccacagtgggggtcgcaccgttgatagcggtgtcgtgatcgaggagcgcttgaatcttgtcatacacgcccgctagggcgaacctgaatcccgtcgtgtttgaagggtaccaggtgtgtggtgtccctggtggtagctgatgaccaccaccgagacggttgtccccttctcctctgtctgaccgcctccacgtctgcttctataaaattttagatgcaaggacatccgcttcaatgggttctgctgcatatgctcctaagagagatgcaatggtctagaaagtaaaatcattccctggtggcaaggaatacatgtgcagagtagaatttagtcttcctagcataacagcggaagaagggccccagaaaagaaggcaccaatacgagtgaaatttgagataccatatttcatcgtatcaggtctgttatctgaagataattggaaagagtggttaccaggcactcccctgggttagatatatcacgatggctggcgaatatgagctgagacttatatgagttttctcttttctggctgatggaagacatttatgaagctgcaagatacatatttgctcgagacagcaaccgtatgacatttggatgttagcctggacgtcttctgctgaccatacaaggtttccccctgggggcttgttgttcctcttgttaggctcaccttaccttggttattgtatgttacccatcaagtatagtttttgaaaaaagagaggataattttaattttcatctctcttgtattattatggatttatttttgtgggtaccaaacttggatttgtttcgtctgattgagttcacaaaaacactgtcattactgggtgatagttctgaactgcaggttgaaacaattgtgccctttagtgtaaatgtcgtcgtcttgtgtccatgcaaaagaaaggaaacctaccaagacctattatgacttcattaatttcaactttttttgtttc

SEQ ID NO: 217692 - DNA, 4437 bp, Zea Mays
ggcggacattacaaccactgtctatttccatggatttaaaaaagttgagcattgaagaagagttggatgacttgataacaagtattcaacatttgccgtggacgaaattcataggattgatcatcgtttagaaaagaatccagccagctggaggatgagccttctatacttcctcaacactatcaaaatctggatcatcatcagcattttaaagaccataagttttctccaatatccttctctacagacacagaaagtccgcagtttgtgatgtcatataacaagactgctgagaggagacctgatgatctaattgagatgatgacctgcacagttaaaccttcggtggactttgtgattgattctcgcaattcattacatggtccagcaaccaatcatgtttcaagaattgattatggaacaatggccaatgatgatagtaataagaaaccaagccctgctaacacgagtgtgcagagtgctgagagtgattttgcagttgatcagaagcagcaaagtcaatcatggacacctatttctggaagtatatctgcaaacgaaaatcacaagaactctgatagtcattcaacacgtagtactgtaacgcctcctgattatgcatttcttcaggtatctgacagtgatacacagacacaatcaatcaaagtacaacaaccattgaagcaacaacctaaactgctcaacaagaaagagagtgcagctaaagaagacgtcaggattgtagacgacaattgctctccaacttctgcacatatcacttcaagtagcaacatgtctcacactgacaagaaagttgatgccaatccaacttctgcatcagcagctatgaaggaggcaatgaattttgctgaagctaggttaaaggctgcaaaagcattgttagagggaaaaggtgacagttttaaattgcggaagaagccaagtcatcttaaaagcacaaggtctacagaaatcaagtctcctatttctgtagaggccgatacttctgaacaaaaactatgggtgaaaaagtcatcggaagaagaaaagaaccctgacgattctttgtctgacaagcacaaaaagctgactgcagtcagattagatcattttgatgacaatggaaaaaaggtacttccattggagaagcctgagcatatggtgcaacactgcactgaatcctgtcaaacttccagtaaactacaaaaactaggcaactggaagtcaggtaatgacttttttgagctaacccgagatgatcagaaatgcaaaaatgatgaagccacagagggaggtgataaatgtgagcaaatgaatcctattactagtgtcatcaatgatcacaatgaaattgaattcaatgcagcaggctctgacttggacaggtatgaaaaactatgggaggttaatgatggcaggagtgtgggggtgaaacctgtaaatctgagagagaacaagacagctcccgtggacaaagatagtgtgtctgtgattttagaatcttctacagaaaataaggcacaccaaaagactcacaactcaattggtgagggacttgtaacactgaaaaatgctaaggaaagccatggtactgataagtgctttgagcttccttctatgagtggagcctccacaaagctggatgtcttcaaggatgtgtcaggttcatttccggaggctcgctcatcagtaaatgccagcgatcttggagaccatggtaatattagtccaaacttaagtccattagcaggaacatcacaagaggacacaaccagtaaactggtatcagaagtatcttgcgatggtgggatgcaacacacttctcgtagtaatgaaaagctacaggaatcctcagatgtatctgatgttgctatttcccagggaagtaacattaaatcattcattttagaagaacttaaagaatctgatgtatgtgatgctttcatgaggggacctaatggaaaagggcaggaagctgaaaattatggaagagaaaaattcagctttattgatggatcactcttgctgcgaccacacttccataacaaaggtgctaagatgaatgtaatctctgaggaagtacagaaagtcaaaaatgaggagaaacttggtccgtgtacacaccccgaagtaacaattgtggatctggatggtgattgtcctaaagatttgaatgatgttattctacaaaatgatgactttgcagacccagaagaatcaaacatgcctaatgtatttgaggtagctagcaagttgattaaaagagatctggatcaagaaatgcatgggtcattaggacatggtgaagaggagaatatggaagaaggaacagatgtacatctttgtgatattaatggcaaagaagtagatgaaaccttgttagaaaatagtgtgtgtacagatactgaagaaggatgtgctcattgtaaccaggaagaccagaattcatctgacagcaccaacagaggaaaaagtgatgtagataacatgtgttatacatcttgtgacgaggttttgtcttcagaaatgtatacccgcatgcagcactcaatgcaaaaagatggtactgctgcttttcagacatctgggggtgttcctggtcttgaagaaatcggggatgtttccaacagaggaggaagagaattatcaacagaaaggtctacatgtgaagatcatggcaacgcaatcataatggaagaaaaagacactacaacaaggatatcaaaggcagagcatgcatcatctcccttggagacgatgtgtggtgtaactaaatctgctgaagctcccacaacaagggagaacatgacaacagcagatagtgcatgtgaaaaggacaaagggtcttctcaaagagtacaggaggaaaacgaaagtgaaaggagattggagaaagaaagagaagttgaagagaaggaaagaaggaaattggagaaagaaagagaacttgccgaagagaaggaaagaaggaaatttgagaaagaaagagaacttgccgaagagaaggaaagaagaaaaatggagaaagaaaaagaacatgccgaagagaaggaaagaagtaaattggagaaagaaaaagaacttgctgaagagaaggaaagacataaattgaagaaagagagagaacttgctgaagagaaggaaagaagaagattagaagaggcggaaagggagagggagcgtaaaaaggatagacttgctgttgaaagagcgacaagagaagcacatgagagagcatttgccgaagctcgtgaaaaggcagaaaaaatggctttggaaagaattaatgctgcacggcagcgggcatctgcagaggcccgagagaaagaagatagagcaagtgtcgaaccagctgctgaaagggctactagagaagctaggataaaagcagaacgtgcggcagtcgagcgagcaactgctgaagctcgggagcgggcaatagaaaaggcaaaggctgagaaggctcttgcagaggcaagagagcggagggaacgatacaaatcctctttcaaggagagttttaagtccaccaatcaggatattcgacaggagtcacagtttcatagggcaacttctagtaatttcatccgaaacccagattccagcaacagagcaatggttgaggttgagtccgctttaagacataaagcaagattagagaggcatcaacgcacagctgagcgtgtgacaaaagctcttgccgagaagaacacgcgggacctgctggctcaaagagagcaagcagagaaacataggctgtctgaattcctggatcctgagatcaagagatggtcaaatggaaaggaaggaaatctgagggccctgctatccacattgcaatatattcttggtgccgatagtggctggcaaccggtgccactaacagatctcattacagcggttgctgtgaagaaagcttacaggaaggcaaccctatgtgtccatccagataaactacagcagaggggcgctacgatcagacagaaatacatatgtgagaaggtttttgatcttcttaaggatgcttggaacaaattcacttcggaggagcgctagggtggcgggggtgctagagcggccgtttattttgaggcaggcgattcgtatattttctatagcgacgtcgtcagtttcttgattcaaaactgattgtaaatatgcagttgtagccctagatatccgtgtcagaaacacagcgcagatgatgctggttagtaccttatctcagaatcagttcagcaaaaagagctccattgctcgtaagtttccaagcccgcgcggtgggtcgaaaactgcccaatgcattggtcagatggatcctttacggtagagtttcaggtagttagagaatagggatgactgacacgattggtcggtcggacggaaacagccggctcttctagctccggaaacctgtcgtaggacttgcccccgtcc

SEQ ID NO: 217693 - DNA, 4332 bp, Zea Mays
caacaatcggaacatgtggatctgaagaggacgtggtagttgggtaaaccagacagatcatcgtttagaaaagaatccagccagctggaggatgagccttctatacttcctcaacactatcaaaatctggatcatcatcagcattttaaagaccataagttttctccaatatccttctctacagacacagaaagtccgcagtttgtgatgtcatataacaagactgctgagaggagacctgatgatctaattgagatgatgacctgcacagttaaaccttcggtggactttgtgattgattctcgcaattcattacatggtccagcaaccaatcatgtttcaagaattgattatggaacaatggccaatgatgatagtaataagaaaccaagccctgctaacacgagtgtgcagagtgctgagagtgattttgcagttgatcagaagcagcaaagtcaatcatggacacctatttctggaagtatatctgcaaacgaaaatcacaagaactctgatagtcattcaacacgtagtactgtaacgcctcctgattatgcatttcttcaggtatctgacagtgatacacagacacaatcaatcaaagtacaacaaccattgaagcaacaacctaaactgctcaacaagaaagagagtgcagctaaagaagacgtcaggattgtagacgacaattgctctccaacttctgcacatatcacttcaagtagcaacatgtctcacactgacaagaaagttgatgccaatccaacttctgcatcagcagctatgaaggaggcaatgaattttgctgaagctaggttaaaggctgcaaaagcattgttagagggaaaaggtgacagttttaaattgcggaagaagccaagtcatcttaaaagcacaaggtctacagaaatcaagtctcctatttctgtagaggccgatacttctgaacaaaaactatgggtgaaaaagtcatcggaagaagaaaagaaccctgacgattctttgtctgacaagcacaaaaagctgactgcagtcagattagatcattttgatgacaatggaaaaaaggtacttccattggagaagcctgagcatatggtgcaacactgcactgaatcctgtcaaacttccagtaaactacaaaaactaggcaactggaagtcaggtaatgacttttttgagctaacccgagatgatcagaaatgcaaaaatgatgaagccacagagggaggtgataaatgtgagcaaatgaatcctattactagtgtcatcaatgatcacaatgaaattgaattcaatgcagcaggctctgacttggacaggtatgaaaaactatgggaggttaatgatggcaggagtgtgggggtgaaacctgtaaatctgagagagaacaagacagctcccgtggacaaagatagtgtgtctgtgattttagaatcttctacagaaaataaggcacaccaaaagactcacaactcaattggtgagggacttgtaacactgaaaaatgctaaggaaagccatggtactgataagtgctttgagcttccttctatgagtggagcctccacaaagctggatgtcttcaaggatgtgtcaggttcatttccggaggctcgctcatcagtaaatgccagcgatcttggagaccatggtaatattagtccaaacttaagtccattagcaggaacatcacaagaggacacaaccagtaaactggtatcagaagtatcttgcgatggtgggatgcaacacacttctcgtagtaatgaaaagctacaggaatcctcagatgtatctgatgttgctatttcccagggaagtaacattaaatcattcattttagaagaacttaaagaatctgatgtatgtgatgctttcatgaggggacctaatggaaaagggcaggaagctgaaaattatggaagagaaaaattcagctttattgatggatcactcttgctgcgaccacacttccataacaaaggtgctaagatgaatgtaatctctgaggaagtacagaaagtcaaaaatgaggagaaacttggtccgtgtacacaccccgaagtaacaattgtggatctggatggtgattgtcctaaagatttgaatgatgttattctacaaaatgatgactttgcagacccagaagaatcaaacatgcctaatgtatttgaggtagctagcaagttgattaaaagagatctggatcaagaaatgcatgggtcattaggacatggtgaagaggagaatatggaagaaggaacagatgtacatctttgtgatattaatggcaaagaagtagatgaaaccttgttagaaaatagtgtgtgtacagatactgaagaaggatgtgctcattgtaaccaggaagaccagaattcatctgacagcaccaacagaggaaaaagtgatgtagataacatgtgttatacatcttgtgacgaggttaggtctgaatcattttcaggcgatgaagttgttatcaaaactacaattgataaaatcggggatgtttccaacagaggaggaagagaattatcaacagaaaggtctacatgtgaagatcatggcaacgcaatcataatggaagaaaaagacactacaacaaggatatcaaaggcagagcatgcatcatctcccttggagacgatgtgtggtgtaactaaatctgctgaagctcccacaacaagggagaacatgacaacagcagatagtgcatgtgaaaaggacaaagggtcttctcaaagagtacaggaggaaaacgaaagtgaaaggagattggagaaagaaagagaagttgaagagaaggaaagaaggaaattggagaaagaaagagaacttgccgaagagaaggaaagaaggaaatttgagaaagaaagagaacttgccgaagagaaggaaagaagaaaaatggagaaagaaaaagaacatgccgaagagaaggaaagaagtaaattggagaaagaaaaagaacttgctgaagagaaggaaagacataaattgaagaaagagagagaacttgctgaagagaaggaaagaagaagattagaagaggcggaaagggagagggagcgtaaaaaggatagacttgctgttgaaagagcgacaagagaagcacatgagagagcatttgccgaagctcgtgaaaaggcagaaaaaatggctttggaaagaattaatgctgcacggcagcgggcatctgcagaggcccgagagaaagaagatagagcaagtgtcgaaccagctgctgaaagggctactagagaagctaggataaaagcagaacgtgcggcagtcgagcgagcaactgctgaagctcgggagcgggcaatagaaaaggcaaaggctgagaaggctcttgcagaggcaagagagcggagggaacgatacaaatcctctttcaaggagagttttaagtccaccaatcaggatattcgacaggagtcacagtttcatagggcaacttctagtaatttcatccgaaacccagattccagcaacagagcaatggttgaggttgagtccgctttaagacataaagcaagattagagaggcatcaacgcacagctgagcgtgtgacaaaagctcttgccgagaagaacacgcgggacctgctggctcaaagagagcaagcagagaaacataggctgtctgaattcctggatcctgagatcaagagatggtcaaatggaaaggaaggaaatctgagggccctgctatccacattgcaatatattcttggtgccgatagtggctggcaaccggtgccactaacagatctcattacagcggttgctgtgaagaaagcttacaggaaggcaaccctatgtgtccatccagataaactacagcagaggggcgctacgatcagacagaaatacatatgtgagaaggtttttgatcttcttaaggatgcttggaacaaattcacttcggaggagcgctagggtggcgggggtgctagagcggccgtttattttgaggcaggcgattcgtatattttctatagcgacgtcgtcagtttcttgattcaaaactgattgtaaatatgcagttgtagccctagatatccgtgtcagaaacacagcgcagatgatgctggttagtaccttatctcagaatcagttcagcaaaaagagctccattgctcgtaagtttccaagcccgcgcggtgggtcgaaaactgcccaatgcattggtcagatggatcctttacggtagagtttcaggtagttagagaatagggatgactgacacgattggtcggtcggacggaaacagccggctcttctagctccggaaacctgtcgtaggacttgcccccgtcc

SEQ ID NO: 217694 - DNA, 2021 bp, Zea Mays
gagccaagaagcggtaggtggcgccaacgactcgtcgtcgtcgtatccgcggtccggttcctctcctcctgctgcgaatgcgatccctgccctgctccccgttctagattaattgcctttagttattcccttcccctcggctcgcgtgttaatccacggattaaactcgcacctgccctcctcgtccttgacacactgaacgagtgcccgcctgcccggagcagaaccattctcgccctctccctctggcctctgcctccgcctccgcggacgaaaccgccggctgggtccaagtttagcgcgtcggaccctcgctccccaatctcagagcaatggaggtggaggcggcggggccggataagctggcgcctccctcgccggtggagggccccggcgagaatggcgcggccaccaaggtgcagaaggtgtaccgcagctaccggacccgccggaagctcgccgactccgccgtcgtcgtcgaggagctctggtggcaggcgctggactacgcgcgcctggagcacagcaccgtctccttcttcgacgagcccaaaccggagaccgccgcctcgcgctggaaccgcgtcagcctcaacgcatccaagatcgacccgcggcataggtatgggcacaacctgcacttctactacgatgaatggtgcaaaagccaagcaggccagccattcttctactggcttgatatcggcgagggaaaggatctggaccttcctgaatgtccaagagctttgctgaagcagcaatgcattaggtatcttggtccgcaagagcgtgagcactacgaatacatcattagcgagggaaaggttatccacaaacagtctggggaaccacttgatacaaggcgtcctaaggggactaaatggatatttgttatgagtacagcaaaaaagctttatgctggcaagaaacagagaggcgtgttccagcactccagctttctggcaggaggtgcaactatagctgctgggagattcactgcagaaagtggagtgatcaagtccatctgggcgtacagcggccactacaaacctagcgcagagaacctccacaacttcatgaacttcctcgaagagaacggagtggacctcaaagaagtcgaggtacgctcatctaccaaagaagactacaacgaggacccagtgccagtgccggtacttaacgacacacggagttccacttcagctaccatggaagaggcagaccttccacaggcggcggttcccgtccccgctctaaacagcacagagggcgacgaaggagacagccctccggaagacgaaggacgaggcagggcgaggtaccagaggaccttgtcaggcgggctgcagagccccagagccacccaagtgccccagagggcgatcctcgagaggatgaagtccaagggcgagttgtccaagtcgtaccagctcgggcacaggctgtccctcaaatggagcaccggggctggcccgaggatcgggtgcgtcaaggactacccgatggagctccggatgcaggcgctggagatggtggacctttcgcccagagggttgtcgtcgactccgtcgccgtcgaggagactgcctcctccgtgcttttcccccactaaagtcgcctcgccgacgtctccgctcgcgccagttcaggcgtccctgccgcagccaagctaggagctcgagagtagcagcattatgcatggccacgcgcaaatagcacaagaccggttccattcgagagtagcagcacaactcaatgttgtccaagtgaaacagggtgtgggcagaatctgtcacgtttcagacaccggtagctttgaagcagatatgtgctagtgtagtgtttttttttactaccatggttgaggaacctgctttgtactgtatcatctgcaaacggaataatgggcaaagcattacatgtgtgtgtgtgtgtgtgagagagagagagagagagagtactcagagcccttgcatacaggattacaggttgtgatttgtgaagatgttgtattttttgcc

SEQ ID NO: 217695 - DNA, 6774 bp, Zea Mays
ctgcctcacttcacgccgctttgtttctcgctgtctctcgactctctactcactactgcccaattgagcccctccgcttccgcccttccgcccttccgccaccaccaccacacctcgtccagcggcggtcggcaaaccctagaaccttagacccatccgccatactgcggttactgggcgcgggctagggccgggcctccgtaatcgcagcttgcggcgatgccgcttttcatctccgacgaggagctccgtctcctcggcggcgacacggctgccgttgccgagcgggctgatgctgccatccgtgagctccggcggcaggtggataccgtacgcgccgaggcggatgccgctgcgatcgctgccgagcagacctgcgccctcctcgagcaacggtacgcctccctctccgcggagttcgatcgctccaaggccgaggctgccgagctcaccgcctctgccgagcgccgcgctgccgagcttgcctcctctcaggcggagatacatcagcttcgcatccaggcgattgctaaggatggtgaggtggagaggttgaaaattgaaatctcggagctgcacaagtccaagtgccagtcgctggagttgattgagcagagagatgcagaaattaaagagaaggacggcatcatccagagctactacaataaaattgtaaacctggcagaaacttctgctggtaaagaggccaggatacaagaggtcgaagcaaagtttacccattgtcaagcaatttgcaatcgcatgactcaggagaaggagctgcttgaaaagcacaatgtctggcttgatgaagaactgaaagcaaaagtgaagaacttggctgaactaagaaaaacaaatatggatgaggaggctcggttgtcagcaagtattgctgagcttgaaagagagatatctgaatcctctagctccttgaggcgaagcaaagaacgcatctctgaactggagcaaagggtatcctacatggaaaaggagttgcgctcaacaaaggatactgcagctgctaatgaacaacgtctgggtgctgagctttcaactgtcaagaaacttgctgagcttcaccaagaaagttctgaggaatggtcgaaaaaggctggggagctcgaaggtgttattaaagcattagagacacatctgacccaagttgaagatgaatacaaggaaaagcttgagaaggagaccttgtccaggagagaccttgaaaaggaagctgtcaacttgaagcagaagcttgaaaagtgtgaatttgatctggagaatacaaggaagtccagtgaattgagcctcgttccattgaccagcattgcagcaggctcttctgatgtagtagacacaacagtacaaggactgcctatttctgatgcagttaatcagaatgatctaatggttattccaaaggtacctagtggtgtttctggtactgctttagctgcttctcttcttcgtgatggttggagtcttgctaagatctatgagaaataccaagaagctactgatgcttttcttcatgagaggcggggaaggagacatgcagaagcagttttggaaagggttttgcatgaaatagaagagaaggccgagcttatcctagatgaacgggctgaacatgagaggatggttgaagcttatgctatgatggatcagaaattgcagcaagcattgctggagcacgacaattttgaaaacaatgttaggaatctaaagtctgagctgaaaagacgggaacgtgatcatagcgtggcacagaaggaaatagatgacctgcaaaaacaagttgctgtccttttaaaagaatgccaagacatacaacttcgttgtggttctagccttcctaatgtaggttatgtcgcttcttcaagcttagtcaatgttctttccaatgtagagcatgatatcaaggacaatatgtcttttaaagacatcaacgggttagttcaacaaaatgttcaactaagaaatcaaattcacatgctctcagccgatcttgacaaaaaggatatggaactacgggagagcttccaaatcgagttgaagaaaattacagatgctgctgcgtccagggttgaaaaagttatgaagaaatctgaagaacaagcaataatgattgaatctctccatcgatctgtggcgatgtatcggaaactttgtgaggagcagcagaaggctcgttcaaatgttgaatcggcacccactactctgcaagatagcagcagaacagacctgatggttctgtttgaaggatcacaggaagtctcgaagaaagcttatgagcaagtctctgaacgagccagaagccttgatgaagagttgacaaaattgaggactgagcttgagtctctgcggtctgagcgtgataaggcggtgcttgaagctgattttgctcgggaccggcttaatgggtttgcagcggagcttgagcatcagaggaaggagtctaactctgcttcacttagaaatgcggagttgactcgtttagtagttgattatgaaagaagacttcgtgaagatttggattctaaacaagctttagaggagaatctaaggaagctatcaatggaggtgtccacattgaagaatgcaaaagagagtttagagaagtcagagagaagagctttggatgaagtccgtgatttaacggagcgagtgcatcgtttgcaggccacaatcgacacaatccataccactgaggaggtccaagagaatgctaggtccatggaaaggagaaatcatgaggaacacattaagcgactggaaagggattgggctgagcttaacaaggagcttcaagagcaacgagatcatgtccgtgttttgtctcttgacaagaaaaatgtcttcgacagctgcatgaagcaggtagaggatatgagaaaagagctaaataactcgtggaaagctgtttctgatgctgaagcaagggctgccattgcggaggccaagtgttctgatctagaggcaaaggtgaaatcgagaaaggccatttcaagggatggttgccatgaaatctcagccgcatctgaggagaatgatgaactattccagttgaaagaggagttagaaaaatacaaggaggaagcacaagcaaataagaactacatggttcagtacaaagaaatcgcacactcaaatgaagttgcgttgaagcaattggaatctgcacatcaggactacaaggctgagaccgaggttggcaggaaagccttggaagatgagattgttaacttgagggataagttatcagaaatggagaagagttatgtcattaagtgtgaagaagctgccaatgcaattgaatctaaagagaagcacatcacttctctcatgaatgaaatttctgttttaagaacagaagtttctcagaaactaccacagttagaaaaattggaaattgaattggctttgtcaaagagttcacttgatgagcagtataagcgctggcgaactgcccaagataattatgaacgccaggttattctgcaatctgagacgatacaggagttgacaaatacttctaagcagctatcttcgttgcagcatgaaatcactgtacttcgccagactgcagatgcactgaaaaatgaaaatgaatgtctaagatcttctgctgaacaagaaaagataggcttattgaaagagaaggacgatgccctgcagaagtataatgagcttaatgatcagaatagaattctacacaatcagttagaagctttacacattcggttagccgagaaagaacggaatattgctgggctttcatcacatcgtactgataattcacatgcagaagatgatctacaaagtgtcatcagttatctgcgcagatcgaaagaaatagccgaaacagagatatcattgcttaaacaggagaagtctcggcttcagatagaactggaaagttctttaaagtctgccaaggaggcacaggacttgttgcgaagtcaagctgatagtgccagggcattgatgttcaaggatgaagagttcaagtcactgcagattcaggtcagagaaattaacttgcttcgtgaaagcaacatacaacttagggaggagaacaggcacaattttgaagaatgccagaaattccgtgaagaagctcaaaaggctaaaatggaatctgagaggttgcagaaccttctactggagaaggaggtagacgctgaaatgtgcaaaagagaactggaaatgcagaaggcagaaatagctaatctcaaccaaagtatttctgagctgattgaaaatagcaaaggcattgatttgaacacttatgaagccatgaagaatgaacttcaaaatatcaaatcaaccttgagagagaattctatggagcttgaaagtgcaaagatactgctttctgagaaagaagttgccataaaaattttggaggataagctttcattatgtcaatctgaattggattccaaggaaaagaagctgaatgatgtagaggcgtcccttaaatctgagattgacaagcataagaagattaatttaaacttaaagagaaagcatgacaatttgatgaaggagaagggagagattgctaaagaaaatcaaagccttgtaaagcagatggaggatcttaaatcaacagctcagaagacaacatctgaaacaacacttgagcaggctattaaagaaaaggatttcaggatacagacattagaaagaactctggaaaaggaaagagatgataacaagaaagagaaggcaaagagtaggaggaatgagaacacaatctttggtgcacttcagaaggtgcaacaggacaagaaacaagtagaggagtctatagataagcataagcaggctgtgagagagttgattgagaattatcctggattatcatctgaagtgccacctatctctgcactagaagagcaacttctttcatacttccgtgcagctaaagatatggaggaatcttctagtcccttccgtgatggtgcagcaactcaaactccagttgttgaaactgcccctgtggatgcacctacttcagctggagttgcaggacgtccagtagatacttcgtcaaggccagctaaagctaaaatgacggaagaaagagcagttcccaaaccaagcagtgaagtacgtaggcctggaggaagaagaccccttgttcgtcctactcttgaacgaactgaagaacctcatgctgatacagatatatcagctgttgatgcctccacagttcaggacaaaggggggccaccagcagagcaagaaacttctggaattttacctgtgttacagcctttgagtcgtaaacggcttatcacatcttcacagacggtagacagtgcctcgcagggtgaggctaatgatgtcaatcctccatctaagaagcccaaggaggaagaatcttcacaagggactagtgaactcaaaagtggtcaaccacctcttggggatgtagcggcacaggttaatgtgcttccagccactgatgacctagatggacaacagcctacagaagagatcgatactgatcaggcacctgagccaatggtagaggttgaggcaacaagggaagaggatgggggtgataaagatgactctggagatgcatcaacggacatcaaaggccaggatgctgatgctaatattgacgcaaatgcaattcctttagaagaagagcatgtagtggcaaagtcagaggcaataattgaatcatttgatgatgaccggaaaacagaagattcgaaggaagatgctcagcgtactactgcaactgatgttgatgatgacatggaggagggagagttggcagaggaacctgaagacaagagtgacgttgatatgtcagagatcgagggtgaggctacagccgaacgtgctgctgtggaaccggaccaaagtcctataacacaacctggtgcagctgatgcctcaccaagcagaactgcagatgcatctcctgctcgtgaaccttcccctagtccggtccaagctggtgcatcttctcgaccccagaatactagcactgcaacagaggcacgtgaaccttcctctaacccagcccaagctggtgcgtcttctgaacagcggaacaccagtactgtagtggaggctgctgaaactcgttccagaacaatcaacttaagtgagagggccagacaaaacaggcaaaccaggtttcaacgcgcacaacaacctggcactgctcggggtcgtggccagcaatctgttacactcagggtatggtttctttattcttgttcatttcagttgggtgcttatatccagcattgagctgattcggggctgcctttgttttgcagaaagatgctacgggtcgaggatcaaggggccgcggggggcgtggtcagtcctagtaaagtagattgtcttttctcgtgcagggataattttgtccattgggatagagacccttgtatttttagattgatcgacgaacttcatggggatacagagacccttgtgtttttagattgatcgacgaattttgtctcattggtttttactaaatgttccctgacctgcgtgcgaatccttgtgggttctgagaccgctatatctaatccaaactgttgtgtttgttggtactatgggctggagctgcacctcctgaatcccaatagcactagcatttttcacatagccataaaaatgatgctacgtgaagcattccttggggtggatccctacccgggcttctaaaccacgactttatacatgactttcatttctctttgtatatggactaaaatgacttgttagtgttta

SEQ ID NO: 217696 - DNA, 947 bp, Zea Mays
atatatatttagtgacccatatagaagcccattagttcagcacagcacatcttcctcgcagcgccggcgctccatcttccgctccctcccccaccttcgatcggcacgcaggctcggcgtcgtcgtcagcggttcctcctcccgcctctcgccagtagcctcgcgccctcgccgactggcgaccctgccttgaaggggctggcaagatgatcggcgtagggaaggcgaagcagtacgccaacgtccttgacaagcccctcagccgtggcaggcaggagtttgagtgcatttgcattcttgttctctgagttggttcagtacaaccagactcaagttgacaacattactgagctggaacggaggctggaggatgctggttatgctgttggtgcaagggtgcttgaactactctgtcacagggagaagggaaatagacgagagacacgacttctgggcattttatcattcatccacagtactgtttggaaagtgttgtttggaaaggtggctgactcacttgaaaagggaacagaacacgaggatgaatacatgatcagtgaaaaggagcttcttgttaaccgtttcatttctgtgccaaaagacatgggagcattcaactgtggagcttttgttgcgggcattgtaaagggtgtattagataatgccggctttcctgccgtagttactgcacattttgtgccaattgaaggccagcaaaggccaagaacgacaatcctgataaagtttgctgaagaggtattacacagagaagcaagactgggctgagtttttatgtatgtacacaaaacctttgactagcctatttgtaaggtgagatcgcaggtgcttcatcagtcttattgaaatccgaccgaaactgctgtattaatgcttttccttgcattcaccttgtattaaaggaatccttcatcttttgatttttcgta

SEQ ID NO: 217697 - DNA, 648 bp, Zea Mays
aaaaggttcatggttcatctgggaaatagacgagagacacgacttctgggcattttatcattcatccacagtactgtttggaaagtgttgtttggaaaggtggctgactcacttgaaaagggaacagaacacgaggatgaatacatgatcagtgaaaaggagcttcttgttaaccgtttcatttctgtgccaaaagacatgggagcattcaactgtggagcttttgttgcgggcattgtaaagggtgtattagataatgccggctttcctgccgtagttactgcacattttgtgccaattgaaggccagcaaaggccaagaacgacaatcctgataaagtttgctgaagaggtattacacagagaagcaagactgggctgagtttttatgtatgtacacaaaacctttgactagcctatttgtaaggtgaatcgttactggagtttggtgatttcttgtatttgagtagttcggtgatttcttgtatttgagttatgtaatagcagtgtgactgagaataaaagttatgtaggtgagatcgcaggtgcttcatcagtcttattgaaatccgaccgaaactgctgtattaatgcttttccttgcattcaccttgtattaaaggaatccttcatcttttgatttttcgta

SEQ ID NO: 217698 - DNA, 3063 bp, Zea Mays
gccggttagtgggctggcggctagggtttgtgtttttttccttttcttttctattttaaaaatataaatatatattttttaaaataattcaaaaatcataataattataccgaaatttatttataactaaaatatttatttttggaccattatttctatattaatcaattggattttcgttaagaaagaaattctactaaacatccaaaaatcgaatatgagcaaacaaaaattattctagatgcaaataaaaatcaaaaattaggaagaaaatttattaccattaataatctaaatgcattattttagttgatggtttttatagtgttatatgaaagcactttggttttttgaaattaagcaatccagcttttccccgagcctgttggccaagatctttgtcatgaacttagcaaaactgtgaatcaggctaatggggcgaaaatcagcagcaccatgagcgccctccctttttggcaacaatgtgataaaggcagagttgaggaggcgaaggtttctgaagtgaaggatgaaagatcacatttggccacagtttctgaagacaactctgaaatccaacaagattccccgagcattttgtctactgtagacttactccatgcgtgagctgggatgccacaaagttccacatccaccaaaactggcaaggaaacaccagtggaatgagcaaaccgtgaccatttcttgaacttcaactcaaaatccgggcagtgaagcactcttccattatcaaacacccgtactgcagtatcctcatcttgaaaaactagcatgaaatcttctggccaggccttgtgaatggtgaaacttgattcaggcagatcatatatttgtgcaacttccaaaattacctcagaaggtgttactgatggccttgtacccacaacggtgacgaacaaagctgcccttagcctgatttcttcgcgtgcgatggcagggtagaattccatcacacatctgcgtcccggagcagccggaaccgtggtgctactatctaccgggtgcggatcacactggagatcagcacccacctccacctccaaagcaggctgcctgagagaggtgtgcttccgtgctcttatggtgagggcgcctccgtcgctttcttccacgcttggaaggggaggcttgatcctaaaaagaggcccttccctgaacagaggcccctgccgacataggggaggtgtgcactaccctatcctgtccagctgacaggggggtaattctcttccacacttgtttacgtttctccatcacttgtggctgaggcatgaccttgatgcgctgccaggaaggctctttatgcgtagcccgccacttgagacgttgccacaccggaacacgaaccggcagagcaacttgcatgggtgagtccaccggactaggtacaactggacagatagcaacccggtgaccagggagcctgcatatgatacagcgcgtggcctggcggcattgggatgcacgatgggttgtggcggcgaggcagttgaagcatctacctcggaggtccaaagggacttgacgacctgccacccatcatcactcgagcggacgttgctcgaggccttccactggcgacgccaggagggaatggaggccttgaccgcaatcccgggcgacttcggaagctcccgcaccgaacccgccggggagcgtccactgccgtcgtcctcaggagcgcgtccttgaaagttccaggcatggcggcaggcaactcatctccatacgacccaactagagggctgcatgaggatgagcctccgccaatccaagccgggctgacttctgcctaacgttggagcttggaccgtcccttagggagaatcggttccgcggacgaagacaaggaggaggtggagcacgacacctgaagggagggaggaaccgcatgggagcaagcggcagggtaggtggttgccggaacctgggcggcagacggcgagctgttggtggaatgaggggcgccgggtgaggtgggaggcaagggggtgggagacgagggggcgggagccttttttttgcagtgtgtgaactcaacatcatggtggaaactgcaattgttgtataaaaagagtggagaacattgatggatggttcaagtgtccttgcaagtagcagcttcaaattggaatggaaaaggctctttcctattcacctcgagtactgctgtgtatgactgcagtgacaatggattctgcagtgaggattctccttgtgtacccattggtcaaagcactcgtactgatgtgcttctaaaagctgaaaatgttgtccttgaggcaggcggctgtgttcttaggctagtaggactttataaatcagatcggggtcctcatgtttactggctgtcaaaaggaaccttggatgtgcgtcctgatcatatactcaatctgatacattatgaagatgcagcctctcttgtaatttccatcatgaaaaagagattacggagctgcatctttgtgggttgtgacaacgagcctctgtccaggctagagatcatggaccgtgtcaacagaagcaggaaatttgacacacagtttcatggcttcactgggactgatggtccgctggggaagaggatggacaactccaaaactcgggcaaagcttggatggcagcccaagtatccgagctttacagagttccttggtctcagcaatctctaactttcatgcgatgtcactaaatacctgttattaaagatgaatatactgatacataaaagagatgatgacagatttggaagtggaatgttgtttgcttataccgcagttttcgactatcttttgatttcttctgttagatcttgtaaagcattgcagcatggtgtggcatgtacctgtgttgccttctattcgcttctgttaactcatgaaagcattgacttcaatacctgttaattgtttccatggcttcaatctatcgaaccaactgtctctctcgatgttctctagaattgtaacaaaaattccaatggtactttttggataagaacaagttttgatgaaaacattctctactggaaattttgatttt

SEQ ID NO: 217699 - DNA, 3139 bp, Zea Mays
gccggttagtgggctggcggctagggtttgtgtttttttccttttcttttctattttaaaaatataaatatatattttttaaaataattcaaaaatcataataattataccgaaatttatttataactaaaatatttatttttggaccattatttctatattaatcaattggattttcgttaagaaagaaattctactaaacatccaaaaatcgaatatgagcaaacaaaaattattctagatgcaaataaaaatcaaaaattaggaagaaaatttattaccattaataatctaaatgcattattttagttgatggtttttatagtgttatatgaaagcactttggttttttgaaattaagcaatccagcttttccccgagcctgttggccaagatctttgtcatgaacttagcaaaactgtgaatcaggctaatggggcgaaaatcagcagcaccatgagcgccctccctttttggcaacaatgtgataaaggcagagttgaggaggcgaaggtttctgaagtgaaggatgaaagatcacatttggccacagtttctgaagacaactctgaaatccaacaagattccccgagcattttgtctactgtagacttactccatgcgtgagctgggatgccacaaagttccacatccaccaaaactggcaaggaaacaccagtggaatgagcaaaccgtgaccatttcttgaacttcaactcaaaatccgggcagtgaagcactcttccattatcaaacacccgtactgcagtatcctcatcttgaaaaactagcatgaaatcttctggccaggccttgtgaatggtgaaacttgattcaggcagatcatatatttgtgcaacttccaaaattacctcagaaggtgttactgatggccttgtacccacaacggtgacgaacaaagctgcccttagcctgatttcttcgcgtgcgatggcagggtagaattccatcacacatctgcgtcccggagcagccggaaccgtggtgctactatctaccgggtgcggatcacactggagatcagcacccacctccacctccaaagcaggctgcctgagagaggtgtgcttccgtgctcttatggtgagggcgcctccgtcgctttcttccacgcttggaaggggaggcttgatcctaaaaagaggcccttccctgaacagaggcccctgccgacataggggaggtgtgcactaccctatcctgtccagctgacaggggggtaattctcttccacacttgtttacgtttctccatcacttgtggctgaggcatgaccttgatgcgctgccaggaaggctctttatgcgtagcccgccacttgagacgttgccacaccggaacacgaaccggcagagcaacttgcatgggtgagtccaccggactaggtacaactggacagatagcaacccggtgaccagggagcctgcatatgatacagcgcgtggcctggcggcattgggatgcacgatgggttgtggcggcgaggcagttgaagcatctacctcggaggtccaaagggacttgacgacctgccacccatcatcactcgagcggacgttgctcgaggccttccactggcgacgccaggagggaatggaggccttgaccgcaatcccgggcgacttcggaagctcccgcaccgaacccgccggggagcgtccactgccgtcgtcctcaggagcgcgtccttgaaagttccaggcatggcggcaggcaactcatctccatacgacccaactagagggctgcatgaggatgagcctccgccaatccaagccgggctgacttctgcctaacgttggagcttggaccgtcccttagggagaatcggttccgcggacgaagacaaggaggaggtggagcacgacacctgaagggagggaggaaccgcatgggagcaagcggcagggtaggtggttgccggaacctgggcggcagacggcgagctgttggtggaatgaggggcgccgggtgaggtgggaggcaagggggtgggagacgagggggcgggagccttttttttgcagtgtgtgaactcaacatcatggtggaaactgtacaccctctctcctgaactcaacatcatggtggaaacttactgtacaccagtgactggaaggagcgtcattttcaggcaattgttgtataaaaagagtggagaacattgatggatggttcaagtgtccttgcaagtagcagcttcaaattggaatggaaaaggctctttcctattcacctcgagtactgctgtgtatgactgcagtgacaatggattctgcagtgaggattctccttgtgtacccattggtcaaagcactcgtactgatgtgcttctaaaagctgaaaatgttgtccttgaggcaggcggctgtgttcttaggctagtaggactttaaatcagatcggggtcctcatgtttactggctgtcaaaaggaaccttggatgtgcgtcctgatcatatactcaatctgatacattatgaagatgcagcctctcttgtaatttccatcatgaaaaagagattacggagctgcatctttgtgggttgtgacaacgagcctctgtccaggctagagatcatggaccgtgtcaacagaagcaggaaatttgacacacagtttcatggcttcactgggactgatggtccgctggggaagaggatggacaactccaaaactcgggcaaagcttggatggcagcccaagtatccgagctttacagagttccttggtctcagcaatctctaactttcatgcgatgtcactaaatacctgttattaaagatgaatatactgatacataaaagagatgatgacagatttggaagtggaatgttgtttgcttataccgcagttttcgactatcttttgatttcttctgttagatcttgtaaagcattgcagcatggtgtggcatgtacctgtgttgccttctattcgcttctgttaactcatgaaagcattgacttcaatacctgttaattgtttccatggcttcaatctatcgaaccaactgtctctctcgatgttctctagaattgtaacaaaaattccaatggtactttttggataagaacaagttttgatgaaaacattctctactggaaattttgatttt

SEQ ID NO: 217700 - DNA, 3517 bp, Zea Mays
agaggtgtctcggtccgacttggtacttggcggctccactgctcacgtcacgtgcccgcgttctctctccgactcccatgcctctccggcgagctagtctggtatccatcggcgagctagttttgtctccaccggcgagcacgcgtctgtaacctcctccacccccatcgaactccacctgctctccaatccgctagatctcggctccgtgcagctgtgctgattgtgaggaatttggtagcacctctatcagggttttaaaactagagtgctgccgccccagcatacataatatggacgaagaaaatgttgttgagctgctgcaacgttatcgccgtgaccgtcaagtattactcaactacattctttctggcaacttgatcaagaaagttgcaatgccacctggtgcaatctctttggatgatgtagatatagatcaagttagtgttgattatgtcctcaactgtgctaagaaaggtgaacctcttgaccttggagacgccatccgcctttttcatgatagccttgactatccatatgtgaataacactggagctgtggatgagttctatttgcttacaaaaccagaatattcaggaccagctccaacacgagaaccaccacctatcccagccactgcaccatcatcagttgtgataccaccaccggatgtggaaccagcaccaattattgtgtcatcgccagtcacagctaccaacttgccaaaatcacaaccatttgattctccgaccgagaaggagttaactatagatgacattgaagactttgaggatgatgaagatgaatttgatgggcgaagggcttctagaagacatcaaactgacgctagtgatctatcgttgctgttaccatcatttgaaacaggtatcacagacaatgatcttcgtgaggcagcatatgagatccttgttgctgctgctggtgcttcggggggccttatagttcctcagaaagaaaagaaaaaagagaagagacacagattgatgaggaaactcggtcgtagtaagagtgaaagtgtggatatcaacactcaacggcaacctggtttagttggtttgcttgaaaccatgcgagctcaacttgagataacagagtccatggatattcgaactaggcaaggattactcaacgctatggttggcaaagttggaaaacggatggacaatcttttgattccattggaactattatgctgcatatccagaactgaattttctgacatgaaagcataccttcgttggcagaagagacagttaaacatgctggaggaaggcctcataaaccatccagttgttggatttggggagttaggtcgaaaagtcaatgagataaggagcctttttagaaagattgaagaatccgagtccttgccaccatctgctgcagaggttcaacggacagaatgcttaagatcactgagagaagttgccacttctctatctgaaaggcctgcccggggtgatcttactggtgaggtttgtcactgggctgatggataccatctgaatgtagcattgtatgagaagatgcttggcagtgtttttgacatcttggatgagggaaaacttacagaggaggcagaggaaatccttgaactcttaaggtcaacttggcggacactaggaatcacagagactgttcatgatacatgctatgcatgggtattatttcgacagtttgttcttacaggtgagcaaggacttctgaaagtcgtgattgacaatttgaggaagatacctttgaaagaacagcgtggtccgcaagaaagattacacttgaaaagcctgcgtagttctgttgatgctgagggtagctatcaagacttcacatttttccagtctttcctgtctccaattcagaaatggacggacaagaaactaaatgactatcacctacatttctccgagggctccagcttgatggctgatgttgtgacagtggcaatgcttacaaggcggatccttggtgaagaaaatgacaaggtagcggagtctcctgacagagatcagattgaccgatacatcacttcttcagtcaaaaatactttcttgaagatggcacattctgtagagttcaaagcagacactacaaatgagcatgttttagcatctctagctgaggagacaaagaaactgctgaaaaaagatacagccatttttacacctgttttgacaaaatggcatccacaggcagcagttgtttctgcttccctcattcataaactttatggaaataaattgagaccatttcttgagcatgctgagcatcttacggaggatgtggtttctgtatttccggcagctgatgctttggagcaatacgtaatgtctgtgatggcctccgtcacgggagatgatggtttggatagcctatgcagacataaactagttccatatcagattgaaagtaaatctggtacattagttttacgctgggtaaatgggcaacttgagagaattgaaacttgggttaaaagggctgctgaccaagaggtttgggaccctatatcccctcaacaacgccatggaaattctattgtagaagtctatagaatcatagaagagactgcagatcaattttttgcatttaaggttcctatgcgagatggagaattaaatagtctatgccgtggtcttgacaaggcattccaagtttatacacagctggttactgcacccctagttgataaagaagatttagctccgcctattcctgttcttactcgatataaaaaggagcttggaatcaaggcttttgtaaaaaaagaggtccaagaagttagaacagttgatgagaggaaagctagcgaaattactcagcttacaatgccaaagctttgtgttcgtcttaacagtctatattacggtatcagccagttgagtaagttggaggacagcattaatgagaggtgggctcggaagaaaagtgaaaacactaacatcagacgaaaaagtgaaaagtcaaagagtgccgtccctaatcagaagaatcaatttgatggcagcagaaaagaaatcaatactgctattgatcgtctctgtgaatttactgggacaaaggttatattctgggacctgcagcagccatttgttgagaatttatacagaaatggtgttgctcaagctcgattggacaccataactgaagtgcttgatttggtccttaatcaactttgtgatgtcattgtggaacaactgagggatcgtgtggttacagggcttctgcaagcatgcctggatggcttccttcgtgtgatactggatggaggttctacacgtgtcttctctccaaatgatgcagctttattggaggaagatcttgaaaccctgaagcaagttatgtcatgctggagtaggaagggtctattggcgcatattccacacggaaagcttgccatgccattcctgttggcgtggcaaaacagaattgccatgccacctggactggcatggctaggataaatctgaggaaaatcatatctttttcataaaccgtt

SEQ ID NO: 217701 - DNA, 3556 bp, Zea Mays
agaggtgtctcggtccgacttggtacttggcggctccactgctcacgtcacgtgcccgcgttctctctccgactcccatgcctctccggcgagctagtctggtatccatcggcgagctagttttgtctccaccggcgagcacgcgtctgtaacctcctccacccccatcgaactccacctgctctccaatccgctagatctcggctccgtgcagctgtgctgattgtgaggaatttggtagcacctctatcagggttttaaaactagagtgctgccgccccagcatacataatatggacgaagaaaatgttgttgagctgctgcaacgttatcgccgtgaccgtcaagtattactcaactacattctttctggcaacttgatcaagaaagttgcaatgccacctggtgcaatctctttggatgatgtagatatagatcaagttagtgttgattatgtcctcaactgtgctaagaaaggtgaacctcttgaccttggagacgccatccgcctttttcatgatagccttgactatccatatgtgaataacactggagctgtggatgagttctatttgcttacaaaaccagaatattcaggaccagctccaacacgagaaccaccacctatcccagccactgcaccatcatcagttgtgataccaccaccggatgtggaaccagcaccaattattgtgtcatcgccagtcacagctaccaacttgccaaaatcacaaccatttgattctccgaccgagaaggagttaactatagatgacattgaagactttgaggatgatgaagatgaatttgatgggcgaagggcttctagaagacatcaaactgacgctagtgatctatcgttgctgttaccatcatttgaaacaggtatcacagacaatgatcttcgtgaggcagcatatgagatccttgttgctgctgctggtgcttcggggggccttatagttcctcagaaagaaaagaaaaaagagaagagacacagattgatgaggaaactcggtcgtagtaagagtgaaagtgtggatatcaacactcaacggcaacctggtttagttggtttgcttgaaaccatgcgagctcaacttgagataacagagtccatggatattcgaactaggcaaggattactcaacgctatggttggcaaagttggaaaacggatggacaatcttttgattccattggaactattatgctgcatatccagaactgaattttctgacatgaaagcataccttcgttggcagaagagacagttaaacatgctggaggaaggcctcataaaccatccagttgttggatttggggagttaggtcgaaaagtcaatgagataaggagcctttttagaaagattgaagaatccgagtccttgccaccatctgctgcagaggttcaacggacagaatgcttaagatcactgagagaagttgccacttctctatctgaaaggcctgcccggggtgatcttactggtgaggtttgtcactgggctgatggataccatctgaatgtagcattgtatgagaagatgcttggcagtgtttttgacatcttggatgagggaaaacttacagaggaggcagaggaaatccttgaactcttaaggtcaacttggcggacactaggaatcacagagactgttcatgatacatgctatgcatgggtattatttcgacagtttgttcttacaggtgagcaaggacttctgaaagtcgtgattgacaatttgaggaagatacctttgaaagaacagcgtggtccgcaagaaagattacacttgaaaagcctgcgtagttctgttgatgctgagggtagctatcaagacttcacatttttccagtctttcctgtctccaattcagaaatggacggacaagaaactaaatgactatcacctacatttctccgagggctccagcttgatggctgatgttgtgacagtggcaatgcttacaaggcggatccttggtgaagaaaatgacaaggtagcggagtctcctgacagagatcagattgaccgatacatcacttcttcagtcaaaaatactttcttgaagatggcacattctgtagagttcaaagcagacactacaaatgagcatgttttagcatctctagctgaggagacaaagaaactgctgaaaaaagatacagccatttttacacctgttttgacaaaatggcatccacaggcagcagttgtttctgcttccctcattcataaactttatggaaataaattgagaccatttcttgagcatgctgagcatcttacggaggatgtggtttctgtatttccggcagctgatgctttggagcaatacgtaatgtctgtgatggcctccgtcacgggagatgatggtttggatagcctatgcagacataaactagttccatatcagattgaaagtaaatctggtacattagttttacgctgggtaaatgggcaacttgagagaattgaaacttgggttaaaagggctgctgaccaagaggtttgggaccctatatcccctcaacaacgccatggaaattctattgtagaagtctatagaatcatagaagagactgcagatcaattttttgcatttaaggttcctatgcgagatggagaattaaatagtctatgccgtggtcttgacaaggcattccaagtttatacacagctggttactgcacccctagttgataaagaagatttagctccgcctattcctgttcttactcgatataaaaaggagcttggaatcaaggcttttgtaaaaaaagaggtccaagaagttagaacagttgatgagaggaaagctagcgaaattactcagcttacaatgccaaagctttgtgttcgtcttaacagtctatatccagttgagtaagttggaggacagcattaatgagaggtgggctcggaagaaaagtgaaaacactaacatcagacgaaaaagtgaaaagtcaaagagtgccgtccctaatcagaagaatcaatttgatggcagcagaaaagaaatcaatactgctattgatcgtctctgtgaatttactgggacaaaggttatattctgggacctgcagcagccatttgttgagaatttatacagaaatggtgttgctcaagctcgattggacaccataactgaagtgcttgatttggtccttaatcaactttgtgatgtcattgtggaacaactgagggatcgtgtggttacagggcttctgcaagcatgcctggatggcttccttcgtgtgatactggatggaggttctacacgtgtcttctctccaaatgatgcagctttattggaggaagatcttgaaaccctgaaggaattttttgtttctggtggagatggactgcctcgtggaactgttgaaaacttagtctcgcgtgtacgtcctgtaataaatctgatcaagcaagagacccgcgtgctcattgatgacctacgagaagttactcaaggtggcaagagcaaatttggagcggactccaaaaccctccttagggtcctgtgtcacagaaatgattcagaggcatcac

SEQ ID NO: 217702 - DNA, 3538 bp, Zea Mays
agaggtgtctcggtccgacttggtacttggcggctccactgctcacgtcacgtgcccgcgttctctctccgactcccatgcctctccggcgagctagtctggtatccatcggcgagctagttttgtctccaccggcgagcacgcgtctgtaacctcctccacccccatcgaactccacctgctctccaatccgctagatctcggctccgtgcagctgtgctgattgtgaggaatttggtagcacctctatcagggttttaaaactagagtgctgccgccccagcatacataatatggacgaagaaaatgttgttgagctgctgcaacgttatcgccgtgaccgtcaagtattactcaactacattctttctggcaacttgatcaagaaagttgcaatgccacctggtgcaatctctttggatgatgtagatatagatcaagttagtgttgattatgtcctcaactgtgctaagaaaggtgaacctcttgaccttggagacgccatccgcctttttcatgatagccttgactatccatatgtgaataacactggagctgtggatgagttctatttgcttacaaaaccagaatattcaggaccagctccaacacgagaaccaccacctatcccagccactgcaccatcatcagttgtgataccaccaccggatgtggaaccagcaccaattattgtgtcatcgccagtcacagctaccaacttgccaaaatcacaaccatttgattctccgaccgagaaggagttaactatagatgacattgaagactttgaggatgatgaagatgaatttgatgggcgaagggcttctagaagacatcaaactgacgctagtgatctatcgttgctgttaccatcatttgaaacaggtatcacagacaatgatcttcgtgaggcagcatatgagatccttgttgctgctgctggtgcttcggggggccttatagttcctcagaaagaaaagaaaaaagagaagagacacagattgatgaggaaactcggtcgtagtaagagtgaaagtgtggatatcaacactcaacggcaacctggtttagttggtttgcttgaaaccatgcgagctcaacttgagataacagagtccatggatattcgaactaggcaaggattactcaacgctatggttggcaaagttggaaaacggatggacaatcttttgattccattggaactattatgctgcatatccagaactgaattttctgacatgaaagcataccttcgttggcagaagagacagttaaacatgctggaggaaggcctcataaaccatccagttgttggatttggggagttaggtcgaaaagtcaatgagataaggagcctttttagaaagattgaagaatccgagtccttgccaccatctgctgcagaggttcaacggacagaatgcttaagatcactgagagaagttgccacttctctatctgaaaggcctgcccggggtgatcttactggtgaggtttgtcactgggctgatggataccatctgaatgtagcattgtatgagaagatgcttggcagtgtttttgacatcttggatgagggaaaacttacagaggaggcagaggaaatccttgaactcttaaggtcaacttggcggacactaggaatcacagagactgttcatgatacatgctatgcatgggtattatttcgacagtttgttcttacaggtgagcaaggacttctgaaagtcgtgattgacaatttgaggaagatacctttgaaagaacagcgtggtccgcaagaaagattacacttgaaaagcctgcgtagttctgttgatgctgagggtagctatcaagacttcacatttttccagtctttcctgtctccaattcagaaatggacggacaagaaactaaatgactatcacctacatttctccgagggctccagcttgatggctgatgttgtgacagtggcaatgcttacaaggcggatccttggtgaagaaaatgacaaggtagcggagtctcctgacagagatcagattgaccgatacatcacttcttcagtcaaaaatactttcttgaagatggcacattctgtagagttcaaagcagacactacaaatgagcatgttttagcatctctagctgaggagacaaagaaactgctgaaaaaagatacagccatttttacacctgttttgacaaaatggcatccacaggcagcagttgtttctgcttccctcattcataaactttatggaaataaattgagaccatttcttgagcatgctgagcatcttacggaggatgtggtttctgtatttccggcagctgatgctttggagcaatacgtaatgtctgtgatggcctccgtcacgggagatgatggtttggatagcctatgcagacataaactagttccatatcagattgaaagtaaatctggtacattagttttacgctgggtaaatgggcaacttgagagaattgaaacttgggttaaaagggctgctgaccaagaggtttgggaccctatatcccctcaacaacgccatggaaattctattgtagaagtctatagaatcatagaagagactgcagatcaattttttgcatttaaggttcctatgcgagatggagaattaaatagtctatgccgtggtcttgacaaggcattccaagtttatacacagctggttactgcacccctagttgataaagaagatttagctccgcctattcctgttcttactcgatataaaaaggagcttggaatcaaggcttttgtaaaaaaagaggtccaagaagttagaacagttgatgagaggaaagctagcgaaattactcagcttacaatgccaaagctttgtgttcgtcttaacagtctatattacggtatcagccagttgagtaagttggaggacagcattaatgagaggtgggctcggaagaaaagtgaaaacactaacatcagacgaaaaagtgaaaagtcaaagagtgccgtccctaatcagaagaatcaatttgatggcagcagaaaagaaatcaatactgctattgatcgtctctgtgaatttactgcagccatttgttgagaatttatacagaaatggtgttgctcaagctcgattggacaccataactgaagtgcttgatttggtccttaatcaactttgtgatgtcattgtggaacaactgagggatcgtgtggttacagggcttctgcaagcatgcctggatggcttccttcgtgtgatactggatggaggttctacacgtgtcttctctccaaatgatgcagctttattggaggaagatcttgaaaccctgaaggaattttttgtttctggtggagatggactgcctcgtggaactgttgaaaacttagtctcgcgtgtacgtcctgtaataaatctgatcaagcaagagacccgcgtgctcattgatgacctacgagaagttactcaaggtggcaagagcaaatttggagcggactccaaaaccctccttagggtcctgtgtcacagaaatgattcagaggcatcac

SEQ ID NO: 217703 - DNA, 992 bp, Zea Mays
agatcattgcgcaccaaaggggtctaagactgcagatcaattttttgcatttaaggttcctatgcgagatggagaattaaatagtctatgccgtggtcttgacaaggcattccaagtttatacacagctggttactgcacccctagttgataaagaagatttagctccgcctattcctgttcttactcgatataaaaaggagcttggaatcaaggcttttgtaaaaaaagaggtccaagaagttagaacagttgatgagaggaaagctagcgaaattactcagcttacaatgccaaagctttgtgttcgtcttaacagtctatattacggtatcagccagttgagtaagttggaggacagcattaatgagaggtgggctcggaagaaaagtgaaaacactaacatcagacgaaaaagtgaaaagtcaaagagtgccgtccctaatcagaagaatcaatttgatggcagcagaaaagaaatcaatactgctattgatcggacaaaggttatattctgggacctgcagcagccatttgttgagaatttatacagaaatggtgttgctcaagctcgattggacaccataactgaagtgcttgatttggtccttaatcaactttgtgatgtcattgtggaacaactgagggatcgtgtggttacagggcttctgcaagcatgcctggatggcttccttcgtgtgatactggatggaggttctacacgtgtcttctctccaaatgatgcagctttattggaggaagatcttgaaaccctgaaggaattttttgtttctggtggagatggactgcctcgtggaactgttgaaaacttagtctcgcgtgtacgtcctgtaataaatctgatcaagcaagagacccgcgtgctcattgatgacctacgagaagttactcaaggtggcaagagcaaatttggagcggactccaaaaccctccttagggtcctgtgtcacagaaatgattcagaggcatcac

SEQ ID NO: 217704 - DNA, 1893 bp, Zea Mays
tttcatagcccttccgccacactatagactccacctggttgtggctcaacgaagctctcttctatagccaccaactcaattgtatactgaactatgtcacgaggcagggatcctttggcattgagccaggtaattggtgatgtgttggatcctttcataaagtcagcaacgatgaggattaattatggtgacaaggagataacaaatggcactggactacgagcatctgctgttctcaatgcaccacatgttgagattgaaggccacgaccaaacaaagctctacacacttgttatggtggatcctgatgcaccaagtccaagcaaaccagagtacagggaatatctgcattggattggatgcagccctctcaaaaaggagggggtgtttttttccatccatcaacatctgaagaactcttgttagtatgctaatgggttggtaacagatataccagaggcaagagacatacgttttggtgggtaacaccttacctgacctctttttaccgaattagcatttaagacatggatctttaaaccatttttaggactacaacttcgaacattattgttgcacacaaagtgcaaacaactccagattcatgttgtatcaaaattaagtatacataatatgtggcatcttccactaaatataaacccaccagcactttgctcttggaattgtgacaatgaaataaacatgtggttagttaaatgtatgtcaaatgacaaaacatatgatgatagtaaaggatttaagtaactacagaagaaccactactgcaaatgtaacatgtagaatttgaagaaaaaaaaaactgctatgaaagatatggctttgacgaagtaactaccttggtgagaaaatggtcatgtgaatttcattttacaaagttgctatgtaacacatcatttacaatgaaacctttaaacatttatcttatgatgtgtgcatgttattatgcctggcatccatgattagtattacagatgatgtcaatatttgaagaaagatgcatgtgtggacttatagcaagtgcaagaattttgtagtggaactaaatctgtctaaattattccctactagttgcaagtggtgccatgtaaaataccagaatccaacatctacaccaaatactatctggccaagtgcatgctaggttaagcagttgcatggttgttatttgttcaacagcacctcaagttgaggatctgacatcatggcaacgaaatagttccctatgaaagcccaaggccaccagctggaattcatcgaactgtttttgtgctattcaaacaacaagctagacaaacagtttatgcaccaggatggcggccaaatttcaacatcagagacttctcagcaatttacaatcttggaccaccagttgctgcattatacttcaactgccaaaaggaaagcggtgttggtggcagaaggttcttgggatcaagctgaagaacagatacagagaaacatctacatcaaggcagtaccattcacaattcagtaatcaatccacataaaacagttgaaaagatatgaaacgttagttgacagttaagctctagagtaattgactcatattatatgaaacaaactagcatttggaggtcatcttcctatggtacccaccacaataaagatcacgatgttcatatgagaagaagtgttcatttacagcaactcattggtgtttaagttcaagtatcacaaaaccttaatgaggtatatatctgcttctgtttggtgggttctccgaagtccaaacagaaagggaaccatatcacatggacgtggccatcctgcgtgctcagatagcgcgccatctgacaactagcagattggccggcccatccttccagagttccaggttaccttctaagggcc

SEQ ID NO: 217705 - DNA, 3168 bp, Zea Mays
atttcatagcccttccgccacactatagactccacctggttgtggctcaacgaagctctcttctatagccaccaactcaattgtatactgaactatgtcacgaggcagggatcctttggcattgagccaggtaattggtgatgtgttggatcctttcataaagtcagcaacgatgaggattaattatggtgacaaggagataacaaatggcactggactacgagcatctgctgttctcaatgcaccacatgttgagattgaaggccacgaccaaacaaagctctacacacttgttatggtggatcctgatgcaccaagtccaagcaaaccagagtacagggaatatctgcattggattggatgcagccctctcaaaaaggagggggtgtttttttccatccatcaacatctgaagaactcttgttagtatgctaatgggttggtaacagatataccagaggcaagagacatacgttttggtgggtaacaccttacctgacctctttttaccgaattagcatttaagacatggatctttaaaccatttttaggactacaacttcgaacattattgttgcacacaaagtgcaaacaactccagattcatgttgtatcaaaattaagtatacataatatgtggcatcttccactaaatataaacccaccagcactttgctcttggaattgtgacaatgaaataaacatgtggttagttaaatgtatgtcaaatgacaaaacatatgatgatagtaaaggatttaagtaactacagaagaaccactactgcaaatgtaacatgtagaatttgaagaaaaaaaaaactgctatgaaagatatggctttgacgaagtaactaccttggtgagaaaatggtcatgtgaatttcattttacaaagttgctatgtaacacatcatttacaatgaaacctttaaacatttatcttatgatgtgtgcatgttattatgcctggcatccatgattagtattacagatgatgtcaatatttgaagaaagatgcatgtgtggacttatagcaagtgcaagaattttgtagtggaactaaatctgtctaaattattccctactagttgcaagtggtgccatgtaaaataccagaatccaacatctacaccaaatactatctggccaagtgcatgctaggtaaatttaataagacactatcgtctcatcagactttctggtttggttcaatctccttaattgccacgctcgcttattttgaatgcaatttcataattttcctaccttttggattcagcaccattcagcaattgagaagaatatgatagataattttattgaagactaaacatagagagaatcattttaatattgcatacctaataatcaatgcaaagcactttagagagaggggaacaacccccactctaatgtgactgcacctattttgatgcaggttaagcagttgcatggttgttatttgttcaacagcacctcaagttgaggatctgacatcatggtattttctgtgggacccacttgatcactttagtcagtgtggcaatacttacttctacaggaaatcaagtagatgggtattattacctgcttcattgcatgacaatatacaatactcaactaatgctatcttctgtatgggcccacagaaataaatgatgcatctataaatgaaacctgtgaagtgtccttcagaatttcaagtattagaacttagtgtttaaattaaatatggagattataaggtgtcaaaatgttccgcgacgtagatgtctccttcaggaagctttcaaccagatctcgaaagcactatatattagcatgatgatactaaacacatcaatggttatcgatcattatatgaaaaaaaaaactggattaacctagaaggaactaggtggcatgttactaagaacaaaataggcatccaaatttgcctccgtgaggacttgaacgggcataatccaaatcctcttatcatgttaggctggcagatagaaaaacttctgactgcaagaaaaaaaatcaagaacattttaaacaaatgaaataaaagtagcacacctcatccttttgtgaattattcatacttgatgaaacctaagcactacaaatggtctctctctctcacccactttgtgtatgcttaataatggggatattccacttgtacacaacatgtggtcaacttggatatttactttagtttagatgctataaggggctgcacttaatatgctataagtataaataaatccatcatcacaacctattgtgtgtgtgtttcttttttcttttggatgggtggggtgtgctgattttgtttttcttttgtgtgtgtgtgtgtgtgggaggggggtatagtgccaactgaatacaatgttgaggtgagcaggtagtgaaaaacagttagagtcattagtacaaaatggttagtgctagccttcaccttaaaaaatacagaaaaacattctaataaggaatgcacattttttcaggcaacgaaatagttccctatgaaagcccaaggccaccagctggaattcatcgaactgtttttgtgctattcaaacaacaagctagacaaacagtttatgcaccaggatggcggccaaatttcaacatcagagacttctcagcaatttacaatcttggaccaccagttgctgcattatacttcaactgccaaaaggaaagcggtgttggtggcagaaggttcttgggatcaagctgaagaacagatacagagaaacatctacatcaaggcagtaccattcacaattcagtaatcaatccacataaaacagttgaaaagatatgaaacgttagttgacagttaagctctagagtaattgactcatattatatgaaacaaactagcatttggaggtcatcttcctatggtacccaccacaataaagatcacgatgttcatatgagaagaagtgttcatttacagcaactcattggtgtttaagttcaagtatcacaaaaccttaatgaggtatatatctgcttctgtttggtgggttctccgaagtccaaacagaaagggaaccatatcacatggacgtggccatcctgcgtgctcagatagcgcgccatctgacaactagcagattggccggcccatccttccagagttccaggttaccttctaagggcc

SEQ ID NO: 217706 - DNA, 1214 bp, Zea Mays
aaacatttcatagcccttccgccacactatagactccacctggttgtggctcaacgaagctctcttctatagccaccaactcaattgtatactgaactatgtcacgaggcagggatcctttggcattgagccaggtaattggtgatgtgttggatcctttcataaagtcagcaacgatgaggattaattatggtgacaaggagataacaaatggcactggactacgagcatctgctgttctcaatgcaccacatgttgagattgaaggccacgaccaaacaaagctctacacacttgttatggtggatcctgatgcaccaagtccaagcaaaccagagtacagggaatatctgcattggattggatgcagccctctcaaaaaggagggggtgtttttttccatccatcaacatctgaagaactcttgttagtatgctaatgggttggtaacagatataccagaggcaagagacatacgttttggttaagcagttgcatggttgttatttgttcaacagcacctcaagttgaggatctgacatcatggcaacgaaatagttccctatgaaagcccaaggccaccagctggaattcatcgaactgtttttgtgctattcaaacaacaagctagacaaacagtttatgcaccaggatggcggccaaatttcaacatcagagacttctcagcaatttacaatcttggaccaccagttgctgcattatacttcaactgccaaaaggaaagcggtgttggtggcagaaggttcttgggatcaagctgaagaacagatacagagaaacatctacatcaaggcagtaccattcacaattcagtaatcaatccacataaaacagttgaaaagatatgaaacgttagttgacagttaagctctagagtaattgactcatattatatgaaacaaactagcatttggaggtcatcttcctatggtacccaccacaataaagatcacgatgttcatatgagaagaagtgttcatttacagcaactcattggtgtttaagttcaagtatcacaaaaccttaatgaggtatatatctgcttctgtttggtgggttctccgaagtccaaacagaaagggaaccatatcacatggacgtggccatcctgcgtgctcagatagcgcgccatctgacaactagcagattggccggcccatccttccagagttccaggttaccttctaagggcc

SEQ ID NO: 217707 - DNA, 1591 bp, Zea Mays
taacacacacatatatatacatggtgtggatgcaatctcaggttgatctagctagctagatgggcatgagcagcacacaagcagcagcgcagacacagcagcagcagcagcagctggttcctccaggctttcggttccatcccacagacgaagagctggtggactactacctcaggaagaaggtggcctcaagaaggatcgacctcaatgtcatcaaagatgtcgatctttacaagatagagccatgggatctccaaggtctcgatcagtacatatatctcttgctatatatatagcagtagcccctccgttcttttttatttgtcgtggttagtttagttcaaaaataaactaagggtagacaaatattcgagaacggagacactactgctatatacattctttcagagtatggtatatcacatcctcctacgacacatgcacattattattattagcagacaagtgcagactgggaggccctggtgaggaggagcagaacgagtggtacttcttcagccacaaggacaagaagtacccgacgggcacccggaccaaccgcgccactgccgccgggttctggaaggcaaccggcagagacaagcccatctacgccaacaagcagcggcagctggtgggcatgaggaagacgctggtgtactacaagggcagagctcccaatggccacaagtccgactggatcatgcacgagtaccgccttgaaaccaatgagaatggccctccacaggaggaaggatgggtagtatgcagggtgttcaaaaagcgactaccaacaacaagaagagaatctgaccatgatgcaccatgctggtatgtcgatgaagatggaaccttcatgcatgaccttaactcccccatgggtggactgccaccacaccacagcatcgcacagctgcacgaacaacacctccagatgctcaacaacagctacaagaggcgggaactcaagctgcaattccagatgccaagccatcatatcctcaatgccgccgccgccattcctcacgagctagagcccccatccttccattctcttttggtctcaccagaccatcatcaagctgctaaagcgcaccaccgtgctgttcagctcatggacgagcatgcagccgaccaggtcactgattggagagttctggacaagtttgttgcatctcagcttagtcacgacgatgcggccaagggtgtcgattatactgatgaaggagatatccttcagatcaatgagaagcaagctaccgagtatgcatcaacctcaacatccagcagccaagttgatccatggaagtgacggtgatcatgaaattaatcaaaaatactgcctcctcgtataaaatattatattaagagctacaataacgatgatcggatcaattgggacatataagtaatttgatctctacatagtacgtggcgtgtaaatgagactacatacatattgagttgtgtattggtgtactacttattattatatcccttcaggatgttgtactaataatatacttagcatatgcatgcacaccgcgtttctatatgaataataaagtcatggacaacttggaaacttcat

SEQ ID NO: 217708 - DNA, 1626 bp, Zea Mays
cccactcccactcccacagccggtctccctctacccacgcaacgaatacaatacaaacagagggaagggagcgagcgggaagccaaggtggggaaagcagggaagcgaggccaagtggagcggagcggggcttcggctgggttccgcgcgcggccgctcgctacttccagtgttccatggtgtgggtgtgggcggctgtggcgatagccggagcctgaagcggcgggtggtgtgtggtgggcgcaaggagccacacggagcaggccgccacggcgaggaggaggaggaagaggaggagatggtcgtctgctccacgcgcaagtcgttcaaggactcgctcaaggtgctcgaggccgacatccagcacgccaacaccctgtgagtgcccccggccccgtttccatcccggccgccccgaattcacgctcgccgcagctgccgcctgccgcagatcgatctccgcgggctccgcccgccccgattccatcctgaccgaaaccggggcggcgaaataaagttgctccagtgggtgggtggggtgggtatgctacagtggcggttgagctctcatgtcatgtcatgtcgtgtcacgccgcgcgcatgagcgagcggtgggcgccgacgatcgggctggcacaccacctgccttcctgacgcgtgccttccctcgtgctgactgctcgctcgctcaaacaactcgacagtgcagcggatttctcgagggactacgacggggcctgcctccagatgcgcatgtcctacagccccgccgcccacttcttcctcttcctcgtgcagtggaccgactgcagcctagccggcgcgctcgggctgctcaggatcctaatctacaaggtttatgtagatgggagtaccaccatgtcgacgcacgagaggaaagcgagcatcagggagttttatgctgttatctttccctccctgatgcaactgcccaaggggatcagcgacgtggacgaccggaggcagaaggcggcgtgcacggagaggtaccggaggagggacgaggacgagggcaagaggccggtttcggaggccgacatcgaaagggaggaagagtgcggcatctgcatggagatgaacggcaaggtggtgctgcccagctgcagccatgccatgtgcatcaagtgctaccgccaatggcgatcaagatcgcaatcctgccccttctgtcgggacagcctgaaacgagtgaactccggggacctgtggatgctcaccgactgccgggacgtggtcgacatggcgacggtgacgagggagaacatcaggcgtctgttcatgtacgtcgagaagctgcccctcgtcgccccggacaacatcttctacgcctacgattctcataggggtagagggtgttcctcgtcctagctaggacgtggctaaacgcttggaccggggtgcggactctgacgacagacctttttcagtctatctaactgggtgtacagtctgctcaggtcctgtaaatataatgtctgtgcatatttatggcttcaaatgccccgttgtttttcagctggatatatttgtgtctccaactgttctgctttttattttcttgcttactgccaagctgtgatgctcaagttttctggatggaatggt

SEQ ID NO: 217709 - DNA, 625 bp, Zea Mays
atgaggataagaacaagcgtgcacactgccgcgttctgccagccccgccccgcaacccgcagccgccccacgccgcaacccgcagccgccctggcaaccgcccgcatccgtggcttccatccggaaatctcggtcgcgatagcatcccgcaaccgccataatccccccaatctcgcgctcccctgtgctctgcggcctccacatttcacgcagccgatctctgctccctgcgccgtgttcgttcgcgaggttggggccgatgatggcggcggcggggcggactccgatttctgcggcggccaagtcggagacacaggcgacgcccggagaggcgctagcggaggcagccgggtcccacggctggctgcgcgagtacgtggaccgcctcgcgtcctcggcctcctccctctccgggcggtggagcgcgcggtggagccagggacaccacagccgcagccagagcaaccttgcgagattggggccagaacaatagctctatttgctatggaaccacctagacggcgtctatctccagcgagagcgataccgtcgaggcgcctatccgcgccggacacaacgtccgcagtgatgggcaacctccagggcctgaacggtgccaccgtag

SEQ ID NO: 217710 - DNA, 3251 bp, Zea Mays
aaagtaacctgtctctgtttggtcattatgctctaggatccttcaacttgacatcacaacaatcgttgaggaggtaaccaacttttctagactgcattgagattgtttttgtaccaaactgcaatgtgtgcttatctttgtgcttcaataaatggtgtatatattaggctcttgttcagttagtacgtctcggttttcttaaaatggtgatgttagtgtcttgtgagtaggtggagatgttctggggtcaggggtggtgatctgtgcttttcttttaaattatctgaagcataaccacacaaaagatgttccagagtttgccacaagaaagtatacatgctttttctgttaagtgatgattaatgacatgcttttctatgatgagcatagaaactatggattattctaggccaaattcaatagaggttctagagtctgacataggctatcattttggaatgcttttggacactcggtgtagatgttattttagtgtagcagtatattgtgtattgatgcccttcaatattggattatgagtcatttacttagtcattgttgtggtcaaagcaatatgatgaagaccaatatcatgctttgaatgactaaatcctgcatttctatgcaacgccatgctcagttttagatgagatccacttctccgtgttttcggctctgtttagcctgatactgacgaattcaggacagacaacaatagcagtctcgctctttgcgtccacaattatatttccagatctttatatttggtatatattattcttatgacagtcattgattatggtggatagtactttcattagttatgttcttgtatcttttttcctcatgttacatgcctgggatgtctaaagctgccatattggtctgattgatcttttagtgatatatagaaactgcaagatgttatccgtggacatctagaggtggcccatgcctcacggccaaagcagatcagatgagatttttttggtcttgtgtggttctttttaatctgctcacatgatacttcttattcattgccatccaatttaattaattgccctcgactgaattggttcctttgccattttacttaggaggataaaagaagacactaccttggcacatgcctgttgccacaatggacaaaagaagattagtgttgtgtgatattttttcattcctttgatctattgcatgctatttgtaccccaatcgacaaaatagatgagactcaattcaggagcaaatcaccagtcctgttcacaacccaattcactatggctaaaatatcaaacttatgctccttgaggtttgttttttcctgatcttcctttaatatctgatgactgatggactggtgagttcatgatctgcttcatgcttttcctttttatatatggtcactacctcactggttagttcatggtgctttttgtctacttctttgccccaaaaaatctcggggcgaatttcagcatgcttttcctctaggtgtaaagccacccactcgatcgatcaccatatctccctctaggtgttatttttaaatatgctttgttcagtgtaaatcgttgcttgcagatgctgctttcacaagacagacatcttgctttctatggagttgaaccaggatcaagcgaccttactggcccatttaaccaaggaatcatgcagccagaattgatgtgcaccattgccaatcctgttgatgttttgcacggagctattcacgacgcgtcaacaatgaaccatgtaattttacagagtgacgtactgacatatgtatatgcagttccatatgtgcttccaaaactgtcatctgtcacccatgcccacatcgttgttggcggagagcacgcaagtcatcgtgagttcgacctccatagtacatactaaagagctgtcgacgacatgacgaaccgtctcaaggatgccacagtcaggatgatgaaaattgaggcctacgaaaccctgcaaactttgggctcatccagcacctatagtggaaaatgcctaagctgcatttcggaggcatgataaggtctgctaatgtgcaatgtaagtttgtgcataaaaacaggagcacaagtgcataaccttggtataagcaaaatgatatttgtttagccatgtgttattttgtgttaagcatatgctcttttgtcgatgcaagtctgcaattaggggatgtgagttacagtgttgacctttgcaattaggggatctcaactatgatgtcccaacctacagtgttgacctttgcaagcagattgcagatctgctctgcatcaaacaacaaaaatgttgttttactccatataactgcatcccaagttgtcaagctccataatgcatgcatttataaaaatctgatattttgtatgtacatgaactctcatgctgttctcccccctcttttcagaagtccactgctattacataattttttttaccgcgtgctattagtttatgcaccaaaaaattattgattttcaccaataggtctaaagtcctggttgcaccatcagcaattgtagcagacacggtaacttttgtacataaatatttccctactattatccctacttaccaaattcattattggttccaagcatcttgaaagagaagtccattgtctctcttactgtcatctcagcatggctaacagaagcacgcaggtactgtggtgttgaataattcatttattatccattatacatgacttttcctttgaactgttgtcaattgttggccattagaaaatatatactatagtcgatgataacatatgcgcaaagattttatcgaataatttttgtgttctcgcaatgtacgtgcattgtattatataaatataaagtaggagtttctccaccttcctttaatcatgctgcttcttgctgagggtggcgtgaaaaggtcagcaacaagttccgctatggtggcgacagagaagacgggggaggctctggcgacattgtggcgacgacgagaagcgagcaaggatataaatcgatctgtttctttggaaattagatgtagtagaatatttacgcgatacaaatctcgtttctctatatatctatatctattacgtttctcatgtctctatttttattataatggtttgggaaaatgtcactcatcatctgctctaatctttcgaaattaggtgtagtggaatattattgcccgatattgctacactacaatagtgaaataatagtttttttgttttacataagccc

SEQ ID NO: 217711 - DNA, 2223 bp, Zea Mays
taacctgtctctgtttggtcattatgctctaggatccttcaacttgacatcacaacaatcgttgaggaggaggataaaagaagacactaccttggcacatgcctgttgccacaatggacaaaagaagattagtgttgtgtgatattttttcattcctttgatctattgcatgctatttgtaccccaatcgacaaaatagatgagactcaattcaggagcaaatcaccagtcctgttcacaacccaattcactatggctaaaatatcaaacttatgctccttgaggtttgttttttcctgatcttcctttaatatctgatgactgatggactggtgagttcatgatctgcttcatgcttttcctttttatatatggtcactacctcactggttagttcatggtgctttttgtctacttctttgccccaaaaaatctcggggcgaatttcagcatgcttttcctctaggtgtaaagccacccactcgatcgatcaccatatctccctctaggtgttatttttaaatatgctttgttcagtgtaaatcgttgcttgcagatgctgctttcacaagacagacatcttgctttctatggagttgaaccaggatcaagcgaccttactggcccatttaaccaaggaatcatgcagccagaattgatgtgcaccattgccaatcctgttgatgttttgcacggagctattcacgacgcgtcaacaatgaaccatgtaattttacagagtgacgtactgacatatgtatatgcagttccatatgtgcttccaaaactgtcatctgtcacccatgcccacatcgttgttggcggagagcacgcaagtcatcgtgagttcgacctccatagtacatactaaagagctgtcgacgacatgacgaaccgtctcaaggatgccacagtcaggatgatgaaaattgaggcctacgaaaccctgcaaactttgggctcatccagcacctatagtggaaaatgcctaagctgcatttcggaggcatgataaggtctgctaatgtgcaatgtaagtttgtgcataaaaacaggagcacaagtgcataaccttggtataagcaaaatgatatttgtttagccatgtgttattttgtgttaagcatatgctcttttgtcgatgcaagtctgcaattaggggatgtgagttacagtgttgacctttgcaattaggggatctcaactatgatgtcccaacctacagtgttgacctttgcaagcagattgcagatctgctctgcatcaaacaacaaaaatgttgttttactccatataactgcatcccaagttgtcaagctccataatgcatgcatttataaaaatctgatattttgtatgtacatgaactctcatgctgttctcccccctcttttcagaagtccactgctattacataattttttttaccgcgtgctattagtttatgcaccaaaaaattattgattttcaccaataggtctaaagtcctggttgcaccatcagcaattgtagcagacacggtaacttttgtacataaatatttccctactattatccctacttaccaaattcattattggttccaagcatcttgaaagagaagtccattgtctctcttactgtcatctcagcatggctaacagaagcacgcaggtactgtggtgttgaataattcatttattatccattatacatgacttttcctttgaactgttgtcaattgttggccattagaaaatatatactatagtcgatgataacatatgcgcaaagattttatcgaataatttttgtgttctcgcaatgtacgtgcattgtattatataaatataaagtaggagtttctccaccttcctttaatcatgctgcttcttgctgagggtggcgtgaaaaggtcagcaacaagttccgctatggtggcgacagagaagacgggggaggctctggcgacattgtggcgacgacgagaagcgagcaaggatataaatcgatctgtttctttggaaattagatgtagtagaatatttacgcgatacaaatctcgtttctctatatatctatatctattacgtttctcatgtctctatttttattataatggtttgggaaaatgtcactcatcatctgctctaatctttcgaaattaggtgtagtggaatattattgcccgatattgctacactacaatagtgaaataatagtttttttgttttacataagccc

SEQ ID NO: 217712 - DNA, 2542 bp, Zea Mays
attagccttactccattacaccctggcacaactaacagaccaaattgcacgaataagtgttgagataaaaaacttaaaagcggaaaggaatgccatggagtctcagttagctcgagaggaagaaagcttgaggagatgttctgataggttgaaggaaatggaaagcaagaatagtaagctactccaagcattacgaagtgctggtgctgataaaattattgaagcataccactgggtgcaagctaacaaaaagaatctcaggcaagaagtttacgggcctgttctccttgaggtaaatgttcaggataagcttcatgccacttacttggaagaccatgttccaaactatttatggaagtcattcatcactctggatgcttcggaccgtgactacattgctagagaaatgaagcagtatggcattcctgttctgaactacttagtgcgcgaaggcacaaggagacggccattaaacatcactccagagatggagcaacttgggatctactcccgacttgatcaagtatttcaagcccctgacactgtgaaagatgttttgattagtcaggcgggtttggatgattcgtacataggtacagatgaaactcatcgcagagcagatgaggtgtcaaagctaggcatctatgacttttggactccggataatcattatcgatggtccaaatcaagatatagtggttatatgtcagcatttgtagatgcaatccatccttctcgtctcttcaagagcaatctggatgtaagcggcattgaagatcttcgacttcagaaagaagaccatgtaacaaatattgaaggaatgcgtgaagctataaagacgcttcatagaaaacagagacagttagaagacgaagaggcaaatatacacaggcagaaggaagaaattattaatgcgatgagataccacaagaagacacgagaagagatacaaagacgtgttgatatcaaaaagcgaatactgaaggacatatccagagaagacgatgtagaatccagcacgagaaagcttgttaatcaggttgctaagataaatgatgagaggtttcatgcaatgataaaacttaaggatttgcttactgaagctgttgctctcaaatggagtcacacagaaaagaatatgactttaattgagctcgatacaaagatatgggagatggaaaagggtgtgaaaaaacttgaaaaggatgctaatcaggcggctagaaactacgaagattgtagaagaatcactcaggagcataggcggaggctgtctattgcaaaacagaatgcagagtcgatagccatgattactaaagaccttgaaaaagagttttgtgcgatgcccactaccttagaagagctcgaaactgcaatacaagatactgaatcagaggcaaattctatgctatttcttaaccaaaatgttttgcaggagtatcaaaaccggcaacatgagatagaatcaatctcaaataaacttaaggatgataagggtgaacatgagatctgctgttctgaaatcgaaacagtaaagggtaaatggcttccgactctgcggattcttgtttcaaaaataaacgacacattcagtcgtaactttcaagaaatggcagtcgctggagaagtttcactggatgagcacggtattgattttgatcactatggtattcttataaaggtgaaatttaggcaaactagtcagctgcaggtgctaagctctcatcaccaatctggaggggagcgatctgtatcgaccatcttgtatcttgtgtcacttcaagatcttaccaactgcccttttcgggttgttgatgagataaatcaaggaatggaccccataaacgagaggaaaatgtttcagcagcttgtcagagctgccagccaaattaacacgccgcagtgcttccttctgacgcccaagctcctacctgatctggagtacagcgatgcctgcagcattctcaacattatgaacggcccatggattgaggagccagcaaaagcttggagctccggtgattgttggaggacagtggtcagcgcagctggacactgagcgccgagtattttgccttggaccgtaggaggcttgtaaagtttagcgtgtagagctggatgcagcttttgggtggttaatttaagtttgtagttgtactacatgtaagtttaggaaagttaaggtagctggtggcattatcaatgtggaaccagatgttgagctgctcaaatcacttggcagcccttttgacacgggagggtaaggtactgtggaatgatccctaccctgtaccggccagtattcctggaagtgaccagtttacttaagtaattgttttgcagcggaaaagcagcaggcatgcaatgtctgtctacttgctgtgacaagtctgactcctttagggctttagtacttttgttaggagtagagatggaaggggattaaattaattggtagtaaaaaatgaataggaacggatttaatctcaatctccttcgattcaatgcaagggtgctgtttggttcaagaaatgtaacgcaa

SEQ ID NO: 217713 - DNA, 3717 bp, Zea Mays
aaacccgcccaatacccaaacccctccgctctacaatagccgaaaccctagcggccttgcgccggccatggcggcaccgcgcgccaccaagcgccccaagtttgcctccggcgcggcgccgccccagcgaggggaggacgactacgtgccggggaacatagtagagattgagctcttcaacttcatgacctacgaccgcctcgtctgctgccccggcccgcgcctcaacctcgtcgtcgggcccaacgggtctgggaagagctcgctcgtctgcgccatcgccctcggtctcgccggagaccccagcattctcgggagggcgtccagcgtgggtgcatttgtcaagagaggggaggttgccgggcacgtcaagatatctctccgcggggatacagctgacgacaagatctgcgttactaggaaaattgatacgaagaacaagtccgagtggctcctcaacggtgcaactgtcacaaaaaaggaagttattgacgtgattaagaaattcaatattcaagttaacaacttaactcagttcttgccacaagaccgggtatctgaatttgcaaagctaagtcccattcaacttctagaagagactgaaaaggctgttggtgaccctgatttacctattcagcatcgccaacttgtagagagaagtaaggaactgaaagcgtttgaagtggctataaggcaaaacgaacagactttgaataatttgaaggccctcaatgctgaacaagaaagagatgttgagcgtgttcgactaagagataatctccttagaaaggctgaatcaatgaagaagaaggtgccatggctgaaatacgacatgatgaagaaggaattcatagaagtgatacaagagaaggagaaaattgcaaagcaagaaatggaagaagcagctagagtctgggaagattcaaaaggccctattgacaaactcaagaaacacaaggcaactcatacttcaaatataaagaagataagcggccaagtaaatcaaaacatggacaaccgtcataaagttatggaccacgatttaaagctgaactgaaagctacatttgatgaaatggatgacctgaaaaagcaagaaaaatctcgccagcgaaggatcctgaaaactaaggaagatcttgctgctgctgaaaaggaacttgaagatctacagccttatgaacttcctaaagctgaaatggcacaactaacagaccaaattgcacgaataagtgttgagataaaaaacttaaaagcggaaaggaatgccatggagtctcagttagctcgagaggaagaaagcttgaggagatgttctgataggttgaaggaaatggaaagcaagaatagtaagctactccaagcattacgaagtgctggtgctgataaaattattgaagcataccactgggtgcaagctaacaaaaagaatctcaggcaagaagtttacgggcctgttctccttgaggtaaatgttcaggataagcttcatgccacttacttggaagaccatgttccaaactatttatggaagtcattcatcactctggatgcttcggaccgtgactacattgctagagaaatgaagcagtatggcattcctgttctgaactacttagtgcgcgaaggcacaaggagacggccattaaacatcactccagagatggagcaacttgggatctactcccgacttgatcaagtatttcaagcccctgacactgtgaaagatgttttgattagtcaggcgggtttggatgattcgtacataggtacagatgaaactcatcgcagagcagatgaggtgtcaaagctaggcatctatgacttttggactccggataatcattatcgatggtccaaatcaagatatagtggttatatgtcagcatttgtagatgcaatccatccttctcgtctcttcaagagcaatctggatgtaagcggcattgaagatcttcgacttcagaaagaagaccatgtaacaaatattgaaggaatgcgtgaagctataaagacgcttcatagaaaacagagacagttagaagacgaagaggcaaatatacacaggcagaaggaagaaattattaatgcgatgagataccacaagaagacacgagaagagatacaaagacgtgttgatatcaaaaagcgaatactgaaggacatatccagagaagacgatgtagaatccagcacgagaaagcttgttaatcaggttgctaagataaatgatgagaggtttcatgcaatgataaaacttaaggatttgcttactgaagctgttgctctcaaatggagtcacacagaaaagaatatgactttaattgagctcgatacaaagatatgggagatggaaaagggtgtgaaaaaacttgaaaaggatgctaatcaggcggctagaaactacgaagattgtagaagaatcactcaggagcataggcggaggctgtctattgcaaaacagaatgcagagtcgatagccatgattactaaagaccttgaaaaagagttttgtgcgatgcccactaccttagaagagctcgaaactgcaatacaagatactgaatcagaggcaaattctatgctatttcttaaccaaaatgttttgcaggagtatcaaaaccggcaacatgagatagaatcaatctcaaataaacttaaggatgataagggtgaacatgagatctgctgttctgaaatcgaaacagtaaagggtaaatggcttccgactctgcggattcttgtttcaaaaataaacgacacattcagtcgtaactttcaagaaatggcagtcgctggagaagtttcactggatgagcacggtattgattttgatcactatggtattcttataaaggtgaaatttaggcaaactagtcagctgcaggtgctaagctctcatcaccaatctggaggggagcgatctgtatcgaccatcttgtatcttgtgtcacttcaagatcttaccaactgcccttttcgggttgttgatgagataaatcaaggaatggaccccataaacgagaggaaaatgtttcagcagcttgtcagagctgccagccaaattaacacgccgcagtgcttccttctgacgcccaagctcctacctgatctggagtacagcgatgcctgcagcattctcaacattatgaacggcccatggattgaggagccagcaaaagcttggagctccggtgattgttggaggacagtggtcagcgcagctggacactgagcgccgagtattttgccttggaccgtaggaggcttgtaaagtttagcgtgtagagctggatgcagcttttgggtggttaatttaagtttgtagttgtactacatgtaagtttaggaaagttaaggtagctggtggcattatcaatgtggaaccagatgttgagctgctcaaatcacttggcagcccttttgacacgggagggtaaggtactgtggaatgatccctaccctgtaccggccagtattcctggaagtgaccagtttacttaagtaattgttttgcagcggaaaagcagcaggcatgcaatgtctgtctacttgctgtgacaagtctgactcctttagggctttagtacttttgttaggagtagagatggaaggggattaaattaattggtagtaaaaaatgaataggaacggatttaatctcaatctccttcgattcaatgcaagggtgctgtttggttcaagaaatgtaacgcaa

SEQ ID NO: 217714 - DNA, 3759 bp, Zea Mays
cttttttctgttgcctcccattttggctaccttctccccaaacccgcccaatacccaaacccctccgctctacaatagccgaaaccctagcggccttgcgccggccatggcggcaccgcgcgccaccaagcgccccaagtttgcctccggcgcggcgccgccccagcgaggggaggacgactacgtgccggggaacatagtagagattgagctcttcaacttcatgacctacgaccgcctcgtctgctgccccggcccgcgcctcaacctcgtcgtcgggcccaacgggtctgggaagagctcgctcgtctgcgccatcgccctcggtctcgccggagaccccagcattctcgggagggcgtccagcgtgggtgcatttgtcaagagaggggaggttgccgggcacgtcaagatatctctccgcggggatacagctgacgacaagatctgcgttactaggaaaattgatacgaagaacaagtccgagtggctcctcaacggtgcaactgtcacaaaaaaggaagttattgacgtgattaagaaattcaatattcaagttaacaacttaactcagttcttgccacaagaccgggtatctgaatttgcaaagctaagtcccattcaacttctagaagagactgaaaaggctgttggtgaccctgatttacctattcagcatcgccaacttgtagagagaagtaaggaactgaaagcgtttgaagtggctataaggcaaaacgaacagactttgaataatttgaaggccctcaatgctgaacaagaaagagatgttgagcgtgttcgactaagagataatctccttagaaaggctgaatcaatgaagaagaaggtgccatggctgaaatacgacatgatgaagaaggaattcatagaagtgatacaagagaaggagaaaattgcaaagcaagaaatggaagaagcagctagagtctgggaagattcaaaaggccctattgacaaactcaagaaacacaaggcaactcatacttcaaatataaagaagataagcggccaagtaaatcaaaacatggacaaccgtcataaagttatggaccacgatttaaagctgaatgcagaactgaaagctacatttgatgaaatggatgacctgaaaaagcaagaaaaatctcgccagcgaaggatcctgaaaactaaggaagatcttgctgctgctgaaaaggaacttgaagatctacagccttatgaacttcctaaagctgaaatggcacaactaacagaccaaattgcacgaataagtgttgagataaaaaacttaaaagcggaaaggaatgccatggagtctcagttagctcgagaggaagaaagcttgaggagatgttctgataggttgaaggaaatggaaagcaagaatagtaagctactccaagcattacgaagtgctggtgctgataaaattattgaagcataccactgggtgcaagctaacaaaaagaatctcaggcaagaagtttacgggcctgttctccttgaggtaaatgttcaggataagcttcatgccacttacttggaagaccatgttccaaactatttatggaagtcattcatcactctggatgcttcggaccgtgactacattgctagagaaatgaagcagtatggcattcctgttctgaactacttagtgcgcgaaggcacaaggagacggccattaaacatcactccagagatggagcaacttgggatctactcccgacttgatcaagtatttcaagcccctgacactgtgaaagatgttttgattagtcaggcgggtttggatgattcgtacataggtacagatgaaactcatcgcagagcagatgaggtgtcaaagctaggcatctatgacttttggactccggataatcattatcgatggtccaaatcaagatatagtggttatatgtcagcatttgtagatgcaatccatccttctcgtctcttcaagagcaatctggatgtaagcggcattgaagatcttcgacttcagaaagaagaccatgtaacaaatattgaaggaatgcgtgaagctataaagacgcttcatagaaaacagagacagttagaagacgaagaggcaaatatacacaggcagaagaaattattaatgcgatgagataccacaagaagacacgagaagagatacaaagacgtgttgatatcaaaaagcgaatactgaaggacatatccagagaagacgatgtagaatccagcacgagaaagcttgttaatcaggttgctaagataaatgatgagaggtttcatgcaatgataaaacttaaggatttgcttactgaagctgttgctctcaaatggagtcacacagaaaagaatatgactttaattgagctcgatacaaagatatgggagatggaaaagggtgtgaaaaaacttgaaaaggatgctaatcaggcggctagaaactacgaagattgtagaagaatcactcaggagcataggcggaggctgtctattgcaaaacagaatgcagagtcgatagccatgattactaaagaccttgaaaaagagttttgtgcgatgcccactaccttagaagagctcgaaactgcaatacaagatactgaatcagaggcaaattctatgctatttcttaaccaaaatgttttgcaggagtatcaaaaccggcaacatgagatagaatcaatctcaaataaacttaaggatgataagggtgaacatgagatctgctgttctgaaatcgaaacagtaaagggtaaatggcttccgactctgcggattcttgtttcaaaaataaacgacacattcagtcgtaactttcaagaaatggcagtcgctggagaagtttcactggatgagcacggtattgattttgatcactatggtattcttataaaggtgaaatttaggcaaactagtcagctgcaggtgctaagctctcatcaccaatctggaggggagcgatctgtatcgaccatcttgtatcttgtgtcacttcaagatcttaccaactgcccttttcgggttgttgatgagataaatcaaggaatggaccccataaacgagaggaaaatgtttcagcagcttgtcagagctgccagccaaattaacacgccgcagtgcttccttctgacgcccaagctcctacctgatctggagtacagcgatgcctgcagcattctcaacattatgaacggcccatggattgaggagccagcaaaagcttggagctccggtgattgttggaggacagtggtcagcgcagctggacactgagcgccgagtattttgccttggaccgtaggaggcttgtaaagtttagcgtgtagagctggatgcagcttttgggtggttaatttaagtttgtagttgtactacatgtaagtttaggaaagttaaggtagctggtggcattatcaatgtggaaccagatgttgagctgctcaaatcacttggcagcccttttgacacgggagggtaaggtactgtggaatgatccctaccctgtaccggccagtattcctggaagtgaccagtttacttaagtaattgttttgcagcggaaaagcagcaggcatgcaatgtctgtctacttgctgtgacaagtctgactcctttagggctttagtacttttgttaggagtagagatggaaggggattaaattaattggtagtaaaaaatgaataggaacggatttaatctcaatctccttcgattcaatgcaagggtgctgtttggttcaagaaatgtaacgcaa

SEQ ID NO: 217715 - DNA, 6578 bp, Zea Mays
cctgcccctgcccctgcccctgcaaccccgctccaccgcgcccgatctctatcgtcgacaccaccgcctccggcgaggccttttccgctcttgaggtttccacaggtgcctctcagccctccgcacactgcctcgtgggtttccccgagctcccctgccccaaaccctaaccctagctcctggcgtggggccgtgcaggttcattccctgctcaatcgggcgccccatttggcaccctctgcccccccacagacccgtagggttgcatttcaggaaacagcgtgtctcttttctggacttgggaatctgagaggatactgtgcagtttaatggcacacactgctgactatatgcacatataatgatgcatgggcaaaccatgcttctctggtctagtggctattgagctgtgctctatgggaggtattgctgaatgtggtgtgagcattgacactaaagcttcaccacgtcgagcagccatagagaaagctcaggacgagctcaggcaggaatatgatgttcgtgaagaacgaaggagagagcttgaatttctggagaagggaggcaatcccttggatttcaaacttggccatgtagcttcccttagtgtacagtccacttctgtgacagaacagatagctgaacaaaatgtgataagtgaggccaaaggtagttctgcatttgctacatcacctcatggggattctgttgaaagtaacgacaagccaggaaattcattgtgccgtgaaggcaatacagccgataatattacgcttttggatggagatgccagcagcatgggtgtggataaaattgtgaaacgtggaacaaagagaactaattcagctcaagctgagcagttcctgcactgtgatggtcagaacaatgcaaaagaagaagattctgggttgtaccgtcttggtccaaagagccaagcgtatgcacgacgtaggtcaaagcctatcagagagaatgcatatagtgtatctgttaggtatccaccaattcctccattaagttctcagcaaaaagatgtgacaggattaatcccagaaaccaagactgaggataatggtgtttcatccattggtgattcaaaaccgactagtcctaactctaaaaatttggtgacaaatgcatcattactgaatgataaggtggaaatggagacagaaaatgttcaagcaattcctgaaggcaatcaagcaccgaaaaatgagttatcaaacagcaacaatggtagtcctgctattgagatttcaccaaacagtgtgccggataattctcgtcttactgtaagtgatcagatggttactgcatttgtttctgtggaatccccagatgctatttcaaaagtagctgcttcaaggatagtttgttctctcccatatatatccaatgaaatattgaaagaagcacaaactcttgagaaggcaggtaataacccatctatggtaagtgtggttgacgttcatgcatatggtatggataacaatggtgcagcaccttactctgctgtgaaaagtgctagtttgaatgaaaatgaagttgatccaattcatgaatatgctgccaaagctgttactgaacatccagaccaaaatgagaatcttgtaccagtgaatgcagatgaaatggctgatgaaggcttgaataagatcctacctgatgacaaggatgacaagaaagattgtcaactggaagttagtagtgggcctgtcattttgaatgacagttctactcctgtctatcctgaatttagcaattccttttatgcaagagatggaacagaagtttctaacaatgcagtagattcaaaaaataacgcagaacagcttgcttcttctaatcagggaaaagggaacatggaggaatgcaaagattctgacggaaacaatgcaagtgaattgagtgttgcccaaaagctagtgtctgttattgtgccccctgcttcagacgcaggcgatgtgagtaattttgtagaaaatgatgttgataaatctagcagagatcaggagaaggtagcaaagaaggaatatgaagattctgtcgtggcaaagaaggatcacgaagatgctatcctcagaagggcacggtatatagaggcaaatattaagagggctggtgaatggtctctctgcaatatttctttagagaagaagcagaagagccactgggattttgttctggaggagatggtctggatggcaaatgacttcacacaggagcgtttgtggaaaaatacagttgcagcacagatgtcccattggatttcttctagaggtcgagcggtatttgaagaagcaagcattcagagaaagcagaaatctgttgctagagttctagccaatggtattatgaacttttggtgttcagtccatactttacgagctagtggtggtattcctaaaccaataaaaatcgagcaaccgaatgagctagaggaaaataagcttggtgggttcaaatccggaaaagcggatgaggagtgtttggagcaagaaaagtcgcgccagtctcctattcagagctttgcacttaggtttcttgagtataacattaatgcatctgaatttctgccattagccgaagcaccatcaactcctgacaggctaaatgattttggcattttgaaagcaaatctcttttatggcgtagcacccggtgcaatgcaggcatacagggagtctatggaccgtctccttatttataataacaagaaaattggtgacactgtactcaaggatgattatgagccatcaacatatgcatctgtcacagatgtccctatggagaatgcatatggagatgacgaaagtgaggcacacacctacttattgcctggagcttataatggtggtttggcatcaaaaaatagtcacaaaaagaagcaccatttgcctcagaggatgaatggcgcaaggtcatatgaaattggtgttgacagtccttacgaaccactgtatttggaaagtaaatcaggaaaccagcaactcttatcgaatggcaaacaaacagacttcctctccattcctataaaacgcatccgcacagcagctaggcagcgggttgtgagtccatttcctgctggtgcttctgggacccctcaattcacaaataaaacggacgcatctagtggagatacaaactcctgtcaagatgatcaaagttcattacatggagggtcattttctaggaagaatgcagatatagagtccactgttgattttgacaggcaattgttgtatgatggtagtgaggtgtcgacaaaatctaaaaagaagaaaaagactaagcacccagggtacaaggcactaccaaatgtgtccgaatcttgttcgttgagggctcctggaaagggcaattatgatcatagatctcagatcgatatgatagctcagtatgagcagaaggattatattaaaaagagacaggagacaaatgggaattttggtgttattgatttatcaacagtggttaatggcctacatgctgctaagaagcctaaattgttgaatcaagcaccagatatttcactggaagctcttaaaccaattggtccaatggcctctcttgctgcatcacaaatgagcaacatggcaaatcctacgagggttataaaaatcagcacccgtggaagaaaaagtaaaggactcaagatgcgagctggtcattcaggtcctggaagtccatggtcaagttttgaggatcaggctcttgttgtccttgtccatgatatgggtgaaaactgggaattggttagtgatgcccttaacagcatcatccaattgaagtgcatatacagaaggcctaatgagtgtaaggaacgccataaacttctcaccgatagaagttgtggcgacggtgctgacagcgctgatgactcaggctcatctcaacactatccttctgcattgcctgggattccaaagggtagtgcaaggcaactgtttcagcgccttcaaggaccgtttgaggaagggactctcaagacacacttcgagaaaataatattgcttggtcaaaaattgcatcaaactcgtagaaaggatgagatccatgagctgaggcaaaaaaatccacttcatacttctcatggttttgcactttctcaagcatgtccagggaacttatctggtgtcattttgacgccacttgacctttgcgatggaccttcgaactcggatgcacttacaggatccaatacaagtgggttaggtctttcaaacaataactgctctgttggtcctactcttcctacatcaaatatgaacttaagattaccaggttctcctggtatggttttgggaagcaattcaccattgcctttgaatgctccctctagggatgttcagaggtatggtgtgcctagaccaacctcgatacagggtgacgagcaatcaagaattcattataaccagatggtaaatggcagaaaccttcagcaacctggagttcctgttcctggtgtgttgccatctggtgttgatcggggtgcccgaatgatgccacctgcccatggtgttggaatcatggctggactaaatcgaggtacacctattactaggccaggttttccaaggcttggttctcttggaaacatgtcacccaccgatggtcaaggcttaaaaaatactgtaaacgttcatcctggtgccatactgggacctggaagtactatgttgaggccacgtgacccaatgcagatgtttagacctggccagaattcagaggagcatagacagatgatgatgccagagtttcagttacaagtctcgcaaggaaataatcatgctgtgcatttcagcggtccaccatattccaacactggggcatcttcacctgttcaatctttacctgcccagcagtcccaaccacatcagatgccacaacaatcacacatgtatggaaacacacaccttcttcatacccaaggaacaaaccagtcaaatccacagcaacagcaggcttatgctatgcgcttggccaaagagaggcatatgcaacagatgatgccccaacaacagcgtccattatctgttgccagtgcagtgtcagctgtacagaatggctcaccgatgcaacagcagagccaaggatctgcaacttgcgtaatcccagctacacagacacaacataagcagcaatatcctgcacaaaatgcacaagataactcaatgcttccccatcagccttcagccaccactacacataaacagaagaagcaacagggccagcagcagcctagacaaaatcaacagcaacgaaatcaaggcagtcaacaagctaagcttatgaagagtttaggccgagggaacatgatgcagcagagtcctgtggatgttattcaagcaagtggcatatcaacaagctgtaaagatcaagttcctgataagaatatgatgcaacagggtccagggcattttgttgtaagtaaaggatcaatcccattgatacctcaacctgggaatcaaccaaatgtatacacttctcagatgcctccgtctccaatgcagacaccggatattagtaatcagggtgcagtcaagggttcttccaaccatgccttgttaacttcccagcaaggttcactccatacgccttcacagttggcacagcagcagcagcagcaactacggttcatgaatccgtcacagaataatatgcaaaggttgataatgcaacagaatcggcatgtgaacacagatggcaggattgagttacctgctgaccaagtacagcataaccaggtaatgtcatctgcctcacttgcaagaagtacagattcaggcagcccaggaatctcatctataagccagcggaaacaagagtcatctcatgacccaagtgcaattacctcaacctcgcagctagctagctcacctcaagacacctttgttggaagtgatagggtgttgccatcatccagccaaagcatgccgcaaaggcaaatgtccggtggtgtgcctgtacatggatatggcattggtggccaggtgcagctacaacagtctcggcagcaactccagtctcagcagcagcagcagcagcagcagaggcctgttgtccaaggtggtgtatatgctcacccctcaaattcaggacaaggatgatgctgaaccatactgggcctgcatttctgaagagcctcccttccccttgtaaagttacctgtacaggcgtccgtgctgtggaagatgtgtgcggatgatagtgctctttattcccaactttgagctaactgtagcctcctcggtgtcaggtagataattatttctcctcaccattttggtgccacactgctaccttccatgtagtttgaccctaggttgctggaggtggttcttgtgagggcaaactccttgagtcgtcaaattgtaaccacgacactgggcccagttgtatatttttgccgttgaggtccatgttagaggcaatctcttttgtataagcctgtatattcagctcacaagccagtcaatgaatgcaaagcctttctttgcgtcaaaccaggaatgtaaaaagcttgagcgttttgcgtcgatcacttatcttaacttgtcgtattcaactccgtc

SEQ ID NO: 217716 - DNA, 3642 bp, Zea Mays
cccctgcccctgcaaccccgctccaccgcgcccgatctctatcgtcgacaccaccgcctccggcgaggccttttccgctcttgaggtttccacaggaaacagcgtgtctcttttctggacttgggaatctgagaggatactgtgcagtttaatggcacacactgctgactatatgcacatataatgatgcatgggcaaaccatgcttctctggtctagtggctattgagctgtgctctatgggaggtattgctgaatgtggtgtgagcattgacactaaagcttcaccacgtcgagcagccatagagaaagctcaggacgagctcaggcaggaatatgatgttcgtgaagaacgaaggagagagcttgaatttctggagaagggaggcaatcccttggatttcaaacttggccatgtagcttcccttagtgtacagtccacttctgtgacagaacagatagctgaacaaaatgtgataagtgaggccaaaggtagttctgcatttgctacatcacctcatggggattctgttgaaagtaacgacaagccaggaaattcattgtgccgtgaaggcaatacagccgataatattacgcttttggatggagatgccagcagcatgggtgtggataaaattgtgaaacgtggaacaaagagaactaattcagctcaagctgagcagttcctgcactgtgatggtcagaacaatgcaaaagaagaagattctgggttgtaccgtcttggtccaaagagccaagcgtatgcacgacgtaggtcaaagcctatcagagagaatgcatatagtgtatctgttaggtatccaccaattcctccattaagttctcagcaaaaagatgtgacaggattaatcccagaaaccaagactgaggataatggtgtttcatccattggtgattcaaaaccgactagtcctaactctaaaaatttggtgacaaatgcatcattactgaatgataaggtggaaatggagacagaaaatgttcaagcaattcctgaaggcaatcaagcaccgaaaaatgagttatcaaacagcaacaatggtagtcctgctattgagatttcaccaaacagtgtgccggataattctcgtcttactgtaagtgatcagatggttactgcatttgtttctgtggaatccccagatgctatttcaaaagtagctgcttcaaggatagtttgttctctcccatatatatccaatgaaatattgaaagaagcacaaactcttgagaaggcaggtaataacccatctatggtaagtgtggttgacgttcatgcatatggtatggataacaatggtgcagcaccttactctgctgtgaaaagtgctagtttgaatgaaaatgaagttgatccaattcatgaatatgctgccaaagctgttactgaacatccagaccaaaatgagaatcttgtaccagtgaatgcagatgaaatggctgatgaaggcttgaataagatcctacctgatgacaaggatgacaagaaagattgtcaactggaagttagtagtgggcctgtcattttgaatgacagttctactcctgtctatcctgaatttagcaattccttttatgcaagagatggaacagaagtttctaacaatgcagtagattcaaaaaataacgcagaacagcttgcttcttctaatcagggaaaagggaacatggaggaatgcaaagattctgacggaaacaatgcaagtgaattgagtgttgcccaaaagctagtgtctgttattgtgccccctgcttcagacgcaggcgatgtgagtaattttgtagaaaatgatgttgataaatctagcagagatcaggagaaggtagcaaagaaggaatatgaagattctgtcgtggcaaagaaggatcacgaagatgctatcctcagaagggcacggtatatagaggcaaatattaagagggctggtgaatggtctctctgcaatatttctttagagaagaagcagaagagccactgggattttgttctggaggagatggtctggatggcaaatgacttcacacaggagcgtttgtggaaaaatacagttgcagcacagatgtcccattggatttcttctagaggtcgagcggtatttgaagaagcaagcattcagagaaagcagaaatctgttgctagagttctagccaatggtattatgaacttttggtgttcagtccatactttacgagctagtggtggtattcctaaaccaataaaaatcgagcaaccgaatgagctagaggaaaataagcttggtgggttcaaatccggaaaagcggatgaggagtgtttggagcaagaaaagtcgcgccagtctcctattcagagctttgcacttaggtttcttgagtataacattaatgcatctgaatttctgccattagccgaagcaccatcaactcctgacaggctaaatgattttggcattttgaaagcaaatctcttttatggcgtagcacccggtgcaatgcaggcatacagggagtctatggaccgtctccttatttataataacaagaaaattggtgacactgtactcaaggatgattatgagccatcaacatatgcatctgtcacagatgtccctatggagaatgcatatggagatgacgaaagtgaggcacacacctacttattgcctggagcttataatggtggtttggcatcaaaaaatagtcacaaaaagaagcaccatttgcctcagaggatgaatggcgcaaggtcatatgaaattggtgttgacagtccttacgaaccactgtatttggaaagtaaatcaggaaaccagcaactcttatcgaatggcaaacaaacagacttcctctccattcctataaaacgcatccgcacagcagctaggcagcgggttgtgagtccatttcctgctggtgcttctgggacccctcaattcacaaataaaacggacgcatctagtggagatacaaactcctgtcaagatgatcaaagttcattacatggagggtcattttctaggaagaatgcagatatagagtccactgttgattttgacaggcaattgttgtatgatggtagtgaggtgtcgacaaaatctaaaaagaagaaaaagactaagcacccagggtacaaggcactaccaaatgtgtccgaatcttgttcgttgagggctcctggaaagggcaattatgatcatagatctcagatcgatatgatagctcagtatgagcagaaggattatattaaaaagagacaggagacaaatgggaattttgtggttaatggcctacatgctgctaagaagcctaaattgttgaatcaagcaccagatatttcactggaagctcttaaaccaattggtccaatggcctctcttgctgcatcacaaatgagcaacatggcaaatcctacgagggttataaaaatcagcacccgtggaagaaaaagtaaaggactcaagatgcgagctggtcattcaggtcctggaagtccatggtcaagttttgaggatcaggctcttgttgtccttgtccatgatatgggtgaaaactgggaattggttagtgatgcccttaacagcatcatccaattgaagggctttggatcttaattgttgtaaacttgcaatagtctattgctaat

SEQ ID NO: 217717 - DNA, 3663 bp, Zea Mays
cccctgcccctgcaaccccgctccaccgcgcccgatctctatcgtcgacaccaccgcctccggcgaggccttttccgctcttgaggtttccacaggaaacagcgtgtctcttttctggacttgggaatctgagaggatactgtgcagtttaatggcacacactgctgactatatgcacatataatgatgcatgggcaaaccatgcttctctggtctagtggctattgagctgtgctctatgggaggtattgctgaatgtggtgtgagcattgacactaaagcttcaccacgtcgagcagccatagagaaagctcaggacgagctcaggcaggaatatgatgttcgtgaagaacgaaggagagagcttgaatttctggagaagggaggcaatcccttggatttcaaacttggccatgtagcttcccttagtgtacagtccacttctgtgacagaacagatagctgaacaaaatgtgataagtgaggccaaaggtagttctgcatttgctacatcacctcatggggattctgttgaaagtaacgacaagccaggaaattcattgtgccgtgaaggcaatacagccgataatattacgcttttggatggagatgccagcagcatgggtgtggataaaattgtgaaacgtggaacaaagagaactaattcagctcaagctgagcagttcctgcactgtgatggtcagaacaatgcaaaagaagaagattctgggttgtaccgtcttggtccaaagagccaagcgtatgcacgacgtaggtcaaagcctatcagagagaatgcatatagtgtatctgttaggtatccaccaattcctccattaagttctcagcaaaaagatgtgacaggattaatcccagaaaccaagactgaggataatggtgtttcatccattggtgattcaaaaccgactagtcctaactctaaaaatttggtgacaaatgcatcattactgaatgataaggtggaaatggagacagaaaatgttcaagcaattcctgaaggcaatcaagcaccgaaaaatgagttatcaaacagcaacaatggtagtcctgctattgagatttcaccaaacagtgtgccggataattctcgtcttactgtaagtgatcagatggttactgcatttgtttctgtggaatccccagatgctatttcaaaagtagctgcttcaaggatagtttgttctctcccatatatatccaatgaaatattgaaagaagcacaaactcttgagaaggcaggtaataacccatctatggtaagtgtggttgacgttcatgcatatggtatggataacaatggtgcagcaccttactctgctgtgaaaagtgctagtttgaatgaaaatgaagttgatccaattcatgaatatgctgccaaagctgttactgaacatccagaccaaaatgagaatcttgtaccagtgaatgcagatgaaatggctgatgaaggcttgaataagatcctacctgatgacaaggatgacaagaaagattgtcaactggaagttagtagtgggcctgtcattttgaatgacagttctactcctgtctatcctgaatttagcaattccttttatgcaagagatggaacagaagtttctaacaatgcagtagattcaaaaaataacgcagaacagcttgcttcttctaatcagggaaaagggaacatggaggaatgcaaagattctgacggaaacaatgcaagtgaattgagtgttgcccaaaagctagtgtctgttattgtgccccctgcttcagacgcaggcgatgtgagtaattttgtagaaaatgatgttgataaatctagcagagatcaggagaaggtagcaaagaaggaatatgaagattctgtcgtggcaaagaaggatcacgaagatgctatcctcagaagggcacggtatatagaggcaaatattaagagggctggtgaatggtctctctgcaatatttctttagagaagaagcagaagagccactgggattttgttctggaggagatggtctggatggcaaatgacttcacacaggagcgtttgtggaaaaatacagttgcagcacagatgtcccattggatttcttctagaggtcgagcggtatttgaagaagcaagcattcagagaaagcagaaatctgttgctagagttctagccaatggtattatgaacttttggtgttcagtccatactttacgagctagtggtggtattcctaaaccaataaaaatcgagcaaccgaatgagctagaggaaaataagcttggtgggttcaaatccggaaaagcggatgaggagtgtttggagcaagaaaagtcgcgccagtctcctattcagagctttgcacttaggtttcttgagtataacattaatgcatctgaatttctgccattagccgaagcaccatcaactcctgacaggctaaatgattttggcattttgaaagcaaatctcttttatggcgtagcacccggtgcaatgcaggcatacagggagtctatggaccgtctccttatttataataacaagaaaattggtgacactgtactcaaggatgattatgagccatcaacatatgcatctgtcacagatgtccctatggagaatgcatatggagatgacgaaagtgaggcacacacctacttattgcctggagcttataatggtggtttggcatcaaaaaatagtcacaaaaagaagcaccatttgcctcagaggatgaatggcgcaaggtcatatgaaattggtgttgacagtccttacgaaccactgtatttggaaagtaaatcaggaaaccagcaactcttatcgaatggcaaacaaacagacttcctctccattcctataaaacgcatccgcacagcagctaggcagcgggttgtgagtccatttcctgctggtgcttctgggacccctcaattcacaaataaaacggacgcatctagtggagatacaaactcctgtcaagatgatcaaagttcattacatggagggtcattttctaggaagaatgcagatatagagtccactgttgattttgacaggcaattgttgtatgatggtagtgaggtgtcgacaaaatctaaaaagaagaaaaagactaagcacccagggtacaaggcactaccaaatgtgtccgaatcttgttcgttgagggctcctggaaagggcaattatgatcatagatctcagatcgatatgatagctcagtatgagcagaaggattatattaaaaagagacaggagacaaatgggaattttggtgttattgatttatcaacagtggttaatggcctacatgctgctaagaagcctaaattgttgaatcaagcaccagatatttcactggaagctcttaaaccaattggtccaatggcctctcttgctgcatcacaaatgagcaacatggcaaatcctacgagggttataaaaatcagcacccgtggaagaaaaagtaaaggactcaagatgcgagctggtcattcaggtcctggaagtccatggtcaagttttgaggatcaggctcttgttgtccttgtccatgatatgggtgaaaactgggaattggttagtgatgcccttaacagcatcatccaattgaagggctttggatcttaattgttgtaaacttgcaatagtctattgctaat

SEQ ID NO: 217718 - DNA, 6459 bp, Zea Mays
cccctgcccctgcaaccccgctccaccgcgcccgatctctatcgtcgacaccaccgcctccggcgaggccttttccgctcttgaggtttccacaggaaacagcgtgtctcttttctggacttgggaatctgagaggatactgtgcagtttaatggcacacactgctgactatatgcacatataatgatgcatgggcaaaccatgcttctctggtctagtggctattgagctgtgctctatgggaggtattgctgaatgtggtgtgagcattgacactaaagcttcaccacgtcgagcagccatagagaaagctcaggacgagctcaggcaggaatatgatgttcgtgaagaacgaaggagagagcttgaatttctggagaaggtttgcgttgtcatccttatggtttgcacactgaatttgcgtcagaacttttttccttgtttgtttacttattgttgcagggaggcaatcccttggatttcaaacttggccatgtagcttcccttagtgtacagtccacttctgtgacagaacagatagctgaacaaaatgtgataagtgaggccaaaggtagttctgcatttgctacatcacctcatggggattctgttgaaagtaacgacaagccaggaaattcattgtgccgtgaaggcaatacagccgataatattacgcttttggatggagatgccagcagcatgggtgtggataaaattgtgaaacgtggaacaaagagaactaattcagctcaagctgagcagttcctgcactgtgatggtcagaacaatgcaaaagaagaagattctgggttgtaccgtcttggtccaaagagccaagcgtatgcacgacgtaggtcaaagcctatcagagagaatgcatatagtgtatctgttaggtatccaccaattcctccattaagttctcagcaaaaagatgtgacaggattaatcccagaaaccaagactgaggataatggtgtttcatccattggtgattcaaaaccgactagtcctaactctaaaaatttggtgacaaatgcatcattactgaatgataaggtggaaatggagacagaaaatgttcaagcaattcctgaaggcaatcaagcaccgaaaaatgagttatcaaacagcaacaatggtagtcctgctattgagatttcaccaaacagtgtgccggataattctcgtcttactgtaagtgatcagatggttactgcatttgtttctgtggaatccccagatgctatttcaaaagtagctgcttcaaggatagtttgttctctcccatatatatccaatgaaatattgaaagaagcacaaactcttgagaaggcaggtaataacccatctatggtaagtgtggttgacgttcatgcatatggtatggataacaatggtgcagcaccttactctgctgtgaaaagtgctagtttgaatgaaaatgaagttgatccaattcatgaatatgctgccaaagctgttactgaacatccagaccaaaatgagaatcttgtaccagtgaatgcagatgaaatggctgatgaaggcttgaataagatcctacctgatgacaaggatgacaagaaagattgtcaactggaagttagtagtgggcctgtcattttgaatgacagttctactcctgtctatcctgaatttagcaattccttttatgcaagagatggaacagaagtttctaacaatgcagtagattcaaaaaataacgcagaacagcttgcttcttctaatcagggaaaagggaacatggaggaatgcaaagattctgacggaaacaatgcaagtgaattgagtgttgcccaaaagctagtgtctgttattgtgccccctgcttcagacgcaggcgatgtgagtaattttgtagaaaatgatgttgataaatctagcagagatcaggagaaggtagcaaagaaggaatatgaagattctgtcgtggcaaagaaggatcacgaagatgctatcctcagaagggcacggtatatagaggcaaatattaagagggctggtgaatggtctctctgcaatatttctttagagaagaagcagaagagccactgggattttgttctggaggagatggtctggatggcaaatgacttcacacaggagcgtttgtggaaaaatacagttgcagcacagatgtcccattggatttcttctagaggtcgagcggtatttgaagaagcaagcattcagagaaagcagaaatctgttgctagagttctagccaatggtattatgaacttttggtgttcagtccatactttacgagctagtggtggtattcctaaaccaataaaaatcgagcaaccgaatgagctagaggaaaataagcttggtgggttcaaatccggaaaagcggatgaggagtgtttggagcaagaaaagtcgcgccagtctcctattcagagctttgcacttaggtttcttgagtataacattaatgcatctgaatttctgccattagccgaagcaccatcaactcctgacaggctaaatgattttggcattttgaaagcaaatctcttttatggcgtagcacccggtgcaatgcaggcatacagggagtctatggaccgtctccttatttataataacaagaaaattggtgacactgtactcaaggatgattatgagccatcaacatatgcatctgtcacagatgtccctatggagaatgcatatggagatgacgaaagtgaggcacacacctacttattgcctggagcttataatggtggtttggcatcaaaaaatagtcacaaaaagaagcaccatttgcctcagaggatgaatggcgcaaggtcatatgaaattggtgttgacagtccttacgaaccactgtatttggaaagtaaatcaggaaaccagcaactcttatcgaatggcaaacaaacagacttcctctccattcctataaaacgcatccgcacagcagctaggcagcgggttgtgagtccatttcctgctggtgcttctgggacccctcaattcacaaataaaacggacgcatctagtggagatacaaactcctgtcaagatgatcaaagttcattacatggagggtcattttctaggaagaatgcagatatagagtccactgttgattttgacaggcaattgttgtatgatggtagtgaggtgtcgacaaaatctaaaaagaagaaaaagactaagcacccagggtacaaggcactaccaaatgtgtccgaatcttgttcgttgagggctcctggaaagggcaattatgatcatagatctcagatcgatatgatagctcagtatgagcagaaggattatattaaaaagagacaggagacaaatgggaattttgtggttaatggcctacatgctgctaagaagcctaaattgttgaatcaagcaccagatatttcactggaagctcttaaaccaattggtccaatggcctctcttgctgcatcacaaatgagcaacatggcaaatcctacgagggttataaaaatcagcacccgtggaagaaaaagtaaaggactcaagatgcgagctggtcattcaggtcctggaagtccatggtcaagttttgaggatcaggctcttgttgtccttgtccatgatatgggtgaaaactgggaattggttagtgatgcccttaacagcatcatccaattgaagtgcatatacagaaggcctaatgagtgtaaggaacgccataaacttctcaccgatagaagttgtggcgacggtgctgacagcgctgatgactcaggctcatctcaacactatccttctgcattgcctgggattccaaagggtagtgcaaggcaactgtttcagcgccttcaaggaccgtttgaggaagggactctcaagacacacttcgagaaaataatattgcttggtcaaaaattgcatcaaactcgtagaaaggatgagatccatgagctgaggcaaaaaaatccacttcatacttctcatggttttgcactttctcaagcatgtccagggaacttatctggtgtcattttgacgccacttgacctttgcgatggaccttcgaactcggatgcacttacaggatccaatacaagtgggttaggtctttcaaacaataactgctctgttggtcctactcttcctacatcaaatatgaacttaagattaccaggttctcctggtatggttttgggaagcaattcaccattgcctttgaatgctccctctagggatgttcagaggtatggtgtgcctagaccaacctcgatacagggtgacgagcaatcaagaattcattataaccagatggtaaatggcagaaaccttcagcaacctggagttcctgttcctggtgtgttgccatctggtgttgatcggggtgcccgaatgatgccacctgcccatggtgttggaatcatggctggactaaatcgaggtacacctattactaggccaggttttccaaggcttggttctcttggaaacatgtcacccaccgatggtcaaggcttaaaaaatactgtaaacgttcatcctggtgccatactgggacctggaagtactatgttgaggccacgtgacccaatgcagatgtttagacctggccagaattcagaggagcatagacagatgatgatgccagagtttcagttacaagtctcgcaaggaaataatcatgctgtgcatttcagcggtccaccatattccaacactggggcatcttcacctgttcaatctttacctgcccagcagtcccaaccacatcagatgccacaacaatcacacatgtatggaaacacacaccttcttcatacccaaggaacaaaccagtcaaatccacagcaacagcaggcttatgctatgcgcttggccaaagagaggcatatgcaacagatgatgccccaacaacagcgtccattatctgttgccagtgcagtgtcagctgtacagaatggctcaccgatgcaacagcagagccaaggatctgcaacttgcgtaatcccagctacacagacacaacataagcagcaatatcctgcacaaaatgcacaagataactcaatgcttccccatcagccttcagccaccactacacataaacagaagaagcaacagggccagcagcagcctagacaaaatcaacagcaacgaaatcaaggcagtcaacaagctaagcttatgaagagtttaggccgagggaacatgatgcagcagagtcctgtggatgttattcaagcaagtggcatatcaacaagctgtaaagatcaagttcctgataagaatatgatgcaacagggtccagggcattttgttgtaagtaaaggatcaatcccattgatacctcaacctgggaatcaaccaaatgtatacacttctcagatgcctccgtctccaatgcagacaccggatattagtaatcagggtgcagtcaagggttcttccaaccatgccttgttaacttcccagcaaggttcactccatacgccttcacagttggcacagcagcagcagcagcaactacggttcatgaatccgtcacagaataatatgcaaaggttgataatgcaacagaatcggcatgtgaacacagatggcaggattgagttacctgctgaccaagtacagcataaccaggtaatgtcatctgcctcacttgcaagaagtacagattcaggcagcccaggaatctcatctataagccagcggaaacaagagtcatctcatgacccaagtgcaattacctcaacctcgcagctagctagctcacctcaagacacctttgttggaagtgatagggtgttgccatcatccagccaaagcatgccgcaaaggcaaatgtccggtggtgtgcctgtacatggatatggcattggtggccaggtgcagctacaacagtctcggcagcaactccagtctcagcagcagcagcagcagcagcagaggcctgttgtccaaggtggtgtatatgctcacccctcaaattcaggacaaggatgatgctgaaccatactgggcctgcatttctgaagagcctcccttccccttgtaaagttacctgtacaggcgtccgtgctgtggaagatgtgtgcggatgatagtgctctttattcccaactttgagctaactgtagcctcctcggtgtcaggtagataattatttctcctcaccattttggtgccacactgctaccttccatgtagtttgaccctaggttgctggaggtggttcttgtgagggcaaactccttgagtcgtcaaattgtaaccacgacactgggcccagttgtatatttttgccgttgaggtccatgttagaggcaatctcttttgtataagcctgtatattcagctcacaagccagtcaatgaatgcaaagcctttctttgcgtcaaaccaggaatgtaaaaagcttgagcgttttgcgtcgatcacttatcttaacttgtcgtattcaactccgtc

SEQ ID NO: 217719 - DNA, 6547 bp, Zea Mays
cccctgcccctgcaaccccgctccaccgcgcccgatctctatcgtcgacaccaccgcctccggcgaggccttttccgctcttgaggtttccacaggtgcctctcagccctccgcacactgcctcgtgggtttccccgagctcccctgccccaaaccctaaccctagctcctggcgtggggccgtgcaggttcattccctgctcaatcgggcgccccatttggcaccctctgcccccccacagacccgtagggttgcatttcaggaaacagcgtgtctcttttctggacttgggaatctgagaggatactgtgcagtttaatggcacacactgctgactatatgcacatataatgatgcatgggcaaaccatgcttctctggtctagtggctattgagctgtgctctatgggaggtattgctgaatgtggtgtgagcattgacactaaagcttcaccacgtcgagcagccatagagaaagctcaggacgagctcaggcaggaatatgatgttcgtgaagaacgaaggagagagcttgaatttctggagaagggaggcaatcccttggatttcaaacttggccatgtagcttcccttagtgtacagtccacttctgtgacagaacagatagctgaacaaaatgtgataagtgaggccaaaggtagttctgcatttgctacatcacctcatggggattctgttgaaagtaacgacaagccaggaaattcattgtgccgtgaaggcaatacagccgataatattacgcttttggatggagatgccagcagcatgggtgtggataaaattgtgaaacgtggaacaaagagaactaattcagctcaagctgagcagttcctgcactgtgatggtcagaacaatgcaaaagaagaagattctgggttgtaccgtcttggtccaaagagccaagcgtatgcacgacgtaggtcaaagcctatcagagagaatgcatatagtgtatctgttaggtatccaccaattcctccattaagttctcagcaaaaagatgtgacaggattaatcccagaaaccaagactgaggataatggtgtttcatccattggtgattcaaaaccgactagtcctaactctaaaaatttggtgacaaatgcatcattactgaatgataaggtggaaatggagacagaaaatgttcaagcaattcctgaaggcaatcaagcaccgaaaaatgagttatcaaacagcaacaatggtagtcctgctattgagatttcaccaaacagtgtgccggataattctcgtcttactgtaagtgatcagatggttactgcatttgtttctgtggaatccccagatgctatttcaaaagtagctgcttcaaggatagtttgttctctcccatatatatccaatgaaatattgaaagaagcacaaactcttgagaaggcaggtaataacccatctatggtaagtgtggttgacgttcatgcatatggtatggataacaatggtgcagcaccttactctgctgtgaaaagtgctagtttgaatgaaaatgaagttgatccaattcatgaatatgctgccaaagctgttactgaacatccagaccaaaatgagaatcttgtaccagtgaatgcagatgaaatggctgatgaaggcttgaataagatcctacctgatgacaaggatgacaagaaagattgtcaactggaagttagtagtgggcctgtcattttgaatgacagttctactcctgtctatcctgaatttagcaattccttttatgcaagagatggaacagaagtttctaacaatgcagtagattcaaaaaataacgcagaacagcttgcttcttctaatcagggaaaagggaacatggaggaatgcaaagattctgacggaaacaatgcaagtgaattgagtgttgcccaaaagctagtgtctgttattgtgccccctgcttcagacgcaggcgatgtgagtaattttgtagaaaatgatgttgataaatctagcagagatcaggagaaggtagcaaagaaggaatatgaagattctgtcgtggcaaagaaggatcacgaagatgctatcctcagaagggcacggtatatagaggcaaatattaagagggctggtgaatggtctctctgcaatatttctttagagaagaagcagaagagccactgggattttgttctggaggagatggtctggatggcaaatgacttcacacaggagcgtttgtggaaaaatacagttgcagcacagatgtcccattggatttcttctagaggtcgagcggtatttgaagaagcaagcattcagagaaagcagaaatctgttgctagagttctagccaatggtattatgaacttttggtgttcagtccatactttacgagctagtggtggtattcctaaaccaataaaaatcgagcaaccgaatgagctagaggaaaataagcttggtgggttcaaatccggaaaagcggatgaggagtgtttggagcaagaaaagtcgcgccagtctcctattcagagctttgcacttaggtttcttgagtataacattaatgcatctgaatttctgccattagccgaagcaccatcaactcctgacaggctaaatgattttggcattttgaaagcaaatctcttttatggcgtagcacccggtgcaatgcaggcatacagggagtctatggaccgtctccttatttataataacaagaaaattggtgacactgtactcaaggatgattatgagccatcaacatatgcatctgtcacagatgtccctatggagaatgcatatggagatgacgaaagtgaggcacacacctacttattgcctggagcttataatggtggtttggcatcaaaaaatagtcacaaaaagaagcaccatttgcctcagaggatgaatggcgcaaggtcatatgaaattggtgttgacagtccttacgaaccactgtatttggaaagtaaatcaggaaaccagcaactcttatcgaatggcaaacaaacagacttcctctccattcctataaaacgcatccgcacagcagctaggcagcgggttgtgagtccatttcctgctggtgcttctgggacccctcaattcacaaataaaacggacgcatctagtggagatacaaactcctgtcaagatgatcaaagttcattacatggagggtcattttctaggaagaatgcagatatagagtccactgttgattttgacaggcaattgttgtatgatggtagtgaggtgtcgacaaaatctaaaaagaagaaaaagactaagcacccagggtacaaggcactaccaaatgtgtccgaatcttgttcgttgagggctcctggaaagggcaattatgatcatagatctcagatcgatatgatagctcagtatgagcagaaggattatattaaaaagagacaggagacaaatgggaattttgtggttaatggcctacatgctgctaagaagcctaaattgttgaatcaagcaccagatatttcactggaagctcttaaaccaattggtccaatggcctctcttgctgcatcacaaatgagcaacatggcaaatcctacgagggttataaaaatcagcacccgtggaagaaaaagtaaaggactcaagatgcgagctggtcattcaggtcctggaagtccatggtcaagttttgaggatcaggctcttgttgtccttgtccatgatatgggtgaaaactgggaattggttagtgatgcccttaacagcatcatccaattgaagtgcatatacagaaggcctaatgagtgtaaggaacgccataaacttctcaccgatagaagttgtggcgacggtgctgacagcgctgatgactcaggctcatctcaacactatccttctgcattgcctgggattccaaagggtagtgcaaggcaactgtttcagcgccttcaaggaccgtttgaggaagggactctcaagacacacttcgagaaaataatattgcttggtcaaaaattgcatcaaactcgtagaaaggatgagatccatgagctgaggcaaaaaaatccacttcatacttctcatggttttgcactttctcaagcatgtccagggaacttatctggtgtcattttgacgccacttgacctttgcgatggaccttcgaactcggatgcacttacaggatccaatacaagtgggttaggtctttcaaacaataactgctctgttggtcctactcttcctacatcaaatatgaacttaagattaccaggttctcctggtatggttttgggaagcaattcaccattgcctttgaatgctccctctagggatgttcagaggtatggtgtgcctagaccaacctcgatacagggtgacgagcaatcaagaattcattataaccagatggtaaatggcagaaaccttcagcaacctggagttcctgttcctggtgtgttgccatctggtgttgatcggggtgcccgaatgatgccacctgcccatggtgttggaatcatggctggactaaatcgaggtacacctattactaggccaggttttccaaggcttggttctcttggaaacatgtcacccaccgatggtcaaggcttaaaaaatactgtaaacgttcatcctggtgccatactgggacctggaagtactatgttgaggccacgtgacccaatgcagatgtttagacctggccagaattcagaggagcatagacagatgatgatgccagagtttcagttacaagtctcgcaaggaaataatcatgctgtgcatttcagcggtccaccatattccaacactggggcatcttcacctgttcaatctttacctgcccagcagtcccaaccacatcagatgccacaacaatcacacatgtatggaaacacacaccttcttcatacccaaggaacaaaccagtcaaatccacagcaacagcaggcttatgctatgcgcttggccaaagagaggcatatgcaacagatgatgccccaacaacagcgtccattatctgttgccagtgcagtgtcagctgtacagaatggctcaccgatgcaacagcagagccaaggatctgcaacttgcgtaatcccagctacacagacacaacataagcagcaatatcctgcacaaaatgcacaagataactcaatgcttccccatcagccttcagccaccactacacataaacagaagaagcaacagggccagcagcagcctagacaaaatcaacagcaacgaaatcaaggcagtcaacaagctaagcttatgaagagtttaggccgagggaacatgatgcagcagagtcctgtggatgttattcaagcaagtggcatatcaacaagctgtaaagatcaagttcctgataagaatatgatgcaacagggtccagggcattttgttgtaagtaaaggatcaatcccattgatacctcaacctgggaatcaaccaaatgtatacacttctcagatgcctccgtctccaatgcagacaccggatattagtaatcagggtgcagtcaagggttcttccaaccatgccttgttaacttcccagcaaggttcactccatacgccttcacagttggcacagcagcagcagcagcaactacggttcatgaatccgtcacagaataatatgcaaaggttgataatgcaacagaatcggcatgtgaacacagatggcaggattgagttacctgctgaccaagtacagcataaccaggtaatgtcatctgcctcacttgcaagaagtacagattcaggcagcccaggaatctcatctataagccagcggaaacaagagtcatctcatgacccaagtgcaattacctcaacctcgcagctagctagctcacctcaagacacctttgttggaagtgatagggtgttgccatcatccagccaaagcatgccgcaaaggcaaatgtccggtggtgtgcctgtacatggatatggcattggtggccaggtgcagctacaacagtctcggcagcaactccagtctcagcagcagcagcagcagcagcagaggcctgttgtccaaggtggtgtatatgctcacccctcaaattcaggacaaggatgatgctgaaccatactgggcctgcatttctgaagagcctcccttccccttgtaaagttacctgtacaggcgtccgtgctgtggaagatgtgtgcggatgatagtgctctttattcccaactttgagctaactgtagcctcctcggtgtcaggtagataattatttctcctcaccattttggtgccacactgctaccttccatgtagtttgaccctaggttgctggaggtggttcttgtgagggcaaactccttgagtcgtcaaattgtaaccacgacactgggcccagttgtatatttttgccgttgaggtccatgttagaggcaatctcttttgtataagcctgtatattcagctcacaagccagtcaatgaatgcaaagcctttctttgcgtcaaaccaggaatgtaaaaagcttgagcgttttgcgtcgatcacttatcttaacttgtcgtattcaactccgtc

SEQ ID NO: 217720 - DNA, 1247 bp, Zea Mays
ctcaaatttgggtgcctattcgcacaatgccatctaccctaggcaaatctcttttatggcgtagcacccggtgcaatgcaggcatacagggagtctatggaccgtctccttatttataataacaagaaaattggtgacactgtactcaaggatgattatgagccatcaacatatgcatctgtcacagatgtccctatggagaatgcatatggagatgacgaaagtgaggcacacacctacttattgcctggagcttataatggtggtttggcatcaaaaaatagtcacaaaaagaagcaccatttgcctcagaggatgaatggcgcaaggtcatatgaaattggtgttgacagtccttacgaaccactgtatttggaaagtaaatcaggaaaccagcaactcttatcgaatggcaaacaaacagacttcctctccattcctataaaacgcatccgcacagcagctaggcagcgggttgtgagtccatttcctgctggtgcttctgggacccctcaattcacaaataaaacggacgcatctagtggagatacaaactcctgtcaagatgatcaaagttcattacatggagggtcattttctaggaagaatgcagatatagagtccactgttgattttgacaggcaattgttgtatgatggtagtgaggtgtcgacaaaatctaaaaagaagaaaaagactaagcacccagggtacaaggcactaccaaatgtgtccgaatcttgttcgttgagggctcctggaaagggcaattatgatcatagatctcagatcgatatgatagctcagtatgagcagaaggattatattaaaaagagacaggagacaaatgggaattttggtgttattgatttatcaacagtggttaatggcctacatgctgctaagaagcctaaattgttgaatcaagcaccagatatttcactggaagctcttaaaccaattggtccaatggcctctcttgctgcatcacaaatgagcaacatggcaaatcctacgagggttataaaaatcagcacccgtggaagaaaaagtaaaggactcaagatgcgagctggtcattcaggtcctggaagtccatggtcaagttttgaggatcaggctcttgttgtccttgtccatgatatgggtgaaaactgggaattggttagtgatgcccttaacagcatcatccaattgaagggctttggatcttaattgttgtaaacttgcaatagtctattgctaat

SEQ ID NO: 217721 - DNA, 1197 bp, Zea Mays
ccatctaccctaggcaaatctcttttatggcgtagcacccggtgcaatgcaggcatacagggagtctatggaccgtctccttatttataataacaagaaaattggtgacactgtactcaaggatgattatgagccatcaacatatgcatctgtcacagatgtccctatggagaatgcatatggagatgacgaaagtgaggcacacacctacttattgcctggagcttataatggtggtttggcatcaaaaaatagtcacaaaaagaagcaccatttgcctcagaggatgaatggcgcaaggtcatatgaaattggtgttgacagtccttacgaaccactgtatttggaaagtaaatcaggaaaccagcaactcttatcgaatggcaaacaaacagacttcctctccattcctataaaacgcatccgcacagcagctaggcagcgggttgtgagtccatttcctgctggtgcttctgggacccctcaattcacaaataaaacggacgcatctagtggagatacaaactcctgtcaagatgatcaaagttcattacatggagggtcattttctaggaagaatgcagatatagagtccactgttgattttgacaggcaattgttgtatgatggtagtgaggtgtcgacaaaatctaaaaagaagaaaaagactaagcacccagggtacaaggcactaccaaatgtgtccgaatcttgttcgttgagggctcctggaaagggcaattatgatcatagatctcagatcgatatgatagctcagtatgagcagaaggattatattaaaaagagacaggagacaaatgggaattttgtggttaatggcctacatgctgctaagaagcctaaattgttgaatcaagcaccagatatttcactggaagctcttaaaccaattggtccaatggcctctcttgctgcatcacaaatgagcaacatggcaaatcctacgagggttataaaaatcagcacccgtggaagaaaaagtaaaggactcaagatgcgagctggtcattcaggtcctggaagtccatggtcaagttttgaggatcaggctcttgttgtccttgtccatgatatgggtgaaaactgggaattggttagtgatgcccttaacagcatcatccaattgaagggctttggatcttaattgttgtaaacttgcaatagtctattgctaat

SEQ ID NO: 217722 - DNA, 734 bp, Zea Mays
cggggcccatgcctcgcctcccgcgttctacccgcgcgctgtggtgaggtctccgtgggagagaaccagctccgtggacccggtctgttttacacataggcggagcaggccacttcgcgtgctgtcagtgcggtgttagactatgcaccgggtccacggttcagatcccgcgggacgcagagaggaggaggctttggcccgattcgcgcggcccggccccggatcgaacgatttgggggacgaggtgttctatttcacaaaagaggcaaaaaacaaaagccggaggaggtttccggcgctgcttccagcgccttgccgtcagcaccatgaggaagaagctggacacgcgtttccccgctcctcggattaaaaagatcatgcaaacagatgaagacgttggcaagattgctcaagctgtacctgttctagtgtccaaagcattggagctatttctgcaagatttatgtgataggacatatgatattacaattcggaagggggtcaagactgtgggttcttcccatttgaaacaatgcatacaaacgtacaatgtctatgacttcttgagggaagtagtcagcaaagttccagacattggtccttctgatgttattgctgatgataagcttggcaaaaggaggaaagccgaagaagatggaagtgaggaagaattgaagaggacaagaaataaaatttggtgaaataaccaatttcacccctgaaaatttactgga

SEQ ID NO: 217723 - DNA, 1617 bp, Zea Mays
cgactgccgatatcgccggcctcgatcccttctgcattcacaagccgcgcgcgcgcgtgggatcatcgaccagcagcttcttcccctcgtcgccattaaattcctcctcccggccgaccccgccaccaccgtctgcgcgccggccggcggtccgccactctgtcccgtccgatttcacgtcgcagaagcaagagagacaagcgtcgcatgcaatccaattgccttgctctggacgccgcgccaaggaagaagacgacccgttgggcttgcgacccagacacggcggtggcgatcggtgtgatctcagctctcactcttcttgtcgtcgtcctcgcgatggggagggtgaagctgaagatcaagaggctggaaaacaacagcgggagacaggtgacgtactccaagcggcgatcgggcatcctcaagaaggctaaggagctctccatcctatgtgacatcgacctaatgcttataatgttctcgcccacggacaaacccaccatatgcattggcgatagaagtaccctcgaggaagttgtagcgaaatatacacagttaacccctcaggagagagctaaaagggttcagacagtcgaggtagaatatgatgagtcgacaactgaaagcgagttatgtgatttcatttttccccccccttcatgtttctaatgctatttggatttcaataatttgacaggagctatcagcagagcttgtctcgttgcagggtcaggtggcggagcttcaaaagcgtgtcagtgattggagcgatcctgagaaagttgacaatatcgacaatataagagcaatggagcaatctctcaaagaaactattaatcatatccaaatccataaggggaacttcggaaagcaacatctaatcgggctacagtatgctgctacccagttccagaccgacatgcagttgcctctaggactgcccggcgagtcaggcccttcgtcgtggttccaaaacggcggcgctgatgggcaacaagccatgatgctaacggacgagtccggcctgctccatcagagagacattgcgcagggctatccaagctacttcagcacggtcaagcaggatcccgacaccggtggtagcagcagtgatcacgggcaggtggtgcttcaccatccgcagccgcccgacttcagccagaccgagtgcctgacgtcgctgcacctgccgtcgcagcagttcccgtacccacccttcgaccaccacggcctttacagcgaccgaattttcaggccagacgcagttgagctgcacgccggcggcgtcgccagtatggactttctcagcggtcagtacgacttgccgaggcctggcgatgatgccagcttccataactgggcgtcagctgcagcatgtagtgcaaccatgttcgaccagcaacagcaacagcagcatcagcatcaccagcaaccacaatcttcacctgcacaacaacaactctagcaactgcctcgttcgatcacgccgtttatcacagttcatctcagcaccaacaagtcatgatcggttgatcctatatatggtaaaaaaatcggagataatattgccctccaaaagacgagcaagtgaccgaggaacccggtactcagcatgtc

SEQ ID NO: 217724 - DNA, 1421 bp, Zea Mays
ctaaagaagactttcaagaaactagaccacgatgtaaatattcaagactttctaggctcgcgggttcagacagtcgaggtagaatatgatgagtcgacaactgaaagcgagagctatcagcagagcttgtctcgttgcagggtcaggtggcggagcttcaaaagcgtgtcagtgattggagcgatcctgagaaagttgacaatatcgacaatataagagcaatggagcaatctctcaaagaaactattaatcatatccaaatccataaggggaacttcggaaagcaacatctaatcgggctacagtatgctgctacccagttccagaccgacatgcagttgcctctaggactgcccggcgagtcaggcccttcgtcgtggttccaaaacggcggcgctgatgggcaacaagccatgatgctaacggacgagtccggcctgctccatcagagagacattgcgcagggctatccaagctacttcagcacggtcaagcaggatcccgacaccggtggtagcagcagtgatcacgggcaggtggtgcttcaccatccgcagccgcccgacttcagccagaccgagtgcctgacgtcgctgcacctgccgtcgcagcagttcccgtacccacccttcgaccaccacggcctttacagcgaccgaattttcaggccagacgcagttgagctgcacgccggcggcgtcgccagtatggactttctcagcggtcagtacgacttgccgaggcctggcgatgatgccagcttccataactgggcgtcagctgcagcatgtagtgcaaccatgttcgaccagcaacagcaacagcagcatcagcatcaccagcaaccacaatcttcacctgcacaacttcctgcagcaacaactctagcaactgcctcgttcgatcacgccgtttatcacagttcatctcagcaccaacaagtcatgatcggttgatcctatatatggtaaaaaaatcggagataatattgccctccaaaagtcagttgcatcttggaaaaaaaggagaccaactagaatataatgctactatagtatactatgaggttctacggcatagaccaatgcaactcgaatcaaatatcaccaggagtgtgcggtcaacgagttagctagtgtacactgtacactcgtaaacaacaagttccttggatttactacacccgtaggaagctcaaatattcagggacaagagttttttttattattttggttttttattctttttggttgggttgttttcaccattttttgtaaactatagctaagtggttttaggtgtttactagattatgagaaaactgactcccaaatattcttaggccaatattaaggggcggagctctcacagctccgcttccgatgagaatcactcccgtagagctaaatagtaaaaatctg

SEQ ID NO: 217725 - DNA, 1784 bp, Zea Mays
cgcgcgcgtgggatcatcgaccagcagcttcttcccctcgtcgccattaaattcctcctcccggccgaccccgccaccaccgtctgcgcgccggccggcggtccgccactctgtcccgtccgatttcacgtcgcagaagcaagagagacaagcgtcgcatgcaatccaattgccttgctctggacgccgcgccaaggaagaagacgacccgttgggcttgcgacccagacacggcggtggcgatcggtgtgatctcagctctcactcttcttgtcgtcgtcctcgcgatggggagggtgaagctgaagatcaagaggctggaaaacaacagcgggagacaggtgacgtactccaagcggcgatcgggcatcctcaagaaggctaaggagctctccatcctatgtgacatcgacctaatgcttataatgttctcgcccacggacaaacccaccatatgcattggcgatagaagtaccctcgaggaagttgtagcgaaatatacacagttaacccctcaggagagagctaaaaggaaactggagagcttagaggctctaaagaagactttcaagaaactagaccacgatgtaaatattcaagactttctaggctcgcgggttcagacagtcgaggggaacttcggaaagcaacatctaatcgggctacagtatgctgctacccagttccagaccgacatgcagttgcctctaggactgcccggcgagtcaggcccttcgtcgtggttccaaaacggcggcgctgatgggcaacaagccatgatgctaacggacgagtccggcctgctccatcagagagacattgcgcagggctatccaagctacttcagcacggtcaagcaggatcccgacaccggtggtagcagcagtgatcacgggcaggtggtgcttcaccatccgcagccgcccgacttcagccagaccgagtgcctgacgtcgctgcacctgccgtcgcagcagttcccgtacccacccttcgaccaccacggcctttacagcgaccgaattttcaggccagacgcagttgagctgcacgccggcggcgtcgccagtatggactttctcagcggtcagtacgacttgccgaggcctggcgatgatgccagcttccataactgggcgtcagctgcagcatgtagtgcaaccatgttcgaccagcaacagcaacagcagcatcagcatcaccagcaaccacaatcttcacctgcacaacttcctgcagcaacaactctagcaactgcctcgttcgatcacgccgtttatcacagttcatctcagcaccaacaagtcatgatcggttgatcctatatatggtaaaaaaatcggagataatattgccctccaaaagtcagttgcatcttggaaaaaaaggagaccaactagaatataatgctactatagtatactatgaggttctacggcatagaccaatgcaactcgaatcaaatatcaccaggagtgtgcggtcaacgagttagctagtgtacactgtacactcgtaaacaacaagttccttggatttactacacccgtaggaagctcaaatattcagggacaagagttttttttattattttggttttttattctttttggttgggttgttttcaccattttttgtaaactatagctaagtggttttaggtgtttactagattatgagaaaactgactcccaaatattcttaggccaatattaaggggcggagctctcacagctccgcttccgatgagaatcactcccgtagagctaaatagtaaaaatctg

SEQ ID NO: 217726 - DNA, 1559 bp, Zea Mays
ccatcttggacttttaagacagcgctgcggctgcgctcgatcgaaccaaaaaaaaaaagaaaggaaaatccacatgcaatgcaaaagatctcgacatatatcttacgatccgatgggcctacacgctgacacgccgacgcttttgggtcttgagtcttgaccccatgggccccgcccgcccgcccgccaagtgcgcgtctgcttcggatcttcgtcaccggataagccacctgcttccgatcgcacagccctatcaactctcctcgcctgccgtcgccgcctcgcgctctccgatcccgcgcatattctccaccagtagtcctctgctccgccacacccaccactgctagggcgccgcgccgcaggcccgcagccccctaatctccgagtgctgatcacgcggaaaccgatggcgctcctcgcgccgagcccgcgcgcgctccgcgtgcgggagaccgcggcggcggcgctcccgcactcatcggcgaccgctgcatgctcgaccgtcggcggcggggcggccaggcgggcgctgtggctgtgggacaacggcggcgggaccgggacggggaggaggaaggagcaccgggagagagtccggccggaggcgtactgctgggacgtgtccaggccggtggagatggaggagatcgacagcatcgagaagctcgatgatgcgctcaggtggtccgtcgagaacaaccagcccgtcgtcatcgactggatggcaggttggtgtcggaaatgcatctacctgatgcccagaatggagaagatggcaggagaatatcctgagttagtgtgacttcacctcagcagaatgtttttttcggcacaagtgaggttttacttcatcgatgtcaataaagttccacagggggtggtgaaaagaggaaatgtaactgtaagtcggcaaattcagagattgttgacaagatagtagttcattcaaaaggactaaaataatctgactgccttgcctttctgtgtgcaatactgcaaatctaccttcagagaatgcccactattcaggtgccactgcattttcttctgccaattcattcctttcttccaagaaaccgtgaatgccttgtaacttgaaaaacattgatcctaaaccgtgcattcatgttcagctatggaaggatggagagtggaaagcggaagtaataggaggccacaaagcttgtcttgtgatggatgaggttagagaaatgatcgagaataacaagtgactaaacacccaagttatgcaatagatgttgtactgtgtttgatgtaagtatagacatcagacgatctcttcatatactaagctgaaatcaaatcacgttttagttttgtactaagccaaacttgctgatttgaaccaagcttactgaaaaatgcattaacatctacgatatcaaacaaatctcaaaatacatttcatggtgtattttattaatcttgtttggtgttttagttgtttgtgcattttttcttttaacgtggtcaaagattaaaaaaaagtttgacttatgacaaaacaaaaatggattacaattgtaacaacaaag

SEQ ID NO: 217727 - DNA, 1505 bp, Zea Mays
ccatcttggacttttaagacagcgctgcggctgcgctcgatcgaaccaaaaaaaaaaagaaaggaaaatccacatgcaatgcaaaagatctcgacatatatcttacgatccgatgggcctacacgctgacacgccgacgcttttgggtcttgagtcttgaccccatgggccccgcccgcccgcccgccaagtgcgcgtctgcttcggatcttcgtcaccggataagccacctgcttccgatcgcacagccctatcaactctcctcgcctgccgtcgccgcctcgcgctctccgatcccgcgcatattctccaccagtagtcctctgctccgccacacccaccactgctagggcgccgcgccgcaggcccgcagccccctaatctccgagtgctgatcacgcggaaaccgatggcgctcctcgcgccgagcccgcgcgcgctccgcgtgcgggagaccgcggcggcggcgctcccgcactcatcggcgaccgctgcatgctcgaccgtcggcggcggggcggccaggcgggcgctgtggctgtgggacaacggcggcgggaccgggacggggaggaggaaggagcaccgggagagagtccggccggaggcgtactgctgggacgtgtccaggccggtggagatggaggagatcgacagcatcgagaagctcgatgatgcgctcaggtggtccgtcgagaacaaccagcccgtcgtcatcgactggtacgagagtgctagcttgttggttgttgcacatgttgccagacctgcaatgatctcactctactccattgacctgtctggttttcggatgttgattgtcattagagtagaatcgagatgatttttcgcctttattttatccgcatgcttaaatctaatatcatatctcatcggaagttgaggcgctgtctattgcttccaggatggcaggttggtgtcggaaatgcatctacctgatgcccagaatggagaagatggcaggagaatatcctgaagtgaggttttacttcatcgatgtcaataaagttccacagggggtggtgaaaagaggaaatgtaactagaatgcccactattcagctatggaaggatggagagtggaaagcggaagtaataggaggccacaaagcttgtcttgtgatggatgaggttagagaaatgatcgagaataacaagtgactaaacacccaagttatgcaatagatgttgtactgtgtttgatgtaagtatagacatcagacgatctcttcatatactaagctgaaatcaaatcacgttttagttttgtactaagccaaacttgctgatttgaaccaagcttactgaaaaatgcattaacatctacgatatcaaacaaatctcaaaatacatttcatggtgtattttattaatcttgtttggtgttttagttgtttgtgcattttttcttttaacgtggtcaaagattaaaaaaaagtttgacttatgacaaaacaaaaatggattacaattgtaacaacaaag

SEQ ID NO: 217728 - DNA, 2400 bp, Zea Mays
atggctcgccccgcgccccggcatgcggcatccccctccatccaggctccacccaacgctgccgcctgccgcctgccgcctgccgccgagaccctcgcgctcgtcgatcgccgtggaaatgcatctcgacagcgaccaccccgccggcgttcgtcccacgatacgggccccagggcctgcgccgccgcaccggcccggtcacgctcaacttctcgagcccccgcagcggccacgcggggaccggaggcgatcttccgggaggacgtcggtcacgccgccgccgagacgtacctcggctggttatcggtggatatgaggatatcacatcttattgcactccgtgtatatgctgttttactcatgcccggtttcatagaaggtcaggttattagaagtgtagtactgtagtctatggagaacaaccaagaaatgggtcagctaagtttaaagaaagtcacgtgctatatagcgtcctcgagcacttataacagtagatccagagaaattatgtgtgttggaattgtacatgcccagagataacagcaaatcaagtccgttgtggcatttgtaactggaggagcttggatcatcgggtaagtgacagtttcctcataaatcacactacattacagggtttgttcatggcgactttcctttattactaacgtggcttatatttattatatatatttagttactagtcatctgacggtacattgctacagtttatatatatatatatatatttattaaatataattatatatttatatataattatataaatataggtagaacttgattaaatgacatatttattaaaatataattatatttttattttcaaattattagtgtttgtacacacacaatatctatcttttacaaaacataaacgaacaagagctccactggttagatgaggggagcctgtattcaggcggctaaggttcgatccctcgctcgcttcattttttgggcatgcacaggaatagagttaatccgtgaatttgctggcgtgggagggggcatcgctgggcagacgacactcacgacgaaagtcgtgctttaaaggtatagggacaaggcatggagtggtctccttggaaggcggtttgcagacaggatttatagtagcttggattgattacaggtgctgatgccttaaagaattttgtgttgtatacaccaccgcatacatttaattcaccattatttttttgacctgtagttttattattaattttgagtaatgactggttggtttctctttgcttgactgccaaaatttaaatatgactggcagaaatttccctcgaggaacaataagtgacgtggtcagtgatggttctgaggcaatatcattcatttgtaacaatgttgttagctttgtaggagatcctactaaaatttacttgatgggtcaatcagcaggagcacatattgtggcctgcgtgctcttagagcaagcacttaaagaatctaagggagagagcacctattgtaatgtggttcaaataaaagtatgtttttgtttatctggagggtaagaacttgaaagcatggggatctgttttattatgtctgtaattttatattcttaatcatatattttattattaaatagcactagaacataaaatgattttatctgataaggcattaaaaatgcttgcaccatgcttgtataatgaaatctgatttatgaaactaggcctagcccttcacatctagaaaaggctagatttcttggattttcaggagtctaaattttgcattttacaacaatagcaacaaaatccttttagtaccaagcaagttggagtaagatagagttgaaatcaaataaaaaccagaagttaagtttcaggcatatggatagttgttctccacgcactcctattcaaagacaaacctttggttatatttcatcctttcaaatctctttttattgtctgttcctatttcaaattcggcctttccctgcctctctctccattgctatcacgccttagaattacaatacacattggtgtctctgaaggtctccattggatctgtccaaacatctccaccactgttggacaagttttactccaagtggtgttatctctagcctatcatatatatcatcattctgaacttgatcccttcttttattgacataaatcaaatgcaacatacgcatttccataacacttgccaacgtgtcgcttttttataggccaacattatgtatcacataacatagcaggtctaatagtcgttctataaaacttgacttttagtttctgtagtatcctcttgtcacatagaatgtcagatgcttgaccacttcatccaccttcctttgattctatagctaacatcttcatcagcattcccgtctattttctaaac

SEQ ID NO: 217729 - DNA, 2722 bp, Zea Mays
ccaccatgcaaatatgcaattcgccgccgctctaacaaaaaccccaacccgctacaccctcccggccgatggctcagtccacccctgatcccccggctttagtggcgatgacgttggcggagctagaggcagccatcgccgccctgcccggcaagtggggtgccctgcgggaggcgttcgatcgcctcgccgcctgctcaccctcgccgctccccttcgcctgggaggacctcgacggctacatctcctcgctccagtcgtcagtcgcgctgcggtttcgccaggtccgcgcactcgaggccgccggcgctgtacctgctgctgccgcgtcgttggtaactcgcggagatggaaagggagaaaaccaggagttggaggaggatgatgaattagatgaggatgtcgcggtggaagtggaggagaaggtcgcggtggaagtggaggaggaggccgatgaggagatacaggaagccgacagcgataagatttgcaatgatgaaaaggatgggaaggaggcgagagaggtggaagtggagaaggaggtggcggagttggagaaggccgatgaggatatgcaggaagccaacagcgacaagttttgcaatgatgaaaaggacgggaacgagacaagagaggtggaagtggaggacgaggtggcagaactggagaagaaggccgatttggagatgcaagaagttgactacgataaaatttgcaatgatgaaaaggacgagaaggggggcaaagaagaggtggtggaggaagagggagttgaggaggcatccaacatcaagattggcaatgagattaagtatgagaaggagtcaagggaggaggagcaggccagtaaggtgaatgagcaagatcctgacaaggagatgcaggtggttgataaggacaagctgaataccaaaggtgcttttaaggcttctcaggacaaggagaaggatcaggataccaacatggatgagacagtgaccaagatggcgtcttcagtgcagcacaaggagggggaggaggcttgcgacaggaagcagaaggaagcacagaaacaggaccttcatgagaaggtggaaggtaccaaaaatgctaaggaccagggtaatcgagctcttccacgcagatctgatgattgcactgtagcatgtgcatacatggatgccaagaggttggtcaagctcgtatgcaccaacactgacctcaaatcagagcttcatgctgcatttcgctgtgctccagatgctgcagcagtcgctctccacgtagttgagttattcctacacaacaagacatttgttaggaccaacaaggtctgggcaaactgtgttgagctagttcaaatggtacctgtatttgttaccaagccttctgcagacacgactgagcaggccaagcggatggctaaggattggaaggagatgattgacagtccagagagttgctatgttcttggcagcctagcctcgtggggcctcctttactttcttatctcctataacattgtaactgagtttgacatgaaggagatcttccgtctctttggtaacatccctttcaaacagaagaagaaatctgccatgctcttaaaaggtcttgggctcagcaatagaatcccagagttaatggactatttgatcggaaacggacaacaaatggatgttttatgtttggcacgtgttcttaacatggtggacaagtatcctccactttctcttctgaagggatatgtcgaaaaggcaaaacaaactgctatggaaatatctcaaaagaatatgacacgccaattgagggtagttataataaaggagcttgatgatctaagaagggctcattttttggttaagaaggaaatcacgaacaccaacctctgcaccagtatcagggaagaaatcaacattttgttaggtgagcttgaaaaaaagaagcggggtttagcaaatcccttgacagcctcaacttcaaattcacagcagcgacaaacaaagattaacaagaagcgcaaggtaatgcagaagcaggagcatcacaaaggacaagaagaccggatgcaagggcaactgagtgggctggcagagaagcccgagaagaaacaaaggaagccccaacaggagcagcaacaggaacaagaaaataagccggaagagaagaaacagaaacaagaagatgggccagaagagaagaaaccgaaacacgaatataagccagaagagaagaaacggaaacaagaagataagtcagaagagaagcagcaacagaaaaagcagaaacatcataaatggctgaggcaacgcactcccatgctacctgcacagggttaccctgcaatgtggaacgcagcaatgaggagcgacttggagcctccaccatatgccgcgacgcatggagtccatcatggttaccaccaccctgtccagccaggctggcctggggttcattgcgcatcgccgttcataggaccctctacaccctggtaccctcctcctcagttctatcccaggtagcagtacctgctgtgttgaggggtgttgctccatcgcccagtataacatggattacgcgcaggagttcagttaggactttggagaaatagagtgttcttttgcaacatggtgtatgtacagttgccagtcacttgcatcgattcgttgaagaactttatacgggtagccttatagtctggtctctggtcacgttcacgtatgacgtattcagccaagtgccg

SEQ ID NO: 217730 - DNA, 3722 bp, Zea Mays
atcagcatcgccctcccttctccgctgttccgtcccatccggctgccatggtgaggaagaaaaggactggccctggagagagttctggggagacttctggagcgcctggtcagggctcctcacagcgtcctcaggcaacacaacagggtgcccgaggtggaggacaacaccaggtgcgtggtggatatccgggccatggagtgccgccttcagagcacccaggtggtgggccgcctgagtatcaaccacgtggctatcagggacgtggcgttccacctttacttcctggtggtgggccgcctgagcctcaaccgcgtggctaccagggacatggtggataccagggccgtggcgggccaccttcacagcatcctggtggtgggccatcacctgggtctcagcctcgtggctaccagggacgtggtggtctgcgtcccagagggggagtgccgcagccataccgtggcgggcatgtgggaggtagtgttggaccaattgttccttcaggtccgtctagaccagttcccgagctgcaccaagccccagatgtccaacatcaagcccctgtggtggcagcaccatcaccaccgggagctggctcgtcctcgcagcctgggatggccgaggtgagcactggacaagtccagcaacttgtgattcatgaccaaagttcagccagccaagttagtcaggtagcaccagcatcaagcaaagctgttagattcccattgcgccctggcaagggtacgcatgggtccaggtgcatcgtgaaggcaaatcatttctttgctgagctgcctgataaagacctccaccaatacgatgtatcaataacacctgtggttccttcacgtggtgtcaatcgtgctgtcatgaaagagcttgtaaaccttcatagacactcccatttggatgggcgtctgcctgcatatgatggaaggaagagtctttatacagctggagcattgccatttacttcgaagacattcgaaattactctgcaagatgaagaaaacagtcttggtggaggacaaagacaccaaaggggccagagggtctttcaggtggtgatcaaatttgctgctcgcgctgatctccaccatttggctatgtttctagctgggaggcaaccagatgctcctcaagaggctattcaagtacttgacattgtactacgtgaatttcctactgccaggtattgtcctgttggtagatcattttattctcccaatttagggagacgccagcaacttggtgaaggtttggaaacttggcgtggtttctatcaaagcataaggcccacacagatgggtctttctctgaatattgatatgtcctctactgcatttattgagcccctccctgtgattgattttgttgctcagcttcttgacagagatatctcagttagaccattgtctgattctgatcgtgtgaagattaaaaaagccctacgaggtgtgaaagtcgaggtcacacaccgtggaaacatgcgtaggaagtatcggatatctggcctcacttcacaagcaacaagggagttatcattccctattgatgatcgtggtactgttaagactgtggtgcaatacttcctggagacttatggctttaatattcagcacaccactttaccttgtttgcaagtgggcaatcagcaaagaataaattatctgcctatggaggtctgtaagatagttgagggacagcgttactcaaaacgactcaatgagaaacagatcactgctctactgaaggtgacttgccagcgtccccaagagcgtgagaaagccatcttgcagactgtgcatcacaatgcctactccgaggatccttatgcccaggaatttggtataaagattgatgagcgtcttgcatccgttgaagctcgtgttctgcctcctccaaggctgaaataccatgatagtggcagagagagggatgtattgccaagagttgggcagtggaatatgatgaataagaaaatggtcaatggtggtagagttagcagctgggcatgcattaacttctcacgaaatgtgcaagatggtgctgctaggagtttctgtcatgatctcgctttgatgtgccaagtatcaggaatggattttgcacttgaacctgtgctgccccctgtctatgcgaggcctgaacatgttgaaagagcactaaagagactttatcaagatgccatgagcatactcaggcctcagggccgagagcttgacttgctgatggtaatactgcctgacaataatggctctctttacggggatcttaaaaggatatgtgagactgatcttggattggtctcccaatgctgtctgactaaacatgttttcaaggcgaacaagcatcagtatcttgcaaatgttgccctgaaaataaatgttaaggttgggggaaggaatactgtacttgttgatgctttggcaaggagaatcccccttgtcagtgacgtagctactattatctttggtgctgatgtgacccatccccatcctggggaagattctagtccttccattgcagctgtggttgcttctcaagactggcctgaggttacgaagtatgcaggattagtgagtgctcaaacccatcgccaagaattgatacaggatcttttcaacgtacggcaagatccccaaaggggggctgtctctggtggcatgattagggaacttctcatttctttctggagggcgactggacaaaaacccaagaggatcatattctacagggatggtgtcagtgagggacagttctaccaagttctgttgtacgaacttgatgccattagaaaggcctgtgcatcattggagtctgattaccagcctccagttacctttgtcgtggtccagaagcgtcatcacaccaggttgtttgttaataatcacaatgatcagcgtgctgccgatagaagtggcaacatactgccgggcactgtggtggactcgaagatttgccatccaaccgagtttgatttctacctgtgcagccatgctggcattcagggaacaagccgtcctgcccattatcatgttctgtgggatgagaacaaatttacggctgatgggttgcaaactctcaccaacaacttgtgttacacgtatgccaggtgcacacgctcagtatcaatcgttcctcctgcatactatgctcatctggcagccttccgagctcggttttacatggagccagatacaagtgacagcggatctgtggcgagcggtgctacgacaagccgtggccctccaccaggggcgcgcaacaccagggctggtgctgcgaatgttgctgtgaggccattacctgctctcaaggaaaacgtgaagcgcgtcatgttctactgctaagattgacgctgcgctgatgctgtgagcaagcaattatcgttatggtggtgatgctaggacaccgttatgcaccggtaactttaataccttttgtactgtaactacttgtatggcattggaaactgtttgcgatatactcctattaagatgggcttgtcgtggattagattgcactattggaagccatcaatccagttctcatctgaaaattatgtaggtacgtacggtattacaacctctctctatctccctcccaatacagtacagaaaggacgcaattcttgatttcagatagacagtatctgttaggcaggtacttgttgcttgactgttcttcatatagatcgttggtaaagtatcggttac

SEQ ID NO: 217731 - DNA, 1758 bp, Zea Mays
gtgtgtgcaatcactctgaaaatggtcaatggtggtagagttagcagctgggcatgcattaacttctcacgaaatgtgcaagatggtgctgctaggagtttctgtcatgatctcgctttgatgtgccaagtatcaggaatggattttgcacttgaacctgtgctgccccctgtctatgcgaggcctgaacatgttgaaagagcactaaagagactttatcaagatgccatgagcatactcaggcctcagggccgagagcttgacttgctgatggtaatactgcctgacaataatggctctctttacggggatcttaaaaggatatgtgagactgatcttggattggtctcccaatgctgtctgactaaacatgttttcaaggcgaacaagcatcagtatcttgcaaatgttgccctgaaaataaatgttaaggttgggggaaggaatactgtacttgttgatgctttggcaaggagaatcccccttgtcagtgacgtagctactattatctttggtgctgatgtgacccatccccatcctggggaagattctagtccttccattgcagctgtggttgcttctcaagactggcctgaggttacgaagtatgcaggattagtgagtgctcaaacccatcgccaagaattgatacaggatcttttcaacgtacggcaagatccccaaaggggggctgtctctggtggcatgattagggaacttctcatttctttctggagggcgactggacaaaaacccaagaggatcatattctacagggatggtgtcagtgagggacagttctaccaagttctgttgtacgaacttgatgccattagaaaggcctgtgcatcattggagtctgattaccagcctccagttacctttgtcgtggtccagaagcgtcatcacaccaggttgtttgttaataatcacaatgatcagcgtgctgccgatagaagtggcaacatactgccgggcactgtggtggactcgaagatttgccatccaaccgagtttgatttctacctgtgcagccatgctggcattcagggaacaagccgtcctgcccattatcatgttctgtgggatgagaacaaatttacggctgatgggttgcaaactctcaccaacaacttgtgttacacgtatgccaggtgcacacgctcagtatcaatcgttcctcctgcatactatgctcatctggcagccttccgagctcggttttacatggagccagatacaagtgacagcggatctgtggcgagcggtgctacgacaagccgtggccctccaccaggggcgcgcaacaccagggctggtgctgcgaatgttgctgtgaggccattacctgctctcaaggaaaacgtgaagcgcgtcatgttctactgctaagattgacgctgcgctgatgctgtgagcaagcaattatcgttatggtggtgatgctaggacaccgttatgcaccggtaactttaataccttttgtactgtaactacttgtatggcattggaaactgtttgcgatatactcctattaagatgggcttgtcgtggattagattgcactattggaagccatcaatccagttctcatctgaaaattatgtaggtacgtacggtattacaacctctctctatctccctcccaatacagtacagaaaggacgcaattcttgatttcagatagacagtatctgttaggcaggtacttgttgcttgactgttcttcatatagatcgttggtaaagtatcggttac

SEQ ID NO: 217732 - DNA, 741 bp, Zea Mays
atgagaagagatcgccaaattttaaaggatgtgatagaagactttgctggaggtgtaggggcgagctcggagtttgtcatgcacactttgaatgtcaattgtgccaagtttggaaggcgagcatcaaggatcctcatcactggtggggaggatttgaaggtcaatctttgggctatagggaaacccggtgccctcctgagtctatcaggctttataagtccagttgagtcagtaagctttgactcttctgaagttacgataggtgctggtgcagcaagtggaacgataaaaatatggaatattgaggaggcgaaagttgttcgaactttcactggacacagatcaagctgtgcatctcttgatttccatccttttggagaattcttagccactgggtcttcaaatacaaacatgaaaatatggaatactcgacagaagagatgcatccacacatacaagggtcatacccaacgaattaatgtgcttaaatttactcatgatggccgatggattgtttctggtggggctgataactcagtgaaggtctgggatttgacggctggaaaactcatgcatgatttttgtcttcatgaaggtccagtcaactgcttagatgttcacccctatgagtttttattggctacaggttcagttgataagactgttaaattttgggaccttggaacttttgagttgatcagttcttctggacccgaggttttcttttcctaggatataatt

SEQ ID NO: 217733 - DNA, 897 bp, Zea Mays
ccatcctctacgtccccacgcgcgcggcgctctgtcacattcccgactcgataaacccttctctcgtccgcctccgcgcctcactccctctcctcctctgcttcgtcttccccacccgcggcgcgcagcacacccaaaaccgtaaccctagattgcaagaggacatgaccagcaagtttgggctcgccggcggcatcccggagcggcgggtgagaccgatctgggacgcagtcgactcacgccagtacaagcccgcgctcaagctctgcaccgcgctcctcgccaagcaccctacatccccctacgcgctcgccctcaaggctcttattctggagaggatgggaaagcctgatgaagcattgagcggggccctgaatgctaaggagctattgtattcagacaacatttttcattttgatgatcttacacttagcactctacagatagtatttcaaaggcttgaccgattggatcttgctacttcatgctatgagtatgcctgtacaaagtatccaagtaacttggaattaatgatggggctttttaattgctatgttcgagagtactcatacgtgaaacaacagcagacagctctcaaaatgtacaaaactgtaggagaagaaaggtttttgctttgggctgtttgcagcattcagctgcaggtgcattttagcagtggtggtgtgaaattattggcactagccgaagcattgctgaagaagcacataaattctcatagtttacatgagccagaagcactttctctctatgtttcaattttggagcaagagaaaaagtatgacactgctttggaagttctttctggagacttgggatctcttcttggaagggaggaggacaagcttcgtttgcagaatatttctagttgcaaccaac

SEQ ID NO: 217734 - DNA, 2436 bp, Zea Mays
tttcttccccccttctcgtcacgtgcaaaggggggaaaacttctttctctctcttttttttccctcccccgcccgaatctgatgcttaaaccctcgccgggaggaggattccaatcccgacgcaccagcccgcgcccgccacctacagccgcgcccggatctccgccatggccgccgcgccgcaccaggcccagggccccgcagatagtgtgattccgctgcagtctgaacctgcacttgataataatccctccaagagtgcaaacgctagggaccagattctttctggtacggagaatgtgactacaggcaatgcacgcggcggcagctccttgaaatcgcaaaaaggcccgccagagaaggctagctctgtcggaaaacctggagaacaaccttttccctaccatcaaaatgtgtatgcaccacagccacaaccactctatcctggaggctacatgaacccttcaggacaatgggaggaatatccccattatgtgagtatggaggggctccattccgtatctcccggaatctacaatgacaaccagtccctcatgctatctcctggatatgcaaacaatccccaaatgatgtatggagcatattctcctgtttccaccgttggggatggccaacaatacctccctatgcattttcccttctcaagtccttactatcaaccaccagcttctcctagcatgggatattcaagctctgcgactggaatatcccaaggagaccctatgctgcagcaagagtacttccttcctgatggtcttctatattcacccacacaagggtatcatcaaccattcagctcattcgacagagcaccaacacaactaaataatgctcctgggttgtttggtcaagggaatctaccactggcttctggaatgcaccatggatcgatgtatggtcctggatcctacaagggacgccagcaaggtagcaaatttggtggcagtactacaagttggagttctgctggccgcagatttggtactatcgacttgagtggcaatcaacaaaggggcagcatgccatttggtagtcacaatggctctctggagttcatgaatgagcaaaaccgtggaccacgcgctacaaaaccgaagatacaaggcacagagaacacctcaggagatgagagaagcgagaaaattgttcctctgattgatagcgaactgtacaatcgctctgattttataactgagtacaaggatgccaaattctttgtaataaagtcctacaccgaggaccatgtacataggagcattaagtataaagtttgggccagcacagccagcgggaacaggaagctggattctgcttaccatgcagccaaagagaaagaagagcattgccctattttcttgtttttctcagttaatgggagtggccaattctgtggcgtggctgagatgattggacctgtcgatttcgacagaagtgttgattactggcagcaggataagtggagtggccagttccctgtgaagtggcacataattaaagatgtaccgaacaaccttctgcggcacatcattcttgagaacaatgacagtaaacctgtcacaaatagcagggacacacaggaggtgaagctggaacagggcctccagatgctaacaatcttcaagaaccatgaggctgagacaacgatcgtggaagatttcgacttctatgagcagcgggagaaagccttgcaggagaacagacgtcaacagcagcctcccaccacctatcctcagaagctggtggataccaacgctcaaggtcctgtggccgatatatcagatgcatttgccaaggccgtccagttgaaggatactgcgaacagcgggacgaccccgaaagctgagggtgcctcagctgaaaatggatccgctgccacagccaaggttgaagggagtgcaaacctgaacacaggccctgtggagtagagtccgtttcccttctttctgctaatttggagcagcagatgaattgcatgctgcaatgtgaatgccggaaaagtggaaagtgcaggttgatcgtgttaaatatggtcgtggctgcgtcagttgtacaacatcataggctttgttttatctccatttatgttatataagttcaatatcatagttccaaaattattgttcccagttctcttctttcctgctttattttgcttccgacttccgtggtcctcgtgtcgcaccatgaatgatcgttccattttagcgggtttataggcataagaagctgcagaattatgctgcgatgaagttgcattttctgcagttgaatgtgatactgtcgagtcttgcactgtctgtaatttcagagatcctctagtgtatcttcgtcttgttactctcagcatgtacaatctgcagtagttctcttggtcacattgctccaaatccctaacacttgcacattacaaatgaa

SEQ ID NO: 217735 - DNA, 3145 bp, Zea Mays
caagaacgcatcttccgtgcctcttgacgagttgcaatttctttcattacattttcttacttgatgatcaacaaaatcgcttctgtggagttttcaggctgccaagtaaaaccttgagtctcactgtgacgatcggcaaatataatctcccattctcccaacaagagcagatgcttcgcattcaagatgctagacggcgacctgctgtgctagaggagaatggggagaaagaagcttggtgattgcagttcacatgcacgtcgaggagcaaaggaatcaaggaaagatcccaacaagttgatcgggacaagcttctttatgtttctggcggcagagctacgtagtaccaacttattggatcgtgaaccaataaaagaggcagcatatctacgaaaaagagcatgtccgacatagcgccgtcgccgagctcgtcaccgtcgagcggaggaaatggaggtggcaacaattccacggcgcctgcaccccgcggttcatcaagctcaagctcaccccctaaaccgaggaatggctggcctagtagcagcccacctccaactccaagctcagactcagagggctcaagatcaacgccaccatcagattggcaagatccgtcgtcctcctcctctagccctccgccatcacgatcgtcacctccaccgccgtcctcgcagccgccaccaagcccaccaccttcgccatcttcttggagcggtggcggcaactcgacgtcctcgtcaccgccaactccaccttctcaaccctcaccaccaccctcgggcagatcgtcgtcgcctccgcaacggtcgtcagaaggctcctcaccttcgcctcagtcttcgtcctctaaccaggcccctcccgcaccgtcaggctggtcgccttcgccgtcgagagaatctcctcctcagtcgtcatctcaatctccgccacctcagagcgatgttgaccagccaaactcccagccttcgaatactccacaaagtccaccaccaccaccatctcctccgtcgtcgtcgccgcccgcgccgccgacgaaccaatcggtagtcataatccccgtccccgtgccgtctaataatagcccgccgggagcgctgccgccgcccgggctcgtgcccaccgcgcctggcgccaccgtgatgtcgagtaccagcgtcccgggttctgctgcgtcgtcgtcatcccaagaagccagtaccggcgcgtccaacggcggtggtgggagcacatcaacaagagtagtaggcagtagccatgttgccgcggccattgccggtgcggcgatcacgggcttgatgtttgctctgctggctgttttcctggtgtctaagaggaggaagaagaaaactgatggcagcaactataacatggcgtcaggtcagttcatgggctcgaacaacccgtcgtacacgcagccggcggcgggcgagtcggcggacatgggcgggggaggagggtactaccactaccagaaccagtcaggcagcatggatgcggcggcggcgccggggtccatggcgtcgttcagctacgaggagctgacgagcatcaccagcaacttctcccgcgacaacgtgatcggcgagggcgggttcgggtgcgtgtacaaggggtggctgggcgacggcaagtgcgtggccgtgaagcagctgaaggccggcagcgggcagggcgagcgcgagttccaggcggaggtggagatcatcagccgcgtgcaccaccgccacctcgtctccctcgtcggctactgcgtggcgcagcaccaccgcatgctcatctacgagttcgtgcccaacggcaccctggagcaccatctccacggtcgtggcatgccggtgatggactggccgacgaggctcaagatcgccatcggcgccgcgaagggactggcgtacctgcatgaagactgtcacccgaggatcatccacagggatataaagtccgccaacatcctgcttgactattcgttccaagcacaggttgcagatttcggcctggccaagctcaccaacgacacgaacacgcatgtctccactcgcatcatggggacgtttgggtaccttgcgcccgagtacgcgtcgagcgggaagctgacggaccggtccgacgtgttctccttcggcgtcgtgctgctggagctcatcacgggacggaagccggtggaccaagcgcgccaaggggaggagagcctcgtcgagtgggcgcggcccgtcctcgtggacgccatcgagacgggcgacctcggcgcggtggtcgacccccggctggtggacggcggcgccgcctacgacaggggccagatgatggtgatggtggaggccgcgtccgcctgcgtccgccactcggctcccaagcgcccgcggatggtgcaggtgatgagggcactggacgacgaaggaggcatgtccgacctaagcaatggggtgaaggtggggcagagccggaatttcgactccggccaccagcaagcggccgccatccagcagctccgtgccaccgccttcgcctccgaggagtacaccggggagttcgagcagtcgtccggcatggattaccttaaatcaggagtaccttaaatcaggagtgaaaccatggtgattagttctgcatgctttggctacccaagctggtgagatatagacgattattgaaagcagttgggcatgctttggctacacaagctggtgacacagacgattacacatggtgattataaccgcggcagttctgcatgttttggctacacaagctggagacagacgtttactttgaaaggaaaaaaacagctttaacattttatcgcatgcgatgcaaagagagaatatttttatatttttttcttttgccaagataagatagcaacatttgatattttttcgtttcatttaaaggataaaattgtggattctgcaatttttctgtacatgccattttgatcagcttggctaacgtctgaaacaaaaactcaccaaagcaactcgaataaccagtagcaaagctccaggccccaacgtgaggcctgtaaacagctgcaatggcctgaatatggatcacttacacaggatttgaaaattcactgtgacatgtatccccgaagccccatttccagcttcatggtacatctagtcatctataaagagaa

SEQ ID NO: 217736 - DNA, 4038 bp, Zea Mays
ccggctctggcatgtggcgcctttcgacgcgcagtttgcacgacacgcccgcacacctagcagtccagtcgtcgcatcctctccgggctccgggctccggacttccgtttccgctgccttctccggttctcccctcaccccactagcccccctgctccgtttctctccccgcccacagctcgaacgccaccaccttcattgtccgcgcgcccgcggctttcgaaaccctagcaccgatccccgtcgccagtcgatcgcagacgcttggagacgttcggggcccatgacgagcggcctctgagcgcgcgagagactagactgctgggtgtgctctagctagatccgaggggcttccgccgatggcgagggcggaggccaactgggagcggctggtgcgcgcggccctgcgcggggagcggctcggcagcgcctacggccagccggtcaccggcatcgccgggaatgtcccgtcgtcgctcggcaacaacgtgcacatcgaggaggtgctccgcgccgccgacgagatccaggatgaagaccccaccatcgccaggatcctttgtgagcatggttacacgttagcccagagtttggatccgaacagcgaagggagaggagtattgcagttcaaaaccggtttaatgtcagtgatcaggcaaaaactagcgaagaggggaggtgctgctattgaccgaagtcaggatattgctaaattgcaagaattttacaagctttatagagaaaagcataaagtggatgagttgattgaagatgaaatgaagctgagggaatctgccgtgttcagcggtaaccttggcgagctagaacggaaaactaggaagcgcaaaaaagtacttgcgactttgaaggtcttatggtcagtaatagaggatatgacaaaggacatatcaccagaggatgcaaacaaattgatatctgaagagatgaaaagggtcatgcaaaaggatgcagcaaggacggaggatgttgttccatataatattattcctctagattccttgacttctaccactaatgcaattgtgaattttccagaggtgagggcagcaatatcaactctgcagtactatactgatctgcccaggcttcctggtaccttttcagtccctgatgctaggaattcagatatcctggatcttttgcaatgtgtatttggttttcagggggataatgtgaaaaaccaaagagagcatatcattcacctactggcgaatgaacaatctcgtgtgggaaaactatcaggaaacgaaccgaaaattgatgagggtgccgtgcatgctgtgttttctaaagcccttgataactatatcaaatggtgcaactatctgcctcttcgtcctgtctgggataacaatgattcgttgacaaaggaaaagaagttgctatatgtgtgtttatactacttgatgtggggagaagctgctaacgtgcgatttattccagagggcttatgctacatatttcatcatctagcaagagaattaggggtgattctgcagaaacaaactgcagagccagctgaaagctgcaattctggtggtggcgtatcgtttcttgacaatgtcatttatcctttctatgaaatcattgcagcggaagcagccaataataaaaacgggcgtgcaccacattctgaatggagaaattatgatgatttcaatgagtttttctggtctcataagtgcttccacctacgatggccttggaacctgagcgacccgtttttctcgaagcccagtaggaaatataagggcttgctcagtaggaatcatcactacggaaagacatcttttgtggaacataggacttttcttcatctttaccacagctttcatcgcctttggatgttccttattatgatgtttcagggactgactatcattgctttcaatgatggtagttttgacaggaagaccatattgcaacttcttagtctgggtcctacttatgtcgtaatgaaatttattgagagtctattggatattctaatgatgtatggtgcctattcaacatctcgtggatctgcaatcaccagagtggcatggcgattctgctggtttactatagcttcagttgcaatttgctacctatatatcaagacacttcaagatggcacagagtcagcaacattcaagatatatgtttttgtaatcagtgcatatgtgggcattaagataattttcagcctacttatgagtgtcccttgttgccatggtttggctgaggcttgctatcgctggtctgctgtacgccttgttaagtggatgcatcaggagaataattatgttggaagaggcatgcatgagagtccccttgactatatcaaatacgccactttctggattgcaattcttggtgcaaaattttcattcacctattttcttcagataaaacctcttgtagaaccaacaagaactataatcaatttcactggcctgcagtatgcttggcatgattttttctcgaagaataatcataatgctcttacaatcctttctttatgggctccagtgctgtcaatttaccttttggacattcatgtattctacactgtattgtctgctatttatggatttctccttggtgcacgtgatcgcctgggagagattagtactgtcgaggctgttcacagattctttgagaagtttcctggagcattcatgcatagacttcatgttgaggttcccaaaaggaagcaactgctatcttctggtcaggaaatagagttaaacaagtttgacgcatctagattctcccccttctggaatgaaatagtgaggaatttaagggaagaggattatattaataattttgaactagaattgcttttgatgcccaagaatgacgttggagttctaccgattgtgcaatggccagttttcttgcttgctagcaaggttttcttggccaaagagattgcagaggactgcaaagactcacaagaagaactttggttaaggatatcgaaggatgaatacatgcaatatgctgttgtagagtccttccatagcatttatcatattctgacgtctatactagagaaagaaggccgcctctgggtggaaagaatttatggtggtatccgagacagcatttcgaagcggaccatccaaagtgatcttcatttcaaaaaactgcttaatgttattgccaagcttgttgctgtattgggaatactgcgaggtacgacggagtccagtgatttgaaaaaaggtttggttaatgctattcaagacctatatgatgttgttcatcatgaagcgttttcggttgatatgagtggccacattgaagactgggatcaaattaatttagcaagggctgaaggtcgcctcttcaataaactcaagtggccaaatgatcccaaattgacttgatcaagagattgtattcacttctgacaattaaagaatctgctgcaactgtccctaaaaatttagaagccaggcgaagacttcagttctttacgaactcactgttcatggaaatgcctgttgcacggcctgtttcggaaatggtctcctttagtgtgtttactccatattactctgagattgttctctacagcatggctgaacttcagaagaaaaacgaagacggtataactacactgttttatctccagaagatttacccagatgaatggaagaacttccttactcgtatcaacagggatgaaaatgcagcagactctgagctttttggcaacccaaatgacatacttgaactacgtctatgggcttcttatcgtgggcagaccttagctcgaactgtccgtggtatgatgtactataggaaagcccttatgctgcagagttatttggagaggatacaatctgaagatttggaatctacattagggttggctggttcagctgataggcattttgagttgtcacctgaggcgcgtgctcaggctgatttgaagtttacatatgtggttacctgccaaatttatggaaaacagaagggggaagggaaggctgaactgcagacatatccttactaatgcaaagg

SEQ ID NO: 217737 - DNA, 3955 bp, Zea Mays
ccggctctggcatgtggcgcctttcgacgcgcagtttgcacgacacgcccgcacacctagcagtccagtcgtcgcatcctctccgggctccgggctccggacttccgtttccgctgccttctccggttctcccctcaccccactagcccccctgctccgtttctctccccgcccacagctcgaacgccaccaccttcattgtccgcgcgcccgcggctttcgaaaccctagcaccgatccccgtcgccagtcgatcgcagacgcttggagacgttcggggcccatgacgagcggcctctgagcgcgcgagagactagactgctgggtgtgctctagctagatccgaggggcttccgccgatggcgagggcggaggccaactgggagcggctggtgcgcgcggccctgcgcggggagcggctcggcagcgcctacggccagccggtcaccggcatcgccgggaatgtcccgtcgtcgctcggcaacaacgtgcacatcgaggaggtgctccgcgccgccgacgagatccaggatgaagaccccaccatcgccaggatcctttgtgagcatggttacacgttagcccagagtttggatccgaacagcgaagggagaggagtattgcagttcaaaaccggtttaatgtcagtgatcaggcaaaaactagcgaagaggggaggtgctgctattgaccgaagtcaggatattgctaaattgcaagaattttacaagctttatagagaaaagcataaagtggatgagttgattgaagatgaaatgaagctgagggaatctgccgtgttcagcggtaaccttggcgagctagaacggaaaactaggaagcgcaaaaaagtacttgcgactttgaaggtcttatggtcagtaatagaggatatgacaaaggacatatcaccagaggatgcaaacaaattgatatctgaagagatgaaaagggtcatgcaaaaggatgcagcaaggacggaggatgttgttccatataatattattcctctagattccttgacttctaccactaatgcaattgtgaattttccagaggtgagggcagcaatatcaactctgcagtactatactgatctgcccaggcttcctggtaccttttcagtccctgatgctaggaattcagatatcctggatcttttgcaatgtgtatttggttttcagggggataatgtgaaaaaccaaagagagcatatcattcacctactggcgaatgaacaatctcgtgtgggaaaactatcaggaaacgaaccgaaaattgatgagggtgccgtgcatgctgtgttttctaaagcccttgataactatatcaaatggtgcaactatctgcctcttcgtcctgtctgggataacaatgattcgttgacaaaggaaaagaagttgctatatgtgtgtttatactacttgatgtggggagaagctgctaacgtgcgatttattccagagggcttatgctacatatttcatcatctagcaagagaattaggggtgattctgcagaaacaaactgcagagccagctgaaagctgcaattctggtggtggcgtatcgtttcttgacaatgtcatttatcctttctatgaaatcattgcagcggaagcagccaataataaaaacgggcgtgcaccacattctgaatggagaaattatgatgatttcaatgagtttttctggtctcataagtgcttccacctacgatggccttggaacctgagcgacccgtttttctcgaagcccagtaggaaatataagggcttgctcagtaggaatcatcactacggaaagacatcttttgtggaacataggacttttcttcatctttaccacagctttcatcgcctttggatgttccttattatgatgtttcagggactgactatcattgctttcaatgatggtagttttgacaggaagaccatattgcaacttcttagtctgggtcctacttatgtcgtaatgaaatttattgagagtctattggatattctaatgatgtatggtgcctattcaacatctcgtggatctgcaatcaccagagtggcatggcgattctgctggtttactatagcttcagttgcaatttgctacctatatatcaagacacttcaagatggcacagagtcagcaacattcaagatatatgtttttgtaatcagtgcatatgtgggcattaagataattttcagcctacttatgagtgtcccttgttgccatggtttggctgaggcttgctatcgctggtctgctgtacgccttgttaagtggatgcatcaggagaataattatgttggaagaggcatgcatgagagtccccttgactatatcaaatacgccactttctggattgcaattcttggtgcaaaattttcattcacctattttcttcagataaaacctcttgtagaaccaacaagaactataatcaatttcactggcctgcagtatgcttggcatgattttttctcgaagaataatcataatgctcttacaatcctttctttatgggctccagtgctgtcaattagtactgtcgaggctgttcacagattctttgagaagtttcctggagcattcatgcatagacttcatgttgaggttcccaaaaggaagcaactgctatcttctggtcaggaaatagagttaaacaagtttgacgcatctagattctcccccttctggaatgaaatagtgaggaatttaagggaagaggattatattaataattttgaactagaattgcttttgatgcccaagaatgacgttggagttctaccgattgtgcaatggccagttttcttgcttgctagcaaggttttcttggccaaagagattgcagaggactgcaaagactcacaagaagaactttggttaaggatatcgaaggatgaatacatgcaatatgctgttgtagagtccttccatagcatttatcatattctgacgtctatactagagaaagaaggccgcctctgggtggaaagaatttatggtggtatccgagacagcatttcgaagcggaccatccaaagtgatcttcatttcaaaaaactgcttaatgttattgccaagcttgttgctgtattgggaatactgcgaggtacgacggagtccagtgatttgaaaaaaggtttggttaatgctattcaagacctatatgatgttgttcatcatgaagcgttttcggttgatatgagtggccacattgaagactgggatcaaattaatttagcaagggctgaaggtcgcctcttcaataaactcaagtggccaaatgatcccaaattgaaagacttgatcaagagattgtattcacttctgacaattaaagaatctgctgcaactgtccctaaaaatttagaagccaggcgaagacttcagttctttacgaactcactgttcatggaaatgcctgttgcacggcctgtttcggaaatggtctcctttagtgtgtttactccatattactctgagattgttctctacagcatggctgaacttcagaagaaaaacgaagacggtataactacactgttttatctccagaagatttacccagatgaatggaagaacttccttactcgtatcaacagggatgaaaatgcagcagactctgagctttttggcaacccaaatgacatacttgaactacgtctatgggcttcttatcgtgggcagaccttagctcgaactgtccgtggtatgatgtactataggaaagcccttatgctgcagagttatttggagaggatacaatctgaagatttggaatctacattagggttggctggttcagctgataggcattttgagttgtcacctgaggcgcgtgctcaggctgatttgaagtttacatatgtggttacctgccaaatttatggaaaacagaagggggaagggaaggctgaactgcagacatatccttactaatgcaaagg

SEQ ID NO: 217738 - DNA, 4042 bp, Zea Mays
ccggctctggcatgtggcgcctttcgacgcgcagtttgcacgacacgcccgcacacctagcagtccagtcgtcgcatcctctccgggctccgggctccggacttccgtttccgctgccttctccggttctcccctcaccccactagcccccctgctccgtttctctccccgcccacagctcgaacgccaccaccttcattgtccgcgcgcccgcggctttcgaaaccctagcaccgatccccgtcgccagtcgatcgcagacgcttggagacgttcggggcccatgacgagcggcctctgagcgcgcgagagactagactgctgggtgtgctctagctagatccgaggggcttccgccgatggcgagggcggaggccaactgggagcggctggtgcgcgcggccctgcgcggggagcggctcggcagcgcctacggccagccggtcaccggcatcgccgggaatgtcccgtcgtcgctcggcaacaacgtgcacatcgaggaggtgctccgcgccgccgacgagatccaggatgaagaccccaccatcgccaggatcctttgtgagcatggttacacgttagcccagagtttggatccgaacagcgaagggagaggagtattgcagttcaaaaccggtttaatgtcagtgatcaggcaaaaactagcgaagaggggaggtgctgctattgaccgaagtcaggatattgctaaattgcaagaattttacaagctttatagagaaaagcataaagtggatgagttgattgaagatgaaatgaagctgagggaatctgccgtgttcagcggtaaccttggcgagctagaacggaaaactaggaagcgcaaaaaagtacttgcgactttgaaggtcttatggtcagtaatagaggatatgacaaaggacatatcaccagaggatgcaaacaaattgatatctgaagagatgaaaagggtcatgcaaaaggatgcagcaaggacggaggatgttgttccatataatattattcctctagattccttgacttctaccactaatgcaattgtgaattttccagaggtgagggcagcaatatcaactctgcagtactatactgatctgcccaggcttcctggtaccttttcagtccctgatgctaggaattcagatatcctggatcttttgcaatgtgtatttggttttcagggggataatgtgaaaaaccaaagagagcatatcattcacctactggcgaatgaacaatctcgtgtgggaaaactatcaggaaacgaaccgaaaattgatgagggtgccgtgcatgctgtgttttctaaagcccttgataactatatcaaatggtgcaactatctgcctcttcgtcctgtctgggataacaatgattcgttgacaaaggaaaagaagttgctatatgtgtgtttatactacttgatgtggggagaagctgctaacgtgcgatttattccagagggcttatgctacatatttcatcatctagcaagagaattaggggtgattctgcagaaacaaactgcagagccagctgaaagctgcaattctggtggtggcgtatcgtttcttgacaatgtcatttatcctttctatgaaatcattgcagcggaagcagccaataataaaaacgggcgtgcaccacattctgaatggagaaattatgatgatttcaatgagtttttctggtctcataagtgcttccacctacgatggccttggaacctgagcgacccgtttttctcgaagcccagtaggaaatataagggcttgctcagtaggaatcatcactacggaaagacatcttttgtggaacataggacttttcttcatctttaccacagctttcatcgcctttggatgttccttattatgatgtttcagggactgactatcattgctttcaatgatggtagttttgacaggaagaccatattgcaacttcttagtctgggtcctacttatgtcgtaatgaaatttattgagagtctattggatattctaatgatgtatggtgcctattcaacatctcgtggatctgcaatcaccagagtggcatggcgattctgctggtttactatagcttcagttgcaatttgctacctatatatcaagacacttcaagatggcacagagtcagcaacattcaagatatatgtttttgtaatcagtgcatatgtgggcattaagataattttcagcctacttatgagtgtcccttgttgccatggtttggctgaggcttgctatcgctggtctgctgtacgccttgttaagtggatgcatcaggagaataattatgttggaagaggcatgcatgagagtccccttgactatatcaaatacgccactttctggattgcaattcttggtgcaaaattttcattcacctattttcttcagataaaacctcttgtagaaccaacaagaactataatcaatttcactggcctgcagtatgcttggcatgattttttctcgaagaataatcataatgctcttacaatcctttctttatgggctccagtgctgtcaatttaccttttggacattcatgtattctacactgtattgtctgctatttatggatttctccttggtgcacgtgatcgcctgggagagattagtactgtcgaggctgttcacagattctttgagaagtttcctggagcattcatgcatagacttcatgttgaggttcccaaaaggaagcaactgctatcttctggtcaggaaatagagttaaacaagtttgacgcatctagattctcccccttctggaatgaaatagtgaggaatttaagggaagaggattatattaataattttgaactagaattgcttttgatgcccaagaatgacgttggagttctaccgattgtgcaatggccagttttcttgcttgctagcaaggttttcttggccaaagagattgcagaggactgcaaagactcacaagaagaactttggttaaggatatcgaaggatgaatacatgcaatatgctgttgtagagtccttccatagcatttatcatattctgacgtctatactagagaaagaaggccgcctctgggtggaaagaatttatggtggtatccgagacagcatttcgaagcggaccatccaaagtgatcttcatttcaaaaaactgcttaatgttattgccaagcttgttgctgtattgggaatactgcgaggtacgacggagtccagtgatttgaaaaaaggtttggttaatgctattcaagacctatatgatgttgttcatcatgaagcgttttcggttgatatgagtggccacattgaagactgggatcaaattaatttagcaagggctgaaggtcgcctcttcaataaactcaagtggccaaatgatcccaaattgaaagacttgatcaagagattgtattcacttctgacaattaaagaatctgctgcaactgtccctaaaaatttagaagccaggcgaagacttcagttctttacgaactcactgttcatggaaatgcctgttgcacggcctgtttcggaaatggtctcctttagtgtgtttactccatattactctgagattgttctctacagcatggctgaacttcagaagaaaaacgaagacggtataactacactgttttatctccagaagatttacccagatgaatggaagaacttccttactcgtatcaacagggatgaaaatgcagcagactctgagctttttggcaacccaaatgacatacttgaactacgtctatgggcttcttatcgtgggcagaccttagctcgaactgtccgtggtatgatgtactataggaaagcccttatgctgcagagttatttggagaggatacaatctgaagatttggaatctacattagggttggctggttcagctgataggcattttgagttgtcacctgaggcgcgtgctcaggctgatttgaagtttacatatgtggttacctgccaaatttatggaaaacagaagggggaagggaaggctgaactgcagacatatccttactaatgcaaagg

SEQ ID NO: 217739 - DNA, 4024 bp, Zea Mays
ccggctctggcatgtggcgcctttcgacgcgcagtttgcacgacacgcccgcacacctagcagtccagtcgtcgcatcctctccgggctccgggctccggacttccgtttccgctgccttctccggttctcccctcaccccactagcccccctgctccgtttctctccccgcccacagctcgaacgccaccaccttcattgtccgcgcgcccgcggctttcgaaaccctagcaccgatccccgtcgccagtcgatcgcagacgcttggagacgttcggggcccatgacgagcggcctctgagcgcgcgagagactagactgctgggtgtgctctagctagatccgaggggcttccgccgatggcgagggcggaggccaactgggagcggctggtgcgcgcggccctgcgcggggagcggctcggcagcgcctacggccagccggtcaccggcatcgccgggaatgtcccgtcgtcgctcggcaacaacgtgcacatcgaggaggtgctccgcgccgccgacgagatccaggatgaagaccccaccatcgccaggatcctttgtgagcatggttacacgttagcccagagtttggatccgaacagcgaagggagaggagtattgcagttcaaaaccggtttaatgtcagtgatcaggcaaaaactagcgaagaggggaggtgctgctattgaccgaagtcaggatattgctaaattgcaagaattttacaagctttatagagaaaagcataaagtggatgagttgattgaagatgaaatgaagctgagggaatctgccgtgttcagcggtaaccttggcgagctagaacggaaaactaggaagcgcaaaaaagtacttgcgactttgaaggtcttatggtcagtaatagaggatatgacaaaggacatatcaccagaggatgcaaacaaattgatatctgaagagatgaaaagggtcatgcaaaaggatgcagcaaggacggaggatgttgttccatataatattattcctctagattccttgacttctaccactaatgcaattgtgaattttccagaggtgagggcagcaatatcaactctgcagtactatactgatctgcccaggcttcctggtaccttttcagtccctgatgctaggaattcagatatcctggatcttttgcaatgtgtatttggttttcagggggataatgtgaaaaaccaaagagagcatatcattcacctactggcgaatgaacaatctcgtgtgggaaaactatcaggaaacgaaccgaaaattgatgagggtgccgtgcatgctgtgttttctaaagcccttgataactatatcaaatggtgcaactatctgcctcttcgtcctgtctgggataacaatgattcgttgacaaaggaaaagaagttgctatatgtgtgtttatactacttgatgtggggagaagctgctaacgtgcgatttattccagagggcttatgctacatatttcatcatctagcaagagaattaggggtgattctgcagaaacaaactgcagagccagctgaaagctgcaattctggtggtggcgtatcgtttcttgacaatgtcatttatcctttctatgaaatcattgcagcggaagcagccaataataaaaacgggcgtgcaccacattctgaatggagaaattatgatgatttcaatgagtttttctggtctcataagtgcttccacctacgatggccttggaacctgagcgacccgtttttctcgaagcccagtaggaaatataagggcttgctcagtaggaatcatcactacggaaagacatcttttgtggaacataggacttttcttcatctttaccacagctttcatcgcctttggatgttccttattatgatgtttcagggactgactatcattgctttcaatgatggtagttttgacaggaagaccatattgcaacttcttagtctgggtcctacttatgtcgtaatgaaatttattgagagtctattggatattctaatgatgtatggtgcctattcaacatctcgtggatctgcaatcaccagagtggcatggcgattctgctggtttactatagcttcagttgcaatttgctacctatatatcaagacacttcaagatggcacagagtcagcaacattcaagatatatgtttttgtaatcagtgcatatgtgggcattaagataattttcagcctacttatgagtgtcccttgttgccatggtttggctgaggcttgctatcgctggtctgctgtacgccttgttaagtggatgcatcaggagaataattatgttggaagaggcatgcatgagagtccccttgactatatcaaatacgccactttctggattgcaattcttggtgcaaaattttcattcacctattttcttcagataaaacctcttgtagaaccaacaagaactataatcaatttcactggcctgcagtatgcttggcatgattttttctcgaagaataatcataatgctcttacaatcctttctttatgggctccagtgctgtcaatttaccttttggacattcatgtattctacactgtattgtctgctatttatggatttctccttggtgcacgtgatcgcctgggagagattagtactgtcgaggctgttcacagattctttgagaagtttcctggagcattcatgcatagacttcatgttgaggttcccaaaaggaagcaactgctatcttctggtcaggaaatagagttaaacaagtttgacgcatctagattctcccccttctggaatgaaatagtgaggaatttaagggaagaggattatattaataattttgaactagaattgcttttgatgcccaagaatgacgttggagttctaccgattgtgcaatggccagttttcttgcttgctagcaaggttttcttggccaaagagattgcagaggactgcaaagactcacaagaagaactttggttaaggatatcgaaggatgaatacatgcaatatgctgttgtagagtccttccatagcatttatcatattctgacgtctatactagagaaagaaggccgcctctgggtggaaagaatttatggtggtatccgagacagcatttcgaagcggaccatccaaagtgatcttcatttcaaaaaactgcttaatgttattgccaagcttgttgctgtattgggaatactgcgaggtacgacggagtccagtgatttgaaaaaaggtttggttaatgctattcaagacctatatgatgttgttcatcatgaagcgttttcggttgatatgagtggccacattgaagactgggatcaaattaatttagcaagggctgaaggtcgcctcttcaataaactcaagtggccaaatgatcccaaattgaaagacttgatcaagagattgtattcacttctgacaattaaagaatctgctgcaactgtccctaaaaatttagaagccaggcgaagacttcagttctttacgaactcactgttcatggaaatgcctgttgcacggcctgtttcggaaatggtctcctttagtgtgtttactccatattactctgagattgttctctacagcatggctgaacttcagaagaaaaacgaagacggtataactacactgttttatctccagaagatttacccagatgaatggaagaacttccttactcgtatcaacagggatgaaaatgcagcagactctgagctttttggcaacccaaatgacatacttgaactacgtctatgggcttcttatcgtgggcagaccttagctcgaactgtccgtggtatgatgtactataggaaagcccttatgctgcagagttatttggagaggatacaatctgaagggttggctggttcagctgataggcattttgagttgtcacctgaggcgcgtgctcaggctgatttgaagtttacatatgtggttacctgccaaatttatggaaaacagaagggggaagggaaggctgaactgcagacatatccttactaatgcaaagg

SEQ ID NO: 217740 - DNA, 1408 bp, Zea Mays
ggaagaactgcgcctgcaagaagttgagccccaggttgagcgccacggccgcgccctgccccgccgaccgcacctccacggggtatatctcgccggggatggtccagtacagcgcgccccacgaccagctgaagctcgccgagaagatcagcgccaccaccagcaccgtcaccgcgtaccccttgggcatcttgctcccgttgccgagaatgtgacatgtgcgatgcctggcacgtgaacatgagcgcgccaccgatcatgaagagcagcttccggccgtagcggtccatggcgaagcccgacgcgaggatgccgccgatgttcatgaggcccaggatgacggcgcccatgagcgcggcgtcgctctcgaagccgacggtccggaacagtatcggcgagaagaaggcggtgacggccacccctgtgaggttgaggaacaccgggaacgccacggccatcaccaggtagggccggtactcccggcgcaggatccggcggaacgcgccctcctcgttccggcggtcgttctccgccgcggcgaggatgtccgcgaactcggggccgatgtccacgcccttgccgcgcacccgctggagcgcggcgcgggcgtcgtcgtgcttcccgcgcaggacgaggctgctgggggtgtccgggatgaacgcggcgccgaccaccatgacggcggccgggacggaggcgaggccgagcgagaggcgccagccccagcccgggatccgcgaggtgccgtagttgatgaggttggccaccaggtacccgacgctgatgaagagggggaaggccgagatgaagccgccgcgccagcgcgggggcgacacctcggcgaggtacaccggcgtggcctggccggagaagccgagccccaggccgagcagcatcctcccgacgatgagcatggcgatgttggccgcggcggcgttgacgagggcgccggccaagaacaggccgccgccgatcagcatgacggcctgccgccccagccgccgggtcacgcggctcgccagcagcgtccccaccatgccgaacgcgtacagcgacgacgtgaaggccgtcagcgcctggttgttgtaaatgcagtacacgtccttgttggcgcgcgccgtcctcttgagcaacccggggaagaacttgttcaggaaatcctccatctccgacacacctcccggacagaatacagcagaagtggcgcttgcacgctttaccactttcagttccatttcaaattacggtcaaacataaacatataataaaaatataaatggcgggtgacactgcttttgcaagcatcggggggctatagggaagcaaagaagtgaggaggaggaactaaagtaaaaaacaaaaaaaaaacagcggtagaatagaacggagatgagacaaaggaccggag

SEQ ID NO: 217741 - DNA, 2345 bp, Zea Mays
caccacgccacgctcaaacgagacgacgacgaatccagccaccgtcaccatcgccaccgccgacacaatcccgccgcagccccccgcgcactggtgtccgaacccagcccaatccgcgctgccgaattctggtctctgccctgcccgccccgcggcgcggccttcccaccgcctctccgtcctgctcccatccgccgcgctcgctagcgaaaccgctccccgagctccaggtggtgtggtgcctggcgcgcttcacaacgccataaatgccacccatcaaggctcctcccgccatctagccctcttctccctgaccctgcgcccgcggctcggtgcggttaccgtttccttggcgcgcgcgtcagcactccgccgatgcacgcgccgttggaggccatgaacgggagggcgcggaggccggcggcggcgcgcggcgccgccccgaggaacgagaaagcgatggagaaggagcagaggaggccacccagctcgaagacggcgccggtgtccatgaaggcgtcgcccgcaaatgcgacgccgcaatgcatgaagaacaggaaaattgcactgcagcaggacgtggacaagctgaggatgaaactgcggcacgaggagaacgtccaccgagctctggagcgggcgttcacgaggccgctcggcgctctacctcgcctccctcctttcctgccgtctcaaacgttggagcttctggccgaagtcgccgtcctggaggaggaggtcgtccggctggaggagcaggtcgtcaatttccggcaaggactgtaccgggagaccgtcatcaccacctccatggcggcgaagagcgtgtacttcccggacggttaccggagcacgccggcacggcacaagccacctgcacaaccgcagagtccagagctgtctacctcgacgcgccaaggctccgatcaagatgccgctgattggctgccatctttgaggcgagccaccaatgcgatgtggacaccaagaaggcccggtcgttccctgagccaaggcgacagtccggggaaggagaaccagtcgttcggcagtggcactaattcgtgcagagagttcggcctggcgcccttgagtaaagtgccaggatgcagggtagtacaggtagcggagacacgcgcaggttttcagacaacgagtgcagtggaagaccacaaagctgttgagggcagcaatggcactggtccaagcaaggcctcaacggcggcgaacgaagtctcggaggagctactggcgtgcctgctggccatcttctcgcagaagagcgcatccagcggccaagacgaggagcgggtgtcgctgccgccggtctccggctcctgcggaagcagctcagcagacccctactgtgtcccagaattcgggtggcgggatattggccggtacaagcagttccggtcagtcgacatgaacacttgtgccggcgacgactccgctcttggccagagactgaagtgagtttccattgatcgggcactgctccggaagctctccttggttgacctagcgggcctctcccaccagcataataggctggcgttctggatcaacacctactactcctgcatgatgaacgcatttctcgagcagggagcgcctagcgacccccgtatgctggtggccatgatgcccaaggcgaccatcaacgtcggcgggcgcgtgctgagcgccgtggcgatcgagcacttcattctccggctgccccactacgacgatgacgacgcaaaagcacgtgcacactgactgaagcgaggaatggcgacggccaggccgtgctcgggctggactggccggagccgctgctgacgttcgcgctctcctccggcagacggtcgtcgccggtgagggtctacgcggccggccggagtcgacgagaagctggaggcggtgaagcgggagtacctgcaggccgcggtgggcgtctcgccggcgagcgggctgccgaacctcctccttcactggtacctgctggctgcttgactccgccaaggacgtggaccgggtgtgcctgcagctgtcccgcgacccgtgtgcgccctgccggataccttctgcttctggccctgttgtcgtagaacgttggagtgtgtacacagttttggttgggccgtgattctttttgctgtttcaaccgtgaatttgttgtttgcttacgttgtacacacagttttcagttttggactacaggtctgcagagataaggccgtaagagcatgtacagtggagagacatcaaaacagttctccaagtacatgagacaacaaagagactctattgtacaattgagtgtctataaacgtagtttattaataaatacagaattaaat

SEQ ID NO: 217742 - DNA, 2432 bp, Zea Mays
caccacgccacgctcaaacgagacgacgacgaatccagccaccgtcaccatcgccaccgccgacacaatcccgccgcagccccccgcgcactggtgtccgaacccagcccaatccgcgctgccgaattctggtctctgccctgcccgccccgcggcgcggccttcccaccgcctctccgtcctgctcccatccgccgcgctcgctagcgaaaccgctccccgagctccaggtggtgtggtgcctggcgcgcttcacaacgccataaatgccacccatcaaggctcctcccgccatctagccctcttctccctgaccctgcgcccgcggctcggtgcggttaccgtttccttggcgcgcgcgtcagcactccgccgatgcacgcgccgttggaggccatgaacgggagggcgcggaggccggcggcggcgcgcggcgccgccccgaggaacgagaaagcgatggagaaggagcagaggaggccacccagctcgaagacggcgccggtgtccatgaaggcgtcgcccgcaaatgcgacgccgcaatgcatgaagaacaggaaaattgcactgcagcaggacgtggacaagctgaggatgaaactgcggcacgaggagaacgtccaccgagctctggagcgggcgttcacgaggccgctcggcgctctacctcgcctccctcctttcctgccgtctcaaacgttggagcttctggccgaagtcgccgtcctggaggaggaggtcgtccggctggaggagcaggtcgtcaatttccggcaaggactgtaccgggagaccgtcatcaccacctccatggcggcgaagagcgtgtacttcccggacggttaccggagcacgccggcacggcacaagccacctgcacaaccgcagagtccagagctgtctacctcgacgcgccaaggctccgatcaagatgccgctgattggctgccatctttgaggcgagccaccaatgcgatgtggacaccaagaaggcccggtcgttccctgagccaaggcgacagtccggggaaggagaaccagtcgttcggcagtggcactaattcgtgcagagagttcggcctggcgcccttgagtaaagtgccaggatgcagggtagtacaggtagcggagacacgcgcaggttttcagacaacgagtgcagtggaagaccacaaagctgttgagggcagcaatggcactggtccaagcaaggcctcaacggcggcgaacgaagtctcggaggagctactggcgtgcctgctggccatcttctcgcagaagagcgcatccagcggccaagacgaggagcgggtgtcgctgccgccggtctccggctcctgcggaagcagctcagcagacccctactgtgtcccagaattcgggtggcgggatattggccggtacaagcagttccggtcagtcgacatgaacacttgtgccggcgacgactccgctcttggccagagactgaagtgagtttccattgatcgggcactgctccggaagctctccttggttgacctagcgggcctctcccaccagcataataggctggcgttctggatcaacacctactactcctgcatgatgaacgcatttctcgagcagggagcgcctagcgacccccgtatgctggtggccatgatgcccaaggcgaccatcaacgtcggcgggcgcgtgctgagcgccgtggcgatcgagcacttcattctccggctgccccactacgacgatgacgacgcaaaagcacgtgcacactgactgaagcgaggaatggcgacggccaggccgtgctcgggctggactggccggagccgctgctgacgttcgcgctctcctccggcagacggtcgtcgccggtgctctggactggacgcccggtctgtcctccgagctgtctcctcaaggcaaatgattttagccgccaccgcttcttgtctctgaaggtgagggtctacgcggccggccggagtcgacgagaagctggaggcggtgaagcgggagtacctgcaggccgcggtgggcgtctcgccggcgagcgggctgccgaacctcctccttcactggtacctgctggctgcttgactccgccaaggacgtggaccgggtgtgcctgcagctgtcccgcgacccgtgtgcgccctgccggataccttctgcttctggccctgttgtcgtagaacgttggagtgtgtacacagttttggttgggccgtgattctttttgctgtttcaaccgtgaatttgttgtttgcttacgttgtacacacagttttcagttttggactacaggtctgcagagataaggccgtaagagcatgtacagtggagagacatcaaaacagttctccaagtacatgagacaacaaagagactctattgtacaattgagtgtctataaacgtagtttattaataaatacagaattaaat

SEQ ID NO: 217743 - DNA, 2002 bp, Zea Mays
caccacgccacgctcaaacgagacgacgacgaatccagccaccgtcaccatcgccaccgccgacacaatcccgccgcagccccccgcgcactggtgtccgaacccagcccaatccgcgctgccgaattctggcgatggagaaggagcagaggaggccacccagctcgaagacggcgccggtgtccatgaaggcgtcgcccgcaaatgcgacgccgcaatgcatgaagaacaggaaaattgcactgcagcaggacgtggacaagctgaggatgaaactgcggcacgaggagaacgtccaccgagctctggagcgggcgttcacgaggccgctcggcgctctacctcgcctccctcctttcctgccgtctcaaacgttggagcttctggccgaagtcgccgtcctggaggaggaggtcgtccggctggaggagcaggtcgtcaatttccggcaaggactgtaccgggagaccgtcatcaccacctccatggcggcgaagagcgtgtacttcccggacggttaccggagcacgccggcacggcacaagccacctgcacaaccgcagagtccagagctgtctacctcgacgcgccaaggctccgatcaagatgccgctgattggctgccatctttgaggcgagccaccaatgcgatgtggacaccaagaaggcccggtcgttccctgagccaaggcgacagtccggggaaggagaaccagtcgttcggcagtggcactaattcgtgcagagagttcggcctggcgcccttgagtaaagtgccaggatgcagggtagtacaggtagcggagacacgcgcaggttttcagacaacgagtgcagtggaagaccacaaagctgttgagggcagcaatggcactggtccaagcaaggcctcaacggcggcgaacgaagtctcggaggagctactggcgtgcctgctggccatcttctcgcagaagagcgcatccagcggccaagacgaggagcgggtgtcgctgccgccggtctccggctcctgcggaagcagctcagcagacccctactgtgtcccagaattcgggtggcgggatattggccggtacaagcagttccggtcagtcgacatgaacacttgtgccggcgacgactccgctcttggccagagactgaaggcactgctccggaagctctccttggttgacctagcgggcctctcccaccagcataataggctggcgttctggatcaacacctactactcctgcatgatgaacgcatttctcgagcagggagcgcctagcgacccccgtatgctggtggccatgatgcccaaggcgaccatcaacgtcggcgggcgcgtgctgagcgccgtggcgatcgagcacttcattctccggctgccccactacgacgatgacgacgcaaaagcacgtgcacactgactgaagcgaggaatggcgacggccaggccgtgctcgggctggactggccggagccgctgctgacgttcgcgctctcctccggcagacggtcgtcgccggtgagggtctacgcggccggccggagtcgacgagaagctggaggcggtgaagcgggagtacctgcaggccgcggtgggcgtctcgccggcgagcgggctgccgaacctcctccttcactggtacctgctggctgcttgactccgccaaggacgtggaccgggtgtgcctgcagctgtcccgcgacccgtgtgcgccctgccggataccttctgcttctggccctgttgtcgtagaacgttggagtgtgtacacagttttggttgggccgtgattctttttgctgtttcaaccgtgaatttgttgtttgcttacgttgtacacacagttttcagttttggactacaggtctgcagagataaggccgtaagagcatgtacagtggagagacatcaaaacagttctccaagtacatgagacaacaaagagactctattgtacaattgagtgtctataaacgtagtttattaataaatacagaattaaat

SEQ ID NO: 217744 - DNA, 1313 bp, Zea Mays
attctgccgatgtgccctgggtcctttgttggttcgccacccgcatctagccaaaaaaagcattatcgtggtgaaagagggagacaacgagggagcgatttgggccgccaccggtggttctcggcggtgtcgggtctccatcctcggggtgtggccaaggagagtcgtcaatgcctagggaagtagtctgcaaccgcaaatcaagggaaggaccgacagagctgggtgaattgctcatcagtgggttgcgggagcaccataccgcgcatcggtgttgttagtactcccctcatcggcacctctgacgagcaagtgattgaggacccaggtgttcagcaggtagaagttactgagcaggagcacattgaagccatgtcaaaggaagttgcaagggcgacctagaactcaacatatgataagggtttagtcgatgtactacatgactacaaagataacccaaagttgaagggtcaaaatggatggaattcagagggatggaagtgtatcactgctaagtttaatgaaaggttctcttggctcatttcacaaaacaacaactacaagagaaggagaaagaacttaaatcaagctataaaacagtaagagattcaagaaaggaaagtgagactggttcgaatgactccctatgtatgatattggctgaactagaggtttgggcaaggttgattagtgctcacccaaaggttgcaaggtttcgcaagaagccatttcctcttttctactctttagaagcactttatgaaggtagtgtggctacgggagacttaaatttcacatcaagtcaacaactgcctccttatgctcctctatccgttgatactcttgcttctcctgctattgttcctcctcttgctcctcctgctagtgttcctcctggtcctacttttgttgttccttcagctaggagtacatctgaatagaatctccatccattcaatacaaatccatttgatttggatggataagagatgacaagtgaagctcaatctgtgtcagctattcatgaagcaagagagggagaaggtagcaaaagcagaaagcgtaagcagagtcatgtgggagcagctctcgaagactatgtggagttcaaaaagagccaaactaacaagacacttgatgctcttaaagaactttccatgaggaagtgtatgaaggaaatggaagcaatggatggattcacagatgaggagaagtcatatgatgtggaggtctttgagtccgagattaatagagaggctttcatgtcaacaatgaaccacaatgttcgaagaatgtggctaaaacgcaaaatc

SEQ ID NO: 217745 - DNA, 1289 bp, Zea Mays
ccctgggtcctttgttggttcgccacccgcatctagccaaaaaaagcattatcgtggtgaaagagggagacaacgagggagcgatttgggccgccaccggtggttctcggcggtgtcgggtctccatcctcggggtgtggccaaggagagtcgtcaatgcctagggaagtagtctgcaaccgcaaatcaagggaaggaccgacagagctgggtgaattgctcatcagtgggttgcgggagcaccataccgcgcatcggtgttgttagtactcccctcatcggcacctctgacgagcaagtgattgaggacccaggtgttcagcaggtagaagttactgagcaggagcacattgaagccatgtcaaaggaagttgcaagggcgacctagaactcaacatatgataagggtttagtcgatgtactacatgactacaaagataacccaaagttgaagggtcaaaatggatggaattcagagggatggaagtgtatcactgctaagtttaatgaaaggttctcttggctcatttcacaaaacaacaactacaagagaaggagaaagaacttaaatcaagctataaaacagtaagagattcaagaaaggaaagtgagactggttcgaatgactccctatgtatgatattggctgaactagaggtttgggcaaggctcacccaaaggttgcaaggtttcgcaagaagccatttcctcttttctactctttagaagcactttatgaaggtagtgtggctacgggagacttaaatttcacatcaagtcaacaactgcctccttatgctcctctatccgttgatactcttgcttctcctgctattgttcctcctcttgctcctcctgctagtgttcctcctggtcctacttttgttgttccttcagctaggagtacatctgaatagaatctccatccattcaatacaaatccatttgatttggatggataagagatgacaagtgaagctcaatctgtgtcagctattcatgaagcaagagagggagaaggtagcaaaagcagaaagcgtaagcagagtcatgtgggagcagctctcgaagactatgtggagttcaaaaagagccaaactaacaagacacttgatgctcttaaagaactttccatgaggaagtgtatgaaggaaatggaagcaatggatggattcacagatgaggagaagtcatatgatgtggaggtctttgagtccgagattaatagagaggctttcatgtcaacaatgaaccacaatgttcgaagaatgtggctaaaacgcaaaatc

SEQ ID NO: 217746 - DNA, 1406 bp, Zea Mays
agaatatccatcagtattctacaatgatcaatacagatcattgatccctttcatttcatggtctattcaaaaggaaaatccacttctgagattaacagttgagaactgtgagttgtccagtattggtgtgattatacttctggagtgcctcacaaatgcgaagcaactccttgatgtgctatctattgcagacaatcatctagggagttctgtggcagctgcattggccagattcttgggttcacatgtacgggctttaaatgctacagatatcggcttgggaacagtaggcttccaaatacttgaggaaacattgccaacagaagtagctctttcccacatcaacatcaggtagaaccaagcacttccactcagcatagatgtctgtttcctcactgacattatttatattttgtagtaagaatcgtggtgggatcagagcagcatattttgtttccagattaatatgtcgagcaccagaccttgtctcagtcaatgcagcagggaaccttttaccacctgaatcattggaagtcatctgtaactccttgaagcaagggacttgtaatttggagcgagtggacctgactggcaacatgcatttatcaagcaatatttttcctgcattccttgaattcaagaagcatggaaagccaattctggtagtaccaccaaacttgagcacttctgctccatatgatgatgacccatgactactatgtaccgtataagccctagtgctgctcaagtcacttcagttggaactaaataaatagtgatagtatttttttggatcattcccaagaatcctaaccactagatcaaaacacaacacaaattgtacatctgtttagattcgacacggctttcgtcggtgaagctttgcgctagggcagcgacggtcgggaaagcgagcttgatgtcgacggtggactttctgttgctgacagacttccctctagatcggttaaggtttgaggtggagatcgaaaatgattgtgaatcttgtacctttaggtgtcggcctccacctctttatttatagggctacgcaacagatgctcaacaaccttgatgctctcgatcagggcgtgaggtcaggggtctagttttcggttgggtcaagttgggtcaactagtggagatcaattctaacattttcccctttaatctcattttataccttcagctttatacctttaatttttttgatattccattatagataagtgcatagagcatgtttcatcgtcacgattaatcaccgatagacttagcaactacagtacatatctctatcctgaaatagattctttaactttgggccttttattgttcggaaaacataggctatactataaacccatgtcgattgtgtgttttctgaacgcactggttggttagtc

SEQ ID NO: 217747 - DNA, 1966 bp, Zea Mays
ctgctttctgtcgagccgttgccagagaagcagcctcgctgccatgttcgtcaggaaccagagaaaataaaaaacaacgattttaccatctttgccaaaaagaagttaatggtgcatgtttgcttctgagctggcatgcagagacactgctttctcttgaattcatccattgtcagctttatcctaccgtcatggataaaatttgcatgagtgtgtacctgaagggatctcaaagccatggaatccaacaatttagtattaagtcgtcacaaatctgtgaaaccaagcctctgaccatctcttctggtctgttcaaaattttgtcatctggcaagtcgttgcacctgctgtcacttcgtgatattaagatgcagtcaccatttgctcggatgattattcacactcttctcgagtcgtcatgtgatttacacacacttgagatatcagaaaacaatattgctggctggctttcggaattgaacaaatgttctacaaacttattagcgctgaaatcagatatttttatgaactccctgtctgttcttaacctgagggaaaataatttgcaaaaggatgatgttgtagatcttcacaaaattctaataaaaatgcctaacttaagagatttagatataagtggcaatccagtcatggatgaaggtatcagatcattgatccctttcatttcatggtctattcaaaaggaaaatccacttctgagattaacagttgagaactgtgagttgtccagtattggtgtgattatacttctggagtgcctcacaaatgcgaagcaactccttgatgtgctatctattgcagacaatcatctagggagttctgtggcagctgcattggccagattcttgggttcacatgtacgggctttaaatgctacagatatcggcttgggaacagtaggcttccaaatacttgaggaaacattgccaacagaagtagctctttcccacatcaacatcagaatcgtggtgggatcagagcagcatattttgtttccagattaatatgtcgagcaccagaccttgtctcagtcaatgcagcagggaaccttttaccacctgaatcattggaagtcatctgtaactccttgaagcaagggacttgtaatttggagcgagtggacctgactggcaacatgcatttatcaagcaatatttttcctgcattccttgaattcaagaagcatggaaagccaattctggtagtaccaccaaacttgagcacttctgctccatatgatgatgacccatgactactatgtaccgtataagccctagtgctgctcaagtcacttcagttggaactaaataaatagtgatagtatttttttggatcattcccaagaatcctaaccactagatcaaaacacaacacaaattgtacatctgtttagattcgacacggctttcgtcggtgaagctttgcgctagggcagcgacggtcgggaaagcgagcttgatgtcgacggtggactttctgttgctgacagacttccctctagatcggttaaggtttgaggtggagatcgaaaatgattgtgaatcttgtacctttaggtgtcggcctccacctctttatttatagggctacgcaacagatgctcaacaaccttgatgctctcgatcagggcgtgaggtcaggggtctagttttcggttgggtcaagttgggtcaactagtggagatcaattctaacattttcccctttaatctcattttataccttcagctttatacctttaatttttttgatattccattatagataagtgcatagagcatgtttcatcgtcacgattaatcaccgatagacttagcaactacagtacatatctctatcctgaaatagattctttaactttgggccttttattgttcggaaaacataggctatactataaacccatgtcgattgtgtgttttctgaacgcactggttggttagtc

SEQ ID NO: 217748 - DNA, 2189 bp, Zea Mays
aatgcaataatgcatgattaaaaagaacagcagcatggccatcaacatacgctaaaatcatgaattccatctaccagagcatgggcacatctcaacaacattcaagattagcatatcaatgcagcaaatttggttgctatgtgaggagcttgagactgcaaggtgttctttgcactgcagaaacttatgtcttgttgcaacaatgcaagctggaaagattaatgttcataagaattatatcagacctagaggttaatggtgcatgtttgcttctgagctggcatgcagagacactgctttctcttgaattcatccattgtcagctttatcctaccgtcatggataaaatttgcatgagtgtgtacctgaagggatctcaaagccatggaatccaacaatttagtattaagtcgtcacaaatctgtgaaaccaagcctctgaccatctcttctggtctgttcaaaattttgtcatctggtcgttgcacctgctgtcacttcgtgatattaagatgcagtcaccatttgctcggatgattattcacactcttctcgagtcgtcatgtgatttacacacacttgagatatcagaaaacaatgtgggttgacatgaaaaatatattcttaatttccttttacttattttctatctggtaaattggttgttttttgtagattgctggctggctttcggaattgaacaaatgttctacaaacttattagcgctgaaatcagatatttttatgaactccctgtctgttcttaacctgagggaaaataatttgcaaaaggatgatgttgtagatcttcacaaaattctaataaaaatgcctaacttaagagatttagatataagtggcaatccagtcatggatgaaggtatcagatcattgatccctttcatttcatggtctattcaaaaggaaaatccacttctgagattaacagttgagaactgtgagttgtccagtattggtgtgattatacttctggagtgcctcacaaatgcgaagcaactccttgatgtgctatctattgcagacaatcatctagggagttctgtggcagctgcattggccagattcttgggttcacatgtacgggctttaaatgctacagatatcggcttgggaacagtaggcttccaaatacttgaggaaacattgccaacagaagtagctctttcccacatcaacatcagtaagaatcgtggtgggatcagagcagcatattttgtttccagattaatatgtcgagcaccagaccttgtctcagtcaatgcagcagggaaccttttaccacctgaatcattggaagtcatctgtaactccttgaagcaagggacttgtaatttggagcgagtggacctgactggcaacatgcatttatcaagcaatatttttcctgcattccttgaattcaagaagcatggaaagccaattctggtagtaccaccaaacttgagcacttctgctccatatgatgatgacccatgactactatgtaccgtataagccctagtgctgctcaagtcacttcagttggaactaaataaatagtgatagtatttttttggatcattcccaagaatcctaaccactagatcaaaacacaacacaaattgtacatctgtttagattcgacacggctttcgtcggtgaagctttgcgctagggcagcgacggtcgggaaagcgagcttgatgtcgacggtggactttctgttgctgacagacttccctctagatcggttaaggtttgaggtggagatcgaaaatgattgtgaatcttgtacctttaggtgtcggcctccacctctttatttatagggctacgcaacagatgctcaacaaccttgatgctctcgatcagggcgtgaggtcaggggtctagttttcggttgggtcaagttgggtcaactagtggagatcaattctaacattttcccctttaatctcattttataccttcagctttatacctttaatttttttgatattccattatagataagtgcatagagcatgtttcatcgtcacgattaatcaccgatagacttagcaactacagtacatatctctatcctgaaatagattctttaactttgggccttttattgttcggaaaacataggctatactataaacccatgtcgattgtgtgttttctgaacgcactggttggttagtc

SEQ ID NO: 217749 - DNA, 2488 bp, Zea Mays
gtggcgaccggcacatcaacatcagagagagggtggaacagacagagaaagagggactgtggtgtgcacatggaggagctctccaacaaggctctggcaccaagcttgctttcgctgtgcctggatgcggtagctgatcgtctcatcagcgacaacgccgccgcaggcggcggcgtgggccgaacgggttcgtcaggagggtgcagcggcggcggcggtctcgccggattctcggaagatgatggaggggaggcagacgaggaccgcctgcatccacaggagttggcggaggggcttccctgggagcttctccatcggctggcgtcccggctcccgcctgtcgtacttgagtcactccatcacgctgcacatgcccgatactgttctgctgaaactacttctggacttggagtgcaagatggagaaagacgtggggtgaaacgttcaaggtgtgaagatttcaacagcacttggcagttgttgttcaaacttcgctggcccctgggtggtaatactggacataataatttggtcactgtggattggcagcaaaagtattgggaaaagcatttacaagagtgtttaaatgaagctgcagaacatgcttttcttccttttttttgtgggagtattggtgagctgagtatatcagctaaaatcatgaattccatctaccagagcatgggcacatctcaacaacattcaagattagcatatcaatgcagcaaatttggttgctatgtgaggagcttgagactgcaaggtgttctttgcactgcagaaacttatgtcttgttgcaacaatgcaagctggaaagattaatgttcataagaattatatcagacctagaggtcgttgcacctgctgtcacttcgtgatattaagatgcagtcaccatttgctcggatgattattcacactcttctcgagtcgtcatgtgatttacacacacttgagatatcagaaaacaatattgctggctggctttcggaattgaacaaatgttctacaaacttattagcgctgaaatcagatatttttatgaactccctgtctgttcttaacctgagggaaaataatttgcaaaaggatgatgttgtagatcttcacaaaattctaataaaaatgcctaacttaagagatttagatataagtggcaatccagtcatggatgaaggtatcagatcattgatccctttcatttcatggtctattcaaaaggaaaatccacttctgagattaacagttgagaactgtgagttgtccagtattggtgtgattatacttctggagtgcctcacaaatgcgaagcaactccttgatgtgctatctattgcagacaatcatctagggagttctgtggcagctgcattggccagattcttgggttcacatgtacgggctttaaatgctacagatatcggcttgggaacagtaggcttccaaatacttgaggaaacattgccaacagaagtagctctttcccacatcaacatcagtaagaatcgtggtgggatcagagcagcatattttgtttccagattaatatgtcgagcaccagaccttgtctcagtcaatgcagcagggaaccttttaccacctgaatcattggaagtcatctgtaactccttgaagcaagggacttgtaatttggagcgagtggacctgactggcaacatgcatttatcaagcaatatttttcctgcattccttgaattcaagaagcatggaaagccaattctggtagtaccaccaaacttgagcacttctgctccatatgatgatgacccatgactactatgtaccgtataagccctagtgctgctcaagtcacttcagttggaactaaataaatagtgatagtatttttttggatcattcccaagaatcctaaccactagatcaaaacacaacacaaattgtacatctgtttagattcgacacggctttcgtcggtgaagctttgcgctagggcagcgacggtcgggaaagcgagcttgatgtcgacggtggactttctgttgctgacagacttccctctagatcggttaaggtttgaggtggagatcgaaaatgattgtgaatcttgtacctttaggtgtcggcctccacctctttatttatagggctacgcaacagatgctcaacaaccttgatgctctcgatcagggcgtgaggtcaggggtctagttttcggttgggtcaagttgggtcaactagtggagatcaattctaacattttcccctttaatctcattttataccttcagctttatacctttaatttttttgatattccattatagataagtgcatagagcatgtttcatcgtcacgattaatcaccgatagacttagcaactacagtacatatctctatcctgaaatagattctttaactttgggccttttattgttcggaaaacataggctatactataaacccatgtcgattgtgtgttttctgaacgcactggttggttagtc

SEQ ID NO: 217750 - DNA, 2718 bp, Zea Mays
gtggcgaccggcacatcaacatcagagagagggtggaacagacagagaaagagggactgtggtgtgcacatggaggagctctccaacaaggctctggcaccaagcttgctttcgctgtgcctggatgcggtagctgatcgtctcatcagcgacaacgccgccgcaggcggcggcgtgggccgaacgggttcgtcaggagggtgcagcggcggcggcggtctcgccggattctcggaagatgatggaggggaggcagacgaggaccgcctgcatccacaggagttggcggaggggcttccctgggagcttctccatcggctggcgtcccggctcccgcctgtcgtacttgagtcactccatcacgctgcacatgcccgatactgttctgctgaaactacttctggacttggagtgcaagatggagaaagacgtggggtgaaacgttcaaggtgtgaagatttcaacagcacttggcagttgttgttcaaacttcgctggcccctgggtggtaatactggacataataatttggtcactgtggattggcagcaaaagtattgggaaaagcatttacaagagtgtttaaatgaagctgcagaacatgcttttcttccttttttttgtgggagtattggtgagctgagtatatcagctaaaatcatgaattccatctaccagagcatgggcacatctcaacaacattcaagattagcatatcaatgcagcaaatttggttgctatgtgaggagcttgagactgcaaggtgttctttgcactgcagaaacttatgtcttgttgcaacaatgcaagctggaaagattaatgttcataagaattatatcagacctagaggttaatggtgcatgtttgcttctgagctggcatgcagagacactgctttctcttgaattcatccattgtcagctttatcctaccgtcatggataaaatttgcatgagtgtgtacctgaagggatctcaaagccatggaatccaacaatttagtattaagtcgtcacaaatctgtgaaaccaagcctctgaccatctcttctggtctgttcaaaattttgtcatctggcaagtcgttgcacctgctgtcacttcgtgatattaagatgcagtcaccatttgctcggatgattattcacactcttctcgagtcgtcatgtgatttacacacacttgagatatcagaaaacaatattgctggctggctttcggaattgaacaaatgttctacaaacttattagcgctgaaatcagatatttttatgaactccctgtctgttcttaacctgagggaaaataatttgcaaaaggatgatgttgtagatcttcacaaaattctaataaaaatgcctaacttaagagatttagatataagtggcaatccagtcatggatgaaggtatcagatcattgatccctttcatttcatggtctattcaaaaggaaaatccacttctgagattaacagttgagaactgtgagttgtccagtattggtgtgattatacttctggagtgcctcacaaatgcgaagcaactccttgatgtgctatctattgcagacaatcatctagggagttctgtggcagctgcattggccagattcttgggttcacatgtacgggctttaaatgctacagatatcggcttgggaacagtaggcttccaaatacttgaggaaacattgccaacagaagtagctctttcccacatcaacatcagtaagaatcgtggtgggatcagagcagcatattttgtttccagattaatatgtcgagcaccagaccttgtctcagtcaatgcagcagggaaccttttaccacctgaatcattggaagtcatctgtaactccttgaagcaagggacttgtaatttggagcgagtggacctgactggcaacatgcatttatcaagcaatatttttcctgcattccttgaattcaagaagcatggaaagccaattctggtagtaccaccaaacttgagcacttctgctccatatgatgatgacccatgactactatgtaccgtataagccctagtgctgctcaagtcacttcagttggaactaaataaatagtgatagtatttttttggatcattcccaagaatcctaaccactagatcaaaacacaacacaaattgtacatctgtttagattcgacacggctttcgtcggtgaagctttgcgctagggcagcgacggtcgggaaagcgagcttgatgtcgacggtggactttctgttgctgacagacttccctctagatcggttaaggtttgaggtggagatcgaaaatgattgtgaatcttgtacctttaggtgtcggcctccacctctttatttatagggctacgcaacagatgctcaacaaccttgatgctctcgatcagggcgtgaggtcaggggtctagttttcggttgggtcaagttgggtcaactagtggagatcaattctaacattttcccctttaatctcattttataccttcagctttatacctttaatttttttgatattccattatagataagtgcatagagcatgtttcatcgtcacgattaatcaccgatagacttagcaactacagtacatatctctatcctgaaatagattctttaactttgggccttttattgttcggaaaacataggctatactataaacccatgtcgattgtgtgttttctgaacgcactggttggttagtc

SEQ ID NO: 217751 - DNA, 2593 bp, Zea Mays
gtggcgaccggcacatcaacatcagagagagggtggaacagacagagaaagagggactgtggtgtgcacatggaggagctctccaacaaggctctggcaccaagcttgctttcgctgtgcctggatgcggtagctgatcgtctcatcagcgacaacgccgccgcaggcggcggcgtgggccgaacgggttcgtcaggagggtgcagcggcggcggcggtctcgccggattctcggaagatgatggaggggaggcagacgaggaccgcctgcatccacaggagttggcggaggggcttccctgggagcttctccatcggctggcgtcccggctcccgcctgtcgtacttgagtcactccatcacgctgcacatgcccgatactgttctgctgaaactacttctggacttggagtgcaagatggagaaagacgtggggtgaaacgttcaaggtgtgaagatttcaacagcacttggcagttgttgttcaaacttcgctggcccctgggtggtaatactggacataataatttggtcactgtggattggcagcaaaagtattgggaaaagcatttacaagagtgtttaaatgaagctgcagaacatgcttttcttccttttttttgtgggagtattggtgagctgagtatatcagctaaaatcatgaattccatctaccagagcatgggcacatctcaacaacattcaagattagcatatcaatgcagcaaatttggttgctatgtgaggagcttgagactgcaaggtgttctttgcactgcagaaacttatgtcttgttgcaacaatgcaagctggaaagattaatgttcataagaattatatcagacctagaggttaatggtgcatgtttgcttctgagctggcatgcagagacactgctttctcttgaattcatccattgtcagctttatcctaccgtcatggataaaatttgcatgagtgtgtacctgaagggatctcaaagccatggaatccaacaatttagtattaagtcgtcacaaatctgtgaaaccaagcctctgaccatctcttctggtctgttcaaaattttgtcatctgattgctggctggctttcggaattgaacaaatgttctacaaacttattagcgctgaaatcagatatttttatgaactccctgtctgttcttaacctgagggaaaataatttgcaaaaggatgatgttgtagatcttcacaaaattctaataaaaatgcctaacttaagagatttagatataagtggcaatccagtcatggatgaaggtatcagatcattgatccctttcatttcatggtctattcaaaaggaaaatccacttctgagattaacagttgagaactgtgagttgtccagtattggtgtgattatacttctggagtgcctcacaaatgcgaagcaactccttgatgtgctatctattgcagacaatcatctagggagttctgtggcagctgcattggccagattcttgggttcacatgtacgggctttaaatgctacagatatcggcttgggaacagtaggcttccaaatacttgaggaaacattgccaacagaagtagctctttcccacatcaacatcagtaagaatcgtggtgggatcagagcagcatattttgtttccagattaatatgtcgagcaccagaccttgtctcagtcaatgcagcagggaaccttttaccacctgaatcattggaagtcatctgtaactccttgaagcaagggacttgtaatttggagcgagtggacctgactggcaacatgcatttatcaagcaatatttttcctgcattccttgaattcaagaagcatggaaagccaattctggtagtaccaccaaacttgagcacttctgctccatatgatgatgacccatgactactatgtaccgtataagccctagtgctgctcaagtcacttcagttggaactaaataaatagtgatagtatttttttggatcattcccaagaatcctaaccactagatcaaaacacaacacaaattgtacatctgtttagattcgacacggctttcgtcggtgaagctttgcgctagggcagcgacggtcgggaaagcgagcttgatgtcgacggtggactttctgttgctgacagacttccctctagatcggttaaggtttgaggtggagatcgaaaatgattgtgaatcttgtacctttaggtgtcggcctccacctctttatttatagggctacgcaacagatgctcaacaaccttgatgctctcgatcagggcgtgaggtcaggggtctagttttcggttgggtcaagttgggtcaactagtggagatcaattctaacattttcccctttaatctcattttataccttcagctttatacctttaatttttttgatattccattatagataagtgcatagagcatgtttcatcgtcacgattaatcaccgatagacttagcaactacagtacatatctctatcctgaaatagattctttaactttgggccttttattgttcggaaaacataggctatactataaacccatgtcgattgtgtgttttctgaacgcactggttggttagtc

SEQ ID NO: 217752 - DNA, 2600 bp, Zea Mays
ccggtggcgaccggcacatcaacatcagagagagggtggaacagacagagaaagagggactgtggtgtgcacatggaggagctctccaacaaggctctggcaccaagcttgctttcgctgtgcctggatgcggtagctgatcgtctcatcagcgacaacgccgccgcaggcggcggcgtgggccgaacgggttcgtcaggagggtgcagcggcggcggcggtctcgccggattctcggaagatgatggaggggaggcagacgaggaccgcctgcatccacaggagttggcggaggggcttccctgggagcttctccatcggctggcgtcccggctcccgcctgtcgtacttgagtcactccatcacgctgcacatgcccgatactgttctgctgaaactacttctggacttggagtgcaagatggagaaagacgtggggtgaaacgttcaaggtgtgaagatttcaacagcacttggcagttgttgttcaaacttcgctggcccctgggtggtaatactggacataataatttggtcactgtggattggcagcaaaagtattgggaaaagcatttacaagagtgtttaaatgaagctgcagaacatgcttttcttccttttttttgtgggagtattggtgagctgagtatatcagctaaaatcatgaattccatctaccagagcatgggcacatctcaacaacattcaagattagcatatcaatgcagcaaatttggttgctatgtgaggagcttgagactgcaaggtgttctttgcactgcagaaacttatgtcttgttgcaacaatgcaagctggaaagattaatgttcataagaattatatcagacctagaggttaatggtgcatgtttgcttctgagctggcatgcagagacactgctttctcttgaattcatccattgtcagctttatcctaccgtcatggataaaatttgcatgagtgtgtacctgaagggatctcaaagccatggaatccaacaatttagtattaagtcgtcacaaatctgtgaaaccaagcctctgaccatctcttctggtctgttcaaaattttgtcatctggcaaattgctggctggctttcggaattgaacaaatgttctacaaacttattagcgctgaaatcagatatttttatgaactccctgtctgttcttaacctgagggaaaataatttgcaaaaggatgatgttgtagatcttcacaaaattctaataaaaatgcctaacttaagagatttagatataagtggcaatccagtcatggatgaaggtatcagatcattgatccctttcatttcatggtctattcaaaaggaaaatccacttctgagattaacagttgagaactgtgagttgtccagtattggtgtgattatacttctggagtgcctcacaaatgcgaagcaactccttgatgtgctatctattgcagacaatcatctagggagttctgtggcagctgcattggccagattcttgggttcacatgtacgggctttaaatgctacagatatcggcttgggaacagtaggcttccaaatacttgaggaaacattgccaacagaagtagctctttcccacatcaacatcagtaagaatcgtggtgggatcagagcagcatattttgtttccagattaatatgtcgagcaccagaccttgtctcagtcaatgcagcagggaaccttttaccacctgaatcattggaagtcatctgtaactccttgaagcaagggacttgtaatttggagcgagtggacctgactggcaacatgcatttatcaagcaatatttttcctgcattccttgaattcaagaagcatggaaagccaattctggtagtaccaccaaacttgagcacttctgctccatatgatgatgacccatgactactatgtaccgtataagccctagtgctgctcaagtcacttcagttggaactaaataaatagtgatagtatttttttggatcattcccaagaatcctaaccactagatcaaaacacaacacaaattgtacatctgtttagattcgacacggctttcgtcggtgaagctttgcgctagggcagcgacggtcgggaaagcgagcttgatgtcgacggtggactttctgttgctgacagacttccctctagatcggttaaggtttgaggtggagatcgaaaatgattgtgaatcttgtacctttaggtgtcggcctccacctctttatttatagggctacgcaacagatgctcaacaaccttgatgctctcgatcagggcgtgaggtcaggggtctagttttcggttgggtcaagttgggtcaactagtggagatcaattctaacattttcccctttaatctcattttataccttcagctttatacctttaatttttttgatattccattatagataagtgcatagagcatgtttcatcgtcacgattaatcaccgatagacttagcaactacagtacatatctctatcctgaaatagattctttaactttgggccttttattgttcggaaaacataggctatactataaacccatgtcgattgtgtgttttctgaacgcactggttggttagtc

SEQ ID NO: 217753 - DNA, 2384 bp, Zea Mays
gattcgccgggcggccggtggcgaccggcacatcaacatcagagagagggtggaacagacagagaaagagggactgtggtgtgcacatggaggagctctccaacaaggctctggcaccaagcttgctttcgctgtgcctggatgcggtagctgatcgtctcatcagcgacaacgccgccgcaggcggcggcgtgggccgaacgggttcgtcaggagggtgcagcggcggcggcggtctcgccggattctcggaagatgatggaggggaggcagacgaggaccgcctgcatccacaggagttggcggaggggcttccctgggagcttctccatcggctggcgtcccggctcccgcctgtcgtacttgagtcactccatcacgctgcacatgcccgatactgttctgctgaaactacttctggacttggagtgcaagatggagaaagacgtggggtgaaacgttcaaggtgtgaagatttcaacagcacttggcagttgttgttcaaacttcgctggcccctgggtggtaatactggacataataatttggtcactgtggattggcagcaaaagtattgggaaaagcatttacaagagtgtttaaatgaagctgcagaacatgcttttcttccttttttttgtgggagtattggtgagctgagtatatcagctaaaatcatgaattccatctaccagagcatgggcacatctcaacaacattcaagattagcatatcaatgcagcaaatttggttgctatgtgaggagcttgagactgcaaggtgttctttgcactgcagaaacttatgtcttgttgcaacaatgcaagctggaaagattaatgttcataagaattatatcagacctagagattgctggctggctttcggaattgaacaaatgttctacaaacttattagcgctgaaatcagatatttttatgaactccctgtctgttcttaacctgagggaaaataatttgcaaaaggatgatgttgtagatcttcacaaaattctaataaaaatgcctaacttaagagatttagatataagtggcaatccagtcatggatgaaggtatcagatcattgatccctttcatttcatggtctattcaaaaggaaaatccacttctgagattaacagttgagaactgtgagttgtccagtattggtgtgattatacttctggagtgcctcacaaatgcgaagcaactccttgatgtgctatctattgcagacaatcatctagggagttctgtggcagctgcattggccagattcttgggttcacatgtacgggctttaaatgctacagatatcggcttgggaacagtaggcttccaaatacttgaggaaacattgccaacagaagtagctctttcccacatcaacatcagtaagaatcgtggtgggatcagagcagcatattttgtttccagattaatatgtcgagcaccagaccttgtctcagtcaatgcagcagggaaccttttaccacctgaatcattggaagtcatctgtaactccttgaagcaagggacttgtaatttggagcgagtggacctgactggcaacatgcatttatcaagcaatatttttcctgcattccttgaattcaagaagcatggaaagccaattctggtagtaccaccaaacttgagcacttctgctccatatgatgatgacccatgactactatgtaccgtataagccctagtgctgctcaagtcacttcagttggaactaaataaatagtgatagtatttttttggatcattcccaagaatcctaaccactagatcaaaacacaacacaaattgtacatctgtttagattcgacacggctttcgtcggtgaagctttgcgctagggcagcgacggtcgggaaagcgagcttgatgtcgacggtggactttctgttgctgacagacttccctctagatcggttaaggtttgaggtggagatcgaaaatgattgtgaatcttgtacctttaggtgtcggcctccacctctttatttatagggctacgcaacagatgctcaacaaccttgatgctctcgatcagggcgtgaggtcaggggtctagttttcggttgggtcaagttgggtcaactagtggagatcaattctaacattttcccctttaatctcattttataccttcagctttatacctttaatttttttgatattccattatagataagtgcatagagcatgtttcatcgtcacgattaatcaccgatagacttagcaactacagtacatatctctatcctgaaatagattctttaactttgggccttttattgttcggaaaacataggctatactataaacccatgtcgattgtgtgttttctgaacgcactggttggttagtc

SEQ ID NO: 217754 - DNA, 4700 bp, Zea Mays
ctgatttccgttcaagattagtagctgctctgcttcagcggtacatgtcatacatgaatggacatgggcaggcactcccactgagggtgcttcttggctttgtctgcagaggcttgctgatacttggcataggatattgttaattccagtgacaggtggagtagttgtgggtatgatgcatggattatttgagaactttgagtagataaagcaatcattatcatctcaaagggagggtttgatttcatggccgtgataccccctccctccttgtcaaagccatccaagccgcaattactttagggacagggtgttcacttgggctagaaagattctgtttttattgcacgacacatggcaacatgtccaagtagtccttaacttgattcatttagctggtagtgagcgtcttgctaaaagtggctccacaggtgaacttaggtgagtgtttggttaccatgtatttccagatcaatgacatactaaaattgttctttgcacatgtaaatacaaaaaaggtacatgtcttccctgtcgagccccaaaaataaatgacatgcaacccaataaatcctttttgtattttttataagaaatgacagaaaaaatcctcggcgttaaaataagtgaaagattctaacaaccactaattatcttccaaaaaatcaattattatttatgcaccaagttgtaacaatactaaaaccatattcctttcatctcattttatcagtttaacacaatagttttaataagttcaataccacactgaaaagagtgaaccaatgatttgtcatagactacaggcattagctctcttttgatactaaatccatattcctttcatcctttgatctcatttgatctgtttaatacattgattttagtatattcaacatcacactacaagcatggttattttttataaagatgcctaccattttttatcggtcaggcaacttctcaaaattgttccataacacaatatttaccaatctatacatccatacatcattcaggaatgctagatcttgatagcgagacaacgttcttcggtgtttttgatggtcatggaggtaatcacaatatgtgctttttatgttccgttgaattagactgcctacgaggaataccattatgccaagtatttatagaacctaactttaacattacacaacctcataccattgctttacttaagaagagtagctgtcaaattctgtacagaatacctgcataatcaagttctcaaaagtgaagcctattcagttggtgacctaggtcctactgtcctaataaagcttaaatatttgttatatgtatacaacaaacacaaagtttattgtgtaaatgctttgttgatagtggctttctaattgaacatatatccctataactgcatatatgtattgagtatgataatgttatctgcatttaaatggatctgtgggtaagactcatatgaatgaacagtcgtccagaggccattttgtatttaaattaaatatatccgaatctaatgaggtagaatggaacattcacaattatcataccaagatctactaaaatatagtgttccttatgctctctttcagactggcgacaatccctttttagacaaatattttgcatgctaaataactaatcctgagaaagtatagctcccatttttttggttgaagaaaacaggccaacccagccaaagagtcattaacttgattgattttgctgcaacgagcgttttgctaaaagtggttacataggtgatcgcttgaaggaaactcaggtgagtgtttggttaccataatttttcaaatttcttagtgattctggtcatcatacaacttttttatttgaggaaacacaagtttagacggagttttactgctttactttgaagaaagtgacttttgttctcagtgggcctaaagagaatacctgatttaaggcattacgccatgcctagttgctatttctgattagtaatctcactatagtgtatgccaaacagacgtttcatgtccaatgtgcataccatactatttccagcctaatgctctaattctaggacacaacaaacttcacatacatcatgtcatgttctactttgttaagacttaataataatctataaaataattgttaacaactgtgaaattaggacaattttaaaaatatcgctaaataaaatcaactaataatggtcagccaaaacctgcacttatgattctgcttaaagttcttcctgtatctttacataaagttccatttgtgaaaaaaagatacaaatacaaattagtccataaatgaaaatatatgtaacaactcattatattttccataattcatcaacaggttcaaggacccatgagtatccgaaatcttcccaaaactaaatgttgccttctaccatcaacaacctttgaagttctagggtgtttatttttgtatgctctctacaattatgtatatatatatatatgtttcttcatccttttcaagaaaatttgtataaatataacaacttaatttcaaacgttgaaacacgataatttacctaactctatttagatgagtatatgtatatcttgctcaaaatgttatcacttatattataatttttcccacgcgcgcaatgcgcgcgccagttactagtgttaatcatgtatggcctgtacatgccactgtgccagggcctaattgcttccaagctaaggactcgatcccgcccgtgttgaaaaattaataggacctaagattaatttgataatgcagcacaaaacgaaaaatccagatctactggcagataatatcaacgatattagaacagaacagatctgaactaactcaacaagattaactcataacataagaatcgacaacggatctaaccataagaccgtcatcgcaataatctgaaaccgcagatttactcacagtgatttccacgagtgttgaagaagagcccgagcggacgtgcatgaagcacttcccagaaacctgattcgccggcactcgtgcaggtcatcaaaacgccgacagtggtttagagacatcgctctcccttgatctgctgcacggcagacgaagggacgacagggcagagaagcgacgacacagagaattgaaaagaagaggatgagtctgttgctattcgcctctgtcctccgaccgaaggacacctgccctttatagacgggccgcaacaaccccttgattcgatttgctatattgcaggaaccgccccctgaaatatctctacgtgcaaccgcttggagatctcgcacgtaacgtgcgtgcccgttactcctggttgatgtggcagtctaggtgtgatatttgataaccaaataaacaaaaggcaaaaattaaactgtcgtttagaacatgtcatgacgcgatcactcagtgtcacaagtcacatgtcacacgataaataacacgaaaaaacgtgaaacgcgagcaagctcgcgcgtgtggcagcctccatagccctttaaatgatatggtttgtgtgtagatttgaccggcggaagcaaaagaagataacagactttcgtcaacatcatctggaatttattgaagagtgggatttggctgaggagaatgtgcatgaaaacgatgagttgcacaacaacagtgactacaggcggtaccaagcttggtaccagggtgcgactcattgtaagcttcgccagcagtggacatcggatgactacgccgacattgattcttccgacgatgaagacacggagtacgaccagaccactagactaggaacccaagtggaggcggcacctatcttggatcgagtgggtaacacattgagacgctcggtacaggacattgatcgccagcttttgattgtgggtgaccacaacatgcgtagcttcttggagcgtttatctaggcgcctacgtggagctgctgctcgctgtggctgcaggaccaatgttgcacattacgttcatgtaccgttgtatagccacacaacaatgccatctataagattggacgttggcttggactatgatcagaatgagatcagaccttcacagattctgaagtttttaggaggaaaggctttaggaggaaaggctttatattactatatatacgcttgtgcaaagcaaggaagggcggagatatctcgcatgatctggaagccgccgccgtcgaatgaaagcatcacaaatggccacttggagacaccgacaccgtcgtgcacagaggtggcgcagaacgacgctgcaagggtgccgcgcggggcacacacgaaggcagtgacggatggggagggcaggcacgaggaagtgaagccggaactggatgggacgcggcgccagagtttgaggatgcggcggaggagcttgagcgacgtcactgcaaggtccggcgagcaacaagcctggtggcggtggcggcggcaggacgaggaaaagcgcgagagcgcaagagaagacgcgaaggcggcgagacgacgacaggagcatgtggtggcgagcggcgtgaggagggtgaggatgcacagcagcacatcctccgctgtgcgttttagacacgaggaagggtctagactctataggaagctgcttcagcagtccaccgtcctgcttaaaccgccccttattttagataccaagaaaaaatggagcggtcatgttgattttttatgtctatttcgaattgacaaatggtag

SEQ ID NO: 217755 - DNA, 5296 bp, Zea Mays
caccgctcctcactcagtatgcgcctgccgtccattactcctagacgcatcgcggcggatcgtctttctccgtgctccgcctcgccggcctcgtgcggtcgtgccccgcagccccgactccccatccgccgcctccacctcatgggccaccgggtccaccctcgctgtccagcttggcgacatctttgaccgtggtgtcgacgagctccgcctcctcgccccttctgctgaggcccacgtcggcgtatttctgccatagtcgacaaccaataggagcgtaaaactggagctagggattgcatttgttgcaggtacatgtcatacatgaatggacatgggcaggcactcccactgagggtgcttcttggctttgtctgcagaggcttgctgatacttggcataggatattgttaattccagtgacaggtggagtagttgtgggtatgatgcatggattatttgagaactttgagtagataaagcaatcattatcatctcaaagggagggtttgatttcatggccgtgataccccctccctccttgtcaaagccatccaagccgcaattactttagggacagggtgttcacttgggctagaaagattctgtttttattgcacgacacatggcaacatgtccaagtagtccttaacttgattcatttagctggtagtgagcgtcttgctaaaagtggctccacaggtgaacttaggtgagtgtttggttaccatgtatttccagatcaatgacatactaaaattgttctttgcacatgtaaatacaaaaaaggtacatgtcttccctgtcgagccccaaaaataaatgacatgcaacccaataaatcctttttgtattttttataagaaatgacagaaaaaatcctcggcgttaaaataagtgaaagattctaacaaccactaattatcttccaaaaaatcaattattatttatgcaccaagttgtaacaatactaaaaccatattcctttcatctcattttatcagtttaacacaatagttttaataagttcaataccacactgaaaagagtgaaccaatgatttgtcatagactacaggcattagctctcttttgatactaaatccatattcctttcatcctttgatctcatttgatctgtttaatacattgattttagtatattcaacatcacactacaagcatggttattttttataaagatgcctaccattttttatcggtcaggcaacttctcaaaattgttccataacacaatatttaccaatctatacatccatacatcattcaggaatgctagatcttgatagcgagacaacgttcttcggtgtttttgatggtcatggaggtaatcacaatatgtgctttttatgttccgttgaattagactgcctacgaggaataccattatgccaagtatttatagaacctaactttaacattacacaacctcataccattgctttacttaagaagagtagctgtcaaattctgtacagaatacctgcataatcaagttctcaaaagtgaagcctattcagttggtgacctaggtcctactgtcctaataaagcttaaatatttgttatatgtatacaacaaacacaaagtttattgtgtaaatgctttgttgatagtggctttctaattgaacatatatccctataactgcatatatgtattgagtatgataatgttatctgcatttaaatggatctgtgggtaagactcatatgaatgaacagtcgtccagaggccattttgtatttaaattaaatatatccgaatctaatgaggtagaatggaacattcacaattatcataccaagatctactaaaatatagtgttccttatgctctctttcagactggcgacaatccctttttagacaaatattttgcatgctaaataactaatcctgagaaagtatagctcccatttttttggttgaagaaaacaggccaacccagccaaagagtcattaacttgattgattttgctgcaacgagcgttttgctaaaagtggttacataggtgatcgcttgaaggaaactcaggtgagtgtttggttaccataatttttcaaatttcttagtgattctggtcatcatacaacttttttatttgaggaaacacaagtttagacggagttttactgctttactttgaagaaagtgacttttgttctcagtgggcctaaagagaatacctgatttaaggcattacgccatgcctagttgctatttctgattagtaatctcactatagtgtatgccaaacagacgtttcatgtccaatgtgcataccatactatttccagcctaatgctctaattctaggacacaacaaacttcacatacatcatgtcatgttctactttgttaagacttaataataatctataaaataattgttaacaactgtgaaattaggacaattttaaaaatatcgctaaataaaatcaactaataatggtcagccaaaacctgcacttatgattctgcttaaagttcttcctgtatctttacataaagttccatttgtgaaaaaaagatacaaatacaaattagtccataaatgaaaatatatgtaacaactcattatattttccataattcatcaacaggttcaaggacccatgagtatccgaaatcttcccaaaactaaatgttgccttctaccatcaacaacctttgaagttctagggtgtttatttttgtatgctctctacaattatgtatatatatatatatgtttcttcatccttttcaagaaaatttgtataaatataacaacttaatttcaaacgttgaaacacgataatttacctaactctatttagatgagtatatgtatatcttgctcaaaatgttatcacttatattataatttttcccacgcgcgcaatgcgcgcgccagttactagtgttaatcatgtatggcctgtacatgccactgtgccagggcctaattgcttccaagctaaggactcgatcccgcccgtgttgaaaaattaataggacctaagattaatttgataatgcagcacaaaacgaaaaatccagatctactggcagataatatcaacgatattagaacagaacagatctgaactaactcaacaagattaactcataacataagaatcgacaacggatctaaccataagaccgtcatcgcaataatctgaaaccgcagatttactcacagtgatttccacgagtgttgaagaagagcccgagcggacgtgcatgaagcacttcccagaaacctgattcgccggcactcgtgcaggtcatcaaaacgccgacagtggtttagagacatcgctctcccttgatctgctgcacggcagacgaagggacgacagggcagagaagcgacgacacagagaattgaaaagaagaggatgagtctgttgctattcgcctctgtcctccgaccgaaggacacctgccctttatagacgggccgcaacaaccccttgattcgatttgctatattgcaggaaccgccccctgaaatatctctacgtgcaaccgcttggagatctcgcacgtaacgtgcgtgcccgttactcctggttgatgtggcagtctaggtgtgatatttgataaccaaataaacaaaaggcaaaaattaaactgtcgtttagaacatgtcatgacgcgatcactcagtgtcacaagtcacatgtcacacgataaataacacgaaaaaacgtgaaacgcgagcaagctcgcgcgtgtggcagcctccatagccctttaaatgatatggtttgtgtgtagatttgaccggcggaagcaaaagaagataacagactttcgtcaacatcatctggaatttattgaagagtgggatttggctgaggagaatgtgcatgaaaacgatgagttgcacaacaacagtgactacaggcggtaccaagcttggtaccagggtgcgactcattgtaagcttcgccagcagtggacatcggatgactacgccgacattgattcttccgacgatgaagacacggagtacgaccagaccactagactaggaacccaagtggaggcggcacctatcttggatcgagtgggtaacacattgagacgctcggtacaggacattgatcgccagcttttgattgtgggtgaccacaacatgcgtagcttcttggagcgtttatctaggcgcctacgtggagctgctgctcgctgtggctgcaggaccaatgttgcacattacgttcatgtaccgttgtatagccacacaacaatgccatctataagattggacgttggcttggactatgatcagaatgagatcagaccttcacaggttcaggggccttgtcaaaaagccatacgatggtacttgaacggtccacgtagattgtcaaaaaaaaatttatgtgtgatatccggctacagagcagctcctagagagatctacagcttagctacagcatgtcaagttgctggaaacgtccatggactcattaaaaaatacgaatagcggaagagccgcttgtgtttcgtccttgggctcattaaaaaaagagccgcttgtgtttcttcatgtacacaacttggtgtaaaggggctaaagttttagaattatgatgcacatgaaatcttctgagaactaactgtaacatgttaagattctgaagtttttaggaggaaaggctttaggaggaaaggctttatattactatatatacgcttgtgcaaagcaaggaagggcggagatatctcgcatgatctggaagccgccgccgtcgaatgaaagcatcacaaatggccacttggagacaccgacaccgtcgtgcacagaggtggcgcagaacgacgctgcaagggtgccgcgcggggcacacacgaaggcagtgacggatggggagggcaggcacgaggaagtgaagccggaactggatgggacgcggcgccagagtttgaggatgcggcggaggagcttgagcgacgtcactgcaaggtccggcgagcaacaagcctggtggcggtggcggcggcaggacgaggaaaagcgcgagagcgcaagagaagacgcgaaggcggcgagacgacgacaggagcatgtggtggcgagcggcgtgaggagggtgaggatgcacagcagcacatcctccgctgtgcgttttagacacgaggaagggtctagactctataggaagctgcttcagcagtccaccgtcctgcttaaaccgccccttattttagataccaagaaaaaatggagcggtcatgttgattttttatgtctatttcgaattgacaaatggtag

SEQ ID NO: 217756 - DNA, 744 bp, Zea Mays
taacacattgagacgctcggtacaggacattgatcgccagcttttgattgtgggtgaccacaacatgcgtagcttcttggagcgtttatctaggcgcctacgtggagctgctgctcgctgtggctgcaggaccaatgttgcacattacgttcatgtaccgttgtatagccacacaacaatgccatctataagattggacgttggcttggactatgatcagaatgagatcagaccttcacaggttcaggggccttgtcaaaaagccatacgatggtacttgaacggtccacgtagattgtcaaaaaaaaatttatgtgtgatatccggctacagagcagctcctagagagatctacagcttagctacagcatgtcaagttgctggaaacgtccatggactcattaaaaaatacgaatagcggaagagccgcttgtgtttcgtccttgggctcattaaaaaaagagccgcttgtgtttcttcatgtacacaacttggtgtaaaggggctaaagttttagaattatgatgcacatgaaatcttctgagaactaactgtaacatgttaagattctgaagtttttaggaggaaaggctttaggaggaaaggctttatattactatatatacgcttgtgcaaagcaaggtagaaaaatacttttaccttgtattttctcaagaggagcctagtgaaggcaattcagttttttctttcttttggtactttgccttctggtcttcaaataag

SEQ ID NO: 217757 - DNA, 305 bp, Zea Mays
gtcagatcaccagccataccacacgaccgcagaggagtagcaagagcccgggggagaaatgagcgcggcggcgggcggactgcggcggctgctggcggcggcggcgacggcgggagccgcggaggtgcgggcgtccatcttcggccacgcgctgaaccctacggggaggcgcgcggcgacgaagctcctgcggaagaagatggtgggcgaccaggtggcgcagtggtacccctacgacatcaagcgcgacgacccgctcgtcatggcgcgcgaggagaaggacgcgccatctcgctgacgcccgg

SEQ ID NO: 217758 - DNA, 1107 bp, Zea Mays
gtgacgtgtctgattcaactgatcccattcgagatgaggcttcattattgattagtgaagagatagacagaaaactgatatctatcattgaagattctttttcaactgcatcttctgtaaaagcggaagcggaatttacaatttctagtctggaagaaactttgattgaagttaacttgattcttgacatattgtttcttactttttatgataacttctcaagatgtaatggtagacagtggataactttgtgttcaatttttaaggacattctatgtggttcttatggtgtcgggaaatttgttgcatctgttgaggcaaagaattcatttcattatgctaaagctcagctacttctcatccttattgaaactttggactttgagaatctcctccggatgattcatgatgaagttcctctgagtggagggtgttctgcattttctgtcggtgatattctggagatggatgttgaaatatcaaaattgcctgaattttcattggtagaatcaggaccacttatactggcttgggcagttttcctttgcctagttctgtctcttccagaaagtaacaccaacttgggtcctgtttctggttatcggggtatattgcggacattcatttcagcattcatcgcttcatatgaggtatcttatcagaaagaacacagttcctttgacatgatttcgagtattttatgtgaagtttatgatggagaggaatctctctgtatgcaattttgggataaagatagctttgttgatggtcctatcagatctgttcttcatatgctggaggaggagtatccttttcagatatctgaactgatacgtttcttatcagcagtttgccatgggacctggcctgctaattgtgtatataattatcttgagaggatgaatggagttacaacaatctataccatcccttgtgttgctgatggtgttggttatggccatcaaattgaaagtcatcatccagtcagcattcctagtattgaaggcattacaattccacaaggaacccatggctacattttgaaagttcttcaagaggataccacattagttcgctgggaggatggtctctcttttgaatcttggt

SEQ ID NO: 217759 - DNA, 1244 bp, Zea Mays
gctgctttctgttcggccacaatctcctaaagccaatctgagcatcattcagagaggaagaaatatgtttaggagaaagcatggcgctgatgtcaactcagatgatgctgagcaaagagaagcaaagattagtgaactgaaagctgctcttgggactttgtctgcccgtggcgagaagtactgcagtgaagcatgcttgagaagatatctggaagcccgtaactggaatgttgctaagtcgagaaaaatgctggaagaaagtctcaagtggagggcagcttacaagccagaggatattcgttggcctgatgtttctgtcgaagcggaaacaggtaaaatgtacagggcaagtttccgagacagggagggcagaactgttgttgtcatgaaacctacaaaacaaaatacttcatcccatgaagggcagatacggttcctagtatatactttggagaatgcaatcttcagcctgcctgaaggccaagaaaaaatggtcatcaagattttcctcgatccaaaatcggtcgagaaggtgaacttcgtgtaccagaaggatgaggagagcatgaaggtcatgtacaaatacatcgatccggaagtccttcctgtagagtttggggggaagagcaatgtggtgtacaaccacgaggagtactccgagttaatgatacaagatgacatcaaaacagcaagcttttgggcagttgatgcgaaaactaaccatgctaaccctgccatcaatgggaccttggttcctgaggttgcgccacagtcgtcgtcgctggctgctaaagctagttgaagagtatctgcattctctgagaaaattgagaagccgaagactaatggaaccttgagagaaacatatgaaataagaaacatggtatactcgttcatcctcaagagttgtttcagtactggaagtttattcagcacacaataagctactagagaatgtcaccatgtgtgatttgatgcccaaaagagatggtttacaaggtacagccaagtttttgtacttgaattaattactatatgtcagtgattatcacatggataagtaactagcacaagcttaaccgtttacttttctcttattccttttacgatatactttgtcttctcgctaatcaatcgagtgtttctttcgatgatttaaaggttttgagctgtcctagtgctaataactctgcatgaaacagcaagcgtctcctcatgaaatgtcatagaaaaaactctgcaac

SEQ ID NO: 217760 - DNA, 1501 bp, Zea Mays
gaattctctgaatcggcatctgagagagttgcaggggcgccgctgtccgcgctggacggcgtgctggtgggcgtgaaggacgagatcgactgcctgccgtacccgaccacgggcgggacgcggtggctgggcgcggcgcggcgctgcgaggccgacgccgcgtgcgtcgcgcagctgcgcgcctgcggggccgtcctcgccggcaaggccaacatgcacgagctcggcgccggcaccagcggcatcaacccgcaccatgggtcgacgaggaacccgtacaacgccagcacgatcgccgggggctcctccagcggctccgccgccatcgtgtgcgccggcctctgccccgtcgcgctcggcgtcgacggaggcggctccgtccggatgccggcggcgctgtgcggcgtcgtcgggttcaagcccaccgccgggcgcctctccaacgccggcgtcctcccgctcaactggacggtcgggatgccggggatcctggcggggacggtcgaggacgcgctcatcgcctactcggcgatcgtcgaccagtcccagccgtcctacttgcggccggaactgaatcttcctcagctcggctccacactctccatcggcaacatcaagctcgccagatacggaaagtggttcaatgacagcgccgaggacatcaggagctgctgcgacaaggcgctgcaggcgctgcgcgcgaactacggctggcagaccgtggacgtgaccatcccggaggtggaggagatgcggctggcgcactacgtcaccatcggctccgagtgcacgacgtcgctcgccaacaagaggtccgagatcggctgggacgcgagggtggcgctcagcgtctacggctccttcagcagcagggcgtacctgaacgcgcagcggctccggaaccgccagatgtacttccacaagcagatcttcaaggccgcggacgtcatcgtctcgccgatgaccggtgtgactgcgtacccgctgcaagacgacgcgctcagcaccggggagctcgactacataaacggagccgcgctggtccggtactccatagccggcaacttcctcggcctgccggccatcaccgtcacggtcggctacgacaggggcggcctccccatcggcctccagttcatcggcaggccgtgggccgaggccaccctcctccacgtggccttcgccacgcagcaggcgtgcgccaaggggtacaagaagccgccggtgttctacgacctcctcggcaagcaacaggactgaggtcagcgacgcgccgccgccgccggcggcgagcgagcgaggatccaccgtatatgtatccgtgggggtcgatcggaggagaagagacgtatagcagcaggacaattgttgtcatgtataccttcattctcgaatcattatcgagtatttgtcgttgactactagttcattcttgaactaaaacacggtaaataaaaaataattgaggtcgttcataatctgagaagagagaaagaaattt

SEQ ID NO: 217761 - DNA, 2312 bp, Zea Mays
ttctgtcctccgatccccaccctccggttaactcctcaccaagaaaaaggaaccggccgtcctcgttcctgtcgtcgctgttctttcctcgccattaccggcgtataaaaccagccctcggcctgatcgcacagcatccggccaagcgggagtagtccctgtcgtctgtccaccaccctctgcgagtacgtctcctcctcccgtctgtctctctctgtgtgtcggtctgccgttcccgccgccgccgccgcagatgggcctgttcagctcgccggccaaggtgtacaagccggccgccgacgtggacctcggcccaggcagcgacgagctctacatcagccccaatgtcaaagctcctcgggtcgccgggctcctggtgaagatcttcgtgtggatcctggagatgcccatcgtcgggcagatcgtgctctacatcctgaagaaggacaacctcatcaacaagctggtgtccgacgccgacatcccggagccgccgctgttcacggcatcgcacagctgggaagacaccccggagcagagcgtgcggctgaccaagcccgacctgtcggcggcggagcgggtccaggaggccgtgggctgcctcccggcgcggctggaggccgcgctggccgccgacgcgcgcggcatcaggcgctggaccgtccgcgacttctccgacgcgtacaggtccggcgaggtgacgcctgtccaggtggcggcgaggttcctcgcggcggtgagggagagctcgggccctggcgtgagcaatatggccttcttcatcagctgcgaccccgacgacgtcatgaggcaggccgaggaatccaccctcaggtaccagagaggggcgccgctgtccgcgctggacggcgtgctggtgggcgtgaaggacgagatcgactgcctgccgtacccgaccacgggcgggacgcggtggctgggcgcggcgcggcgctgcgaggccgacgccgcgtgcgtcgcgcagctgcgcgcctgcggggccgtcctcgccggcaaggccaacatgcacgagctcggcgccggcaccagcggcatcaacccgcaccatgggtcgacgaggaacccgtacaacgccagcacgatcgccgggggctcctccagcggctccgccgccatcgtgtgcgccggcctctgccccgtcgcgctcggcgtcgacggaggcggctccgtccggatgccggcggcgctgtgcggcgtcgtcgggttcaagcccaccgccgggcgcctctccaacgccggcgtcctcccgctcaactggacggtcgggatgccggggatcctggcggggacggtcgaggacgcgctcatcgcctactcggcgatcgtcgaccagtcccagccgtcctacttgcggccggaactgaatcttcctcagctcggctccacactctccatcggcaacatcaagctcgccagatacggaaagtggttcaatgacagcgccgaggacatcaggagctgctgcgacaaggcgctgcaggcgctgcgcgcgaactacggctggcagaccgtggacgtgaccatcccggaggtggaggagatgcggctggcgcactacgtcaccatcggctccgagtgcacgacgtcgctcgccaacaagaggtccgagatcggctgggacgcgagggtggcgctcagcgtctacggctccttcagcagcagggcgtacctgaacgcgcagcggctccggaaccgccagatgtacttccacaagcagatcttcaaggccgcggacgtcatcgtctcgccgatgaccggtgtgactgcgtacccgctgcaagacgacgcgctcagcaccggggagctcgactacataaacggagccgcgctggtccggtactccatagccggcaacttcctcggcctgccggccatcaccgtcacggtcggctacgacaggggcggcctccccatcggcctccagttcatcggcaggccgtgggccgaggccaccctcctccacgtggccttcgccacgcagcaggcgtgcgccaaggggtacaagaagccgccggtgttctacgacctcctcggcaagcaacaggactgaggtcagcgacgcgccgccgccgccggcggcgagcgagcgaggatccaccgtatatgtatccgtgggggtcgatcggaggagaagagacgtatagcagcaggacaattgttgtcatgtataccttcattctcgaatcattatcgagtatttgtcgttgactactagttcattcttgaactaaaacacggtaaataaaaaataattgaggtcgttcataatctgagaagagagaaagaaattt

SEQ ID NO: 217762 - DNA, 2341 bp, Zea Mays
atcgtcttctacccttctgtcctccgatccccaccctccggttaactcctcaccaagaaaaaggaaccggccgtcctcgttcctgtcgtcgctgttctttcctcgccattaccggcgtataaaaccagccctcggcctgatcgcacagcatccggccaagcgggagtagtccctgtcgtctgtccaccaccctctgcgagtacgtctcctcctcccgtctgtctctctctgtgtgtcggtctgccgttcccgccgccgccgccgcagatgggcctgttcagctcgccggccaaggtgtacaagccggccgccgacgtggacctcggcccaggcagcgacgagctctacatcagccccaatgtcaaagctcctcgggtcgccgggctcctggtgaagatcttcgtgtggatcctggagatgcccatcgtcgggcagatcgtgctctacatcctgaagaaggacaacctcatcaacaagctggtgtccgacgccgacatcccggagccgccgctgttcacggcatcgcacagctgggaagacaccccggagcagagcgtgcggctgaccaagcccgacctgtcggcggcggagcgggtccaggaggccgtgggctgcctcccggcgcggctggaggccgcgctggccgccgacgcgcgcggcatcaggcgctggaccgtccgcgacttctccgacgcgtacaggtccggcgaggtgacgcctgtccaggtggcggcgaggttcctcgcggcggtgagggagagctcgggccctggcgtgagcaatatggccttcttcatcagctgcgaccccgacgacgtcatgaggcaggccgaggaatccaccctcaggtaccagagaggggcgccgctgtccgcgctggacggcgtgctggtgggcgtgaaggacgagatcgactgcctgccgtacccgaccacgggcgggacgcggtggctgggcgcggcgcggcgctgcgaggccgacgccgcgtgcgtcgcgcagctgcgcgcctgcggggccgtcctcgccggcaaggccaacatgcacgagctcggcgccggcaccagcggcatcaacccgcaccatgggtcgacgaggaacccgtacaacgccagcacgatcgccgggggctcctccagcggctccgccgccatcgtgtgcgccggcctctgccccgtcgcgctcggcgtcgacggaggcggctccgtccggatgccggcggcgctgtgcggcgtcgtcgggttcaagcccaccgccgggcgcctctccaacgccggcgtcctcccgctcaactggacggtcgggatgccggggatcctggcggggacggtcgaggacgcgctcatcgcctactcggcgatcgtcgaccagtcccagccgtcctacttgcggccggaactgaatcttcctcagctcggctccacactctccatcggcaacatcaagctcgccagatacggaaagtggttcaatgacagcgccgaggacatcaggagctgctgcgacaaggcgctgcaggcgctgcgcgcgaactacggctggcagaccgtggacgtgaccatcccggaggtggaggagatgcggctggcgcactacgtcaccatcggctccgagtgcacgacgtcgctcgccaagtacctcgacaagctcaagaggtccgagatcggctgggacgcgagggtggcgctcagcgtctacggctccttcagcagcagggcgtacctgaacgcgcagcggctccggaaccgccagatgtacttccacaagcagatcttcaaggccgcggacgtcatcgtctcgccgatgaccggtgtgactgcgtacccgctgcaagacgacgcgctcagcaccggggagctcgactacataaacggagccgcgctggtccggtactccatagccggcaacttcctcggcctgccggccatcaccgtcacggtcggctacgacaggggcggcctccccatcggcctccagttcatcggcaggccgtgggccgaggccaccctcctccacgtggccttcgccacgcagcaggcgtgcgccaaggggtacaagaagccgccggtgttctacgacctcctcggcaagcaacaggactgaggtcagcgacgcgccgccgccgccggcggcgagcgagcgaggatccaccgtatatgtatccgtgggggtcgatcggaggagaagagacgtatagcagcaggacaattgttgtcatgtataccttcattctcgaatcattatcgagtatttgtcgttgactactagttcattcttgaactaaaacacggtaaataaaaaataattgaggtcgttcataatctgagaagagagaaagaaattt

SEQ ID NO: 217763 - DNA, 2663 bp, Zea Mays
ctgcctcggaaccctagctgtggcacgcacccaggttgtcgtcctccccaccgcaccaccaccacggccactgctgcgacgatgacgagggtgaccgtcgatgcctgtctgctgccacctgaccagtacggtcgcgtgcccgtcgacccggatccgtacgcccagctttcgtgacaccgatgcggcacccaaggagggtgcctcgcgggggacccagacctccacctcttcgtcgtcttcaatggctggtagtgatgtggcgtctctgttgctgcaattgccaagtggatgaaacagatcggtgtgagagtcatgtcaaggccacaaccaacaaaattgacggggtgacgaagggtttgagggattctgctactgcaaaagtcgagccacacgatgatgctccccctatcgatgtcgatgttctatccttggatgatctgataaaaaattgttgactttggttcaagagccttgataggtgaaggtatttatgggacattgtactatgcaactcttggtaatgtaacaaaaatgacagtaaagaaactttactgaaaatgaacccattgtcgagttcttggtcgaggttggtgttgccattgattattgatcacgggggttactaccaaacaatgatgcttacttctgataccaagtctcattggtttcaaggatgacacatgaaaactttgttgacatgttgggggaccgtatcaagcgtaatcttcgcatagtatcctacgaattcgcgaccatgggttctctccatgatgttctacatgggcgatgaggcggctaaactaaatagagtggggttaagtccctaattgccttgcctgcagttgacttgcaacattttccctgggatgtccatttcaagccccacaagctctagaagcttaaagccatccatgtctggcatgtgcacatcgctgatacaagatcaaacaagttcttgttttgactcaacatggtcaagatcacaacagtctgattcatcgttgtgactgcaaatacgaaacaatgtgtcttacaggtgagtagctatagcaaaagccagaacaagaatttgtacatattgcatgagaaactacctaactacttgtagtaaaagctcccaaaaaatgcagcattcagttacatggtgatagtgtgatcatcaatttagtgcttaaatattttggccatttgatgcaaacaaatctatggttgtgggcatataaaagtataatctgcaataaaacttagcaaatggtttatcaagtagaaatatttgttaatggtagtagaatcaaacgaggtacctgttttttggctgatctccatacacaacacttctatgaacttggctagagaagaaataataatatacaactggagtagagaaaaatccattaagatagaagcacggtaagttgcagtttatgagttcaattctaagcaaataagaaaacaatggcaaatcttgagcaacgccaaccttcaataaaacctggcatcagcaagagggtataatagcagggggctaggaactgtcggatccatctatagcctatcctgcataaatttaacaagttattacaataaactggccaaaagaatgtaggctcgtacaaggttgtctgaatacacttccaatcaacttatatctagaaaatatcacttagaacttagatgatgataaatataaaatgtcacacaaattgtctgttttttcaacacgagcattctttctactcagacaaatttgcaaatgtcattgagcacgtaggtgcaacaggagagcaagcaaagcacaagcaaaagtgcaaaattgtccgaagtccaagtagaggttgcagtaccccaagcaaatgcacgagttcccaacaattcaaattagcacattgatgcatcatacattgatccattgatgcatcttcaccaggagagcagcggagttgatgcgtacccaaggtagcggaggaggatcagccatcagggtgagcctcgtgagtaggaaggtctcggcacggcccgaccgacttcgcgacgtggaccacggcgtggagtgcgcacaacacaacatgctgacttgtacttgttttgcttaaacaataaaccatttctcaataattttcccattatactgcttatgaaatgttcattgtgcacatgatttcctgtacatcggttagtgcttattttcaaacgttagtaccactccttgtgttaccatggtatcaagatgatgtgaatggctatttatcttctcttcaaattagttattaggaacaaaatgagctttagtgaatagttatgtcttggattttctccccattcaatagacttagacttctcattgttcggcctcagcagcacaccttggtgttttatcaggcctccaagccgtccctccctctagctgcttcccgccaagcctgatgctcacaagtttgctgtaattcctcatgccagctgagatcttgctctggagcaagttgtttgagatgtcaagatatcatagccggtgcagactgctggcgcttgatgattgaaagaagttgaaacggcatggatgcagtgccttcgtttgctactagcacaaagatctgaaccaagtatatttgtatgtatatcaacaagttggttgcaactaccttgtaaattgatctatcttcttt

SEQ ID NO: 217764 - DNA, 3732 bp, Zea Mays
ctgcctcggaaccctagctgtggcacgcacccaggttgtcgtcctccccaccgcaccaccaccacggccactgctgcgacgatgacgagggtgaccgtcgatgcctgtctgctgccacctgaccagtacggtcgcgtgcccgtcgacccggatccgtacgcccagctttcgtgacaccgatgcggcacccaaggagggtgcctcgcgggggacccagacctccacctcttcgtcgtcttcaatggctggttagttcaactaagatattacatgtttacagacatgctcttttccccctttttcctatttaatttacaaaatactcagatcttttagtgagtgcaatgttagctcacagtttagggtttagggttttctttttgcacataagttgtggctcatgagttaacatgtttctctcttcagcgctatctgtgttaacatgtgtggtgcacgatgcctaaatgcttgcagtgataaaaatgtgatagttctcctcttgatgacatatttgtggtttccataatatgtgtaaattaaatacaaaggtagtgatgtggcgtctctgttgctgcaattgccaagtggatgaaacagatcggtgtgagagtcatgtcaaggccacaaccaacaaaattgacggggtgacgaagggtttgagggattctgctactgcaaaagtcgagccacacgatgatgctccccctatcgatgtcgatgttctatccttggatgatctgataaaaaattgttgactttggttcaagagccttgataggtgaaggtatttatgggacattgtactatgcaactcttggtaatgtaacaaaaatgacagtaaagaaactttactgaaaatgaacccattgtcgagttcttggtcgaggttggtgttgccattgattattgatcacgggggttactaccaaacaatgatgcttacttctgataccaagtctcattggtttcaaggatgacacatgaaaactttgttgacatgttgggggaccgtatcaagcgtaatcttcgcatagtatcctacgaattcgcgaccatgggttctctccatgatgttctacatggtatgattttgcacatcctctgcatcttgctgcataactccacagttaattgaacactattgtttcgactggtaacttgcaatattgttttctaattcatgtcaataggaagaaaagtatttcaaggtgctcgacctggcccaacgtttggttggatgcagcgagtgcaaattgttgttgacgctacaaaaggactcgatattttcatgggaaagttcatcagtccattgtccatagggataatagaacaattaatatcatcttgtttgaaggcttcaaggcaaagatagtagacttcagatatggctgtccacttgcacttgaactcacatcaagccttcggatatcatgccgcacaataataatcctttttttaaagtaactatttgtgttacttaactttagttgtgctttctgcttttgcatgtattgtctgattagttttcgattaggacaacaagttggatggtgtttgtttcttaattgtgtgattatttttttaaaagcatgcctttttattactgaagttaagcataaaaggaacacattatgatttgttttccccttcgatagaatttcttatgatgttagatgcaggcaatctcgttgtacaagcaggtgctagaagcaaacattttgtttggtccataaagtacgcaaacatttactatattgcaatgtggtattaactatattcagtgaaagccccatttatgttgggcaaaggctttggaacccctccaacacccaaacccctcaccaacgtcacctctatgaccaaaagtagtagagaaaaaagattaggacactggcataactgcaatgacatattttaaataaaaactagagtctaaatcctgctgaatagttgctttaggaacagctctaggtgctcaaatgatgcacattgcccttggtccttgttgttttccttataactcaataaatgtcaactttttgcttgttcctgagctctaatcacagcttgtacaattagcttggctaaactgattgccttgtgtgcaaggaggcgttatttttactaatatcatcatttaactattgcgtgcgttgggttaatttggttcattgattctttttcttttttaagcaatcaagcttaaatgattagcttcatagattaggcaatccgttctgaacaaagttttgcaaaaggccaacatcacattgtcattctgtcatacacttcatacaggaaagcatttcgctagatcatgttgcattcctttttttgtttaatttaagttggcggcatagtagcagtgcttttagctggagtttctgaaattgctaaggcttcatttttcacatgtcctttcttccacatttatagctatggaacaaactgtgtcctttcttccacgtttataagattgattgattagcaaaaaaacaaagaacacttcaataaatatattatatatgcgcttgtcatgaattcccgttgtatataatgcctaaacagtactacttgcttaattagggcgatgaggcggctaaactaaatagagtggggttaagtccctaattgccttgcctgcagttgacttgcaacattttccctgggatgtccatttcaagccccacaagctctagaagcttaaagccatccatgtctggcatgtgcacatcgctgatacaagatcaaacaagttcttgttttgactcaacatggtcaagatcacaacagtctgattcatcgttgtgactgcaaatacgaaacaatgtgtcttacaggtgcaacaggagagcaagcaaagcacaagcaaaagtgcaaaattgtccgaagtccaagtagaggttgcagtaccccaagcaaatgcacgagttcccaacaattcaaattagcacattgatgcatcatacattgatccattgatgcatcttcaccaggagagcagcggagttgatgcgtacccaaggtagcggaggaggatcagccatcagggtgagcctcgtgagtaggaaggtctcggcacggcccgaccgacttcgcgacgtggaccacggcgtggagtgcgcacaacacaacatgctgacttgtacttgttttgcttaaacaataaaccatttctcaataattttcccattatactgcttatgaaatgttcattgtgcacatgatttcctgtacatcggttagtgcttattttcaaacgttagtaccactccttgtgttaccatggtatcaagatgatgtgaatggctatttatcttctcttcaaattagttattaggaacaaaatgagctttagtgaatagttatgtcttggattttctccccattcaatagacttagacttctcattgttcggcctcagcagcacaccttggtgttttatcaggcctccaagccgtccctccctctagctgcttcccgccaagcctgatgctcacaagtttgctgtaattcctcatgccagctgagatcttgctctggagcaagttgtttgagatgtcaagatatcatagccggtgcagactgctggcgcttgatgattgaaagaagttgaaacggcatggatgcagtgccttcgtttgctactagcacaaagatctgaaccaagtatatttgtatgtatatcaacaagttggttgcaactaccttgtaaattgatctatcttcttt

SEQ ID NO: 217765 - DNA, 1511 bp, Zea Mays
atgggtaatttcctcgcctgcctccgcctgtgcctgcaagtcgtcaactgcctccgcctgcgcgcggcgggcggcatgggagcagagagtatcccaccttcgccaacgtctccggggcccacaccctccttttcctcgctgactccacgcccccgccggccccgccttcgcctcctcccgctcacggagatgagttctactgctgctctggctcctcgtcctcctactcggccgcgtcgaccaggtcgtgcgtctccgaatcggcgcagcacggccgccccgtcgaccctctctgcgtgctctccgttcatccgttgtcgctcccctccacctcatcgaacctaaggtgctctgctcgccgaggccacaagcgcgttgttccataccaaggcagagaaaagacggaagggcgtgtggatcgagatcaacaacgacggcgacgacaaccagagcgcgaggagcagcaccgtctccaccgccccaccccgcacgccgccattgccagggctcccccaccccacccccgcacgccatgacctccacaaccccacccccgcgcgccatctcgccagggctcccccacccccgcgcgccgtctctcctgcaccagctctccctgcaatccctccagctctccctgtcgtgtcgcctccacagcgcccaccgagaagaggcgcgtttagttttctcagacagtatgacagtggattgggtgtttggcttctctttgcagtagcaattggaggcgaacaggaagacactgtagaggcactctcgcgcgctgttcaacgtagtggcagcagaggtggcatcaaggggcaccgatggcggcaacatgctatcgcagcgtgtggcggagagacagaggtcagacctggcaaacaggacagggaaggggacgtgatctccatgcaagagaacatgtctgccaggacactcacgctctctagctccacgcagcagacaattgtgcggttcgttaagctaccattggttgacaagatcaccgcttggatcttcctggaaaagttattgcgctacagtgcgacgacggccagggccaaggtgctgaaggaggtgaggaacatcgcagtaacgatctccatggagaagggtgcgatggccagaggtaaaaaggaaaacttgatgctgccaggatcgtccatcaagaaggtaccatggtggggtggtggaggggatggccaaacgatctcagaagctggcagggaggtgaaagagattgaggagctagaggagaaggcgtcatttttcagaagctggcacgtctcatggaggggaaatagcacctttgcttgtttggcatacatgagctatatgagggtggcgatcagatttgcttatggttgttggcctactaggatggttgtatggccagtcactgactggaaagctgcaacggactcaagcttctcccaggaatgatcttgtgggaataaagcttctcacaggttttaatgcatgactcatcacgttgtgttgaatgacgggag

SEQ ID NO: 217766 - DNA, 4404 bp, Zea Mays
ctcaatttctgttcgcgtataatcgtcggatatctccctctcctcaaaatactcacaacccagagatctcacacccacgaccaccacgagggaaaaaaaacaacaacagaggagagagactagagagagagagagagagagaggagcgttggagtttggaagcagttcctgcgacctgcggccggagccccggggcatattcctcgcccggagatcccgtacccgaccctcccctgataaacagacgcaagcgtcagggagggagggagggacagagagaggtagagagggccggggcgaagggggcaaagatgcgttcttgaggagcctgtgcaggggaggtccaatccagaggccgccattccttttcttttccccccaacctctgcaggctcttcagatccagcaatccggcttgtttcttttgctgatactgtgtgtgttcctgaaacttcatggagacttccatatctccaccaggcacatcaaagcagtcagctgtccgcaaaccttctcctggaagctctcttaaggatctgtgccttgtttccaaacaagggtcaatagctgaagtagaatctgctttggccttgttgaaaaaaagtggtgggaacattgatggtagaaatgcatttggtcttagtgccctccaccttgcaacatggagaaatcatctacccattgtgaggcgactcctagatgctggcgctgatccagatgcaagggatggagaatctggctggagtagcctgcatagagcacttcattttggtcacctatgtattgctggtgttcttttacagtttggtgcttccctcgctttggaggacactaagggccgtacacctgttgaccttatctcctgtccagtatcacaggccaatggagattttccagatgcagttgcaacggaagtcttcagttggggaagtgggacaaattatcagctgggaactggcaacgcccacatacaaaaactaccatgcaaagtagaagctttgcatggatcatatatcaaaacagttgctgcatcaaagtttcacagtgtagcagttagttctaatggtgaactatacacatggggatttggtcgaggtggtcgtcttggtcatccagatattcacagtggacagacaactgctgtgattacccctcgccaggtgacagtaggattaggccgtaaacgagttaatgctgtggctgcagccaaacatcatactgtgattgctacagagctgggggaattgtttacctggggatcaaatagagagggtcagcttgggtacccttctgttgatacccaaccaacaccaaggcgtgttggttcgctcaagcaaaggataatttcagtagctgctgcaaacaagcactccgctgcagttgctgatactggcgaagtattcacctggggttgcaataaggagggccaactaggatatggcacttcaaactcagcatcaaactgtatcccaagaatggtggagtacttgaaaggaaaagtacttagaggtgtttctgcagcaaagtatcatacaatagtgttaggagctgatggagaggtgttcacttggggccatcgccttgtcaccccacggcgtgtcgtagtagctcgatgccttaagaagggtggaaatacaaatctgaagtttcatcgtatggaacgacttcaagtgatttcagtggctgctggaacaacgcacaatactgctttaacagctgatggtgctcttttctactgggtttcatcagatcctgatctaaaatgccagcagatattttcaatgtgtggaaggaatattgtgaacatctcggctggaaagtactggaccgctgtggctacatcaactggtgatgttttcatgtgggatgcaaagaaacgtaaggacgaaacgccaattttcactcgggtgcatggtgttaagcgagcaacatttgtttgtgttggtgaaacgcacatgcttgtgctctcaagtatataccatcctgagtatccacccaagcctaaaagccaaggcttaaaatccatgttagaatggaacggtggaacagaagagctgggtgaagatatcctgtttgatgatgttcagcccaacagtggtttatcaggaagcagtggtgaaatgagcaaaggtgtgcctagcttgaaaagcctctgtgagaaggttgcagttgagtatttattggagccaaaaaactcaatacagcttcttgaaattgctgattccttggaagctaaggagctcaagaagcattgtgaggatttagctattcgcaacctcgattacattttcacagtgggagcttcttcaattatgaatgcttcttctgaaattcttgtgaacttagagaaattgctagatgagaaatcctcagagccttggagtcagcaccgtcttcccacaatgacagctacctatcctgctgtcattgacagtgatgtagaggaagatgaagcaagagaattccccaagacccgtaaatgtgggaaatctgcatcaaggccatctgcgatgtctagtgatgacagcttccttcagaaagactgcaccgctgaacaagccgtctctaagcagatcagagcacttcgcaagaagctgcaacagattgagattctcgaggctaaacaacttgcaggtcatcagcttgacagtcagcaggtagcgaagctcgagtctagggctgcccttgaaggtgaacttgctgaacttggcattccctcagagatatactcaacttcctctgcttgtccagcagaaggtaggacaaacagaaaacctgaggtttctaagaaacagaagagaaagaacaagcagtcaacacagaccccgtcagtgaaaaatgagcctgggcaacaaatccccattacggaacttcaagttctacaagtcaatgtctctgctgaaaaggaggcgtatgccgctgatccaattaaacctatggaggctgccgcgttcagcaacacaaaggacaccgcttctccaccggagaagaaaccttcccaaccaactccatcaaagaagaagaacagaaaaggcggcctgtcgctgttcctgagcggcgctctcgacgacaccccaaaaccaagcctccctgcccccgctgtgcctgccacaccgaagcccgaaggacccgcctggggcggcgtgaagataaccaagggacccgcttcgcttcgagacatccagaccgagcagagcagaacaaacgagcccgcgtcggccaaggcgaaggaccgccacgagaactcgccggacagcgccggccgcgcgacaaggctctcctcgttcatccccgacgcgcgttccagcccagtagccgtcgtggcgcctgctcgcgcagcggcggcgccttcttccgaaggtgacaggagcacgccgccgtggtcgtcctctgccacctcgcccaacgtgtcgcagccttcgctcagggacatacaacagatgcagcagaggcaccatggcggcgtctcccacagcccgaaaacccagacatcgggcttctgtataccgccccacggcggagcgccagaggccgctggcggtggcggcgtgaaggacaacgtgcccaaccggtggttcaggccggagaccgacgccccgtcctccatccgctccatccagatcgaggagcaggctatgaaggacttcaggcgcttctacagcagcgtgaggatcgtcaagccgcaggtctagtagcactggcggcggcggcggtggcggccttggcggagagtgactgatggcacaacaaccccctttaggctcaccctcccatttgacactggctcgttgtacattcgagtgtacagttggttctgttcgccataggttccttgagctgaacaataaacaaacaccctttgctgctgttgctgctgctttcgcagtgagtggtctcgtttagttgtaacagaagattgtacaggccatgtgagatcaccaccccccggctttggcttaacagtttaacttgagccaatgcttctttttttttttttggcgccaaaatgtctttggttgttccaagcagaggtcataaaaactgtgtggtgcgtctgcacccaggtacccaacatttttagcttcgatcggacatgatctcactttggggctgtagcctagtgcttctatatgctctcgatctgcttgactggtcggtgtgagaatttggtagatagcggcatacttgtgctgttgtgcaatagtagcactatgcatggtcatctgctaagatcgatggcagctcgtaattaatggagctagtctgcctggttcagtagcttgtcgcctatggctatcggtaataaggccggttgcaatatttttttgtttggtgagcactagctagccatgaggcgatcaaatgtcatgtgctcccatgaaccctgatgacatgtatcttcac

SEQ ID NO: 217767 - DNA, 4462 bp, Zea Mays
ctcaatttctgttcgcgtataatcgtcggatatctccctctcctcaaaatactcacaacccagagatctcacacccacgaccaccacgagggaaaaaaaacaacaacagaggagagagactagagagagagagagagagagaggagcgttggagtttggaagcagttcctgcgacctgcggccggagccccggggcatattcctcgcccggagatcccgtacccgaccctcccctgataaacagacgcaagcgtcagggagggagggagggacagagagaggtagagagggccggggcgaagggggcaaagatgcgttcttgaggagcctgtgcaggggaggtccaatccagaggccgccattccttttcttttccccccaacctctgcaggctcttcagatccagcaatccggcttgtttcttttgctggttgatttatactctatagtggttctctacttagcatcaagtcttggcatggcaatggcctcgtagctcgcggctctctaataggaataattttactcaaaatgaagctatagcgtcatgctatcttaggttgtttggacagttccttaggatactgaaactgtcttagataatggagatgatgttcactcaaacatttctcccgatagatatacaattgtaattacaccagaactgtacttacaattaagaacaacatcagctgtaacattagtagtaagaaacagttcagatagtgtgaagaagttcatctgttggcctgctatttcaggcacatcaaagcagtcagctgtccgcaaaccttctcctggaagctctcttaaggatctgtgccttgtttccaaacaagggtcaatagctgaagtagaatctgctttggccttgttgaaaaaaagtggtgggaacattgatggtagaaatgcatttggtcttagtgccctccaccttgcaacatggagaaatcatctacccattgtgaggcgactcctagatgctggcgctgatccagatgcaagggatggagaatctggctggagtagcctgcatagagcacttcattttggtcacctatgtattgctggtgttcttttacagtttggtgcttccctcgctttggaggacactaagggccgtacacctgttgaccttatctcctgtccagtatcacaggccaatggagattttccagatgcagtggacagacaactgctgtgattacccctcgccaggtgacagtaggattaggccgtaaacgagttaatgctgtggctgcagccaaacatcatactgtgattgctacagagctgggggaattgtttacctggggatcaaatagagagggtcagcttgggtacccttctgttgatacccaaccaacaccaaggcgtgttggttcgctcaagcaaaggataatttcagtagctgctgcaaacaagcactccgctgcagttgctgatactggcgaagtattcacctggggttgcaataaggagggccaactaggatatggcacttcaaactcagcatcaaactgtatcccaagaatggtggagtacttgaaaggaaaagtacttagaggtgtttctgcagcaaagtatcatacaatagtgttaggagctgatggagaggtgttcacttggggccatcgccttgtcaccccacggcgtgtcgtagtagctcgatgccttaagaagggtggaaatacaaatctgaagtttcatcgtatggaacgacttcaagtgatttcagtggctgctggaacaacgcacaatactgctttaacagctgatggtgctcttttctactgggtttcatcagatcctgatctaaaatgccagcagatattttcaatgtgtggaaggaatattgtgaacatctcggctggaaagtactggaccgctgtggctacatcaactggtgatgttttcatgtgggatgcaaagaaacgtaaggacgaaacgccaattttcactcgggtgcatggtgttaagcgagcaacatttgtttgtgttggtgaaacgcacatgcttgtgctctcaagtatataccatcctgagtatccacccaagcctaaaagccaaggcttaaaatccatgttagaatggaacggtggaacagaagagctgggtgaagatatcctgtttgatgatgttcagcccaacagtggtttatcaggaagcagtggtgaaatgagcaaaggtgtgcctagcttgaaaagcctctgtgagaaggttgcagttgagtatttattggagccaaaaaactcaatacagcttcttgaaattgctgattccttggaagctaaggagctcaagaagcattgtgaggatttagctattcgcaacctcgattacattttcacagtgggagcttcttcaattatgaatgcttcttctgaaattcttgtgaacttagagaaattgctagatgagaaatcctcagagccttggagtcagcaccgtcttcccacaatgacagctacctatcctgctgtcattgacagtgatgtagaggaagatgaagcaagagaattccccaagacccgtaaatgtgggaaatctgcatcaaggccatctgcgatgtctagtgatgacagcttccttcagaaagactgcaccgctgaacaagccgtctctaagcagatcagagcacttcgcaagaagctgcaacagattgagattctcgaggctaaacaacttgcaggtcatcagcttgacagtcagcaggtagcgaagctcgagtctagggctgcccttgaaggtgaacttgctgaacttggcattccctcagagatatactcaacttcctctgcttgtccagcagaaggtaggacaaacagaaaacctgaggtttctaagaaacagaagagaaagaacaagcagtcaacacagaccccgtcagtgaaaaatgagcctgggcaacaaatccccattacggaacttcaagttctacaagtcaatgtctctgctgaaaaggaggcgtatgccgctgatccaattaaacctatggaggctgccgcgttcagcaacacaaaggacaccgcttctccaccggagaagaaaccttcccaaccaactccatcaaagaagaagaacagaaaaggcggcctgtcgctgttcctgagcggcgctctcgacgacaccccaaaaccaagcctccctgcccccgctgtgcctgccacaccgaagcccgaaggacccgcctggggcggcgtgaagataaccaagggacccgcttcgcttcgagacatccagaccgagcagagcagaacaaacgagcccgcgtcggccaaggcgaaggaccgccacgagaactcgccggacagcgccggccgcgcgacaaggctctcctcgttcatccccgacgcgcgttccagcccagtagccgtcgtggcgcctgctcgcgcagcggcggcgccttcttccgaaggtgacaggagcacgccgccgtggtcgtcctctgccacctcgcccaacgtgtcgcagccttcgctcagggacatacaacagatgcagcagaggcaccatggcggcgtctcccacagcccgaaaacccagacatcgggcttctgtataccgccccacggcggagcgccagaggccgctggcggtggcggcgtgaaggacaacgtgcccaaccggtggttcaggccggagaccgacgccccgtcctccatccgctccatccagatcgaggagcaggctatgaaggacttcaggcgcttctacagcagcgtgaggatcgtcaagccgcaggtctagtagcactggcggcggcggcggtggcggccttggcggagagtgactgatggcacaacaaccccctttaggctcaccctcccatttgacactggctcgttgtacattcgagtgtacagttggttctgttcgccataggttccttgagctgaacaataaacaaacaccctttgctgctgttgctgctgctttcgcagtgagtggtctcgtttagttgtaacagaagattgtacaggccatgtgagatcaccaccccccggctttggcttaacagtttaacttgagccaatgcttctttttttttttttggcgccaaaatgtctttggttgttccaagcagaggtcataaaaactgtgtggtgcgtctgcacccaggtacccaacatttttagcttcgatcggacatgatctcactttggggctgtagcctagtgcttctatatgctctcgatctgcttgactggtcggtgtgagaatttggtagatagcggcatacttgtgctgttgtgcaatagtagcactatgcatggtcatctgctaagatcgatggcagctcgtaattaatggagctagtctgcctggttcagtagcttgtcgcctatggctatcggtaataaggccggttgcaatatttttttgtttggtgagcactagctagccatgaggcgatcaaatgtcatgtgctcccatgaaccctgatgacatgtatcttcac

SEQ ID NO: 217768 - DNA, 4733 bp, Zea Mays
ctcaatttctgttcgcgtataatcgtcggatatctccctctcctcaaaatactcacaacccagagatctcacacccacgaccaccacgagggaaaaaaaacaacaacagaggagagagactagagagagagagagagagagaggagcgttggagtttggaagcagttcctgcgacctgcggccggagccccggggcatattcctcgcccggagatcccgtacccgaccctcccctgataaacagacgcaagcgtcagggagggagggagggacagagagaggtagagagggccggggcgaagggggcaaagatgcgttcttgaggagcctgtgcaggggaggtccaatccagaggccgccattccttttcttttccccccaacctctgcaggctcttcagatccagcaatccggcttgtttcttttgctggttgatttatactctatagtggttctctacttagcatcaagtcttggcatggcaatggcctcgtagctcgcggctctctaataggaataattttactcaaaatgaagctatagcgtcatgctatcttaggttgtttggacagttccttaggatactgaaactgtcttagataatggagatgatgttcactcaaacatttctcccgatagatatacaattgtaattacaccagaactgtacttacaattaagaacaacatcagctgtaacattagtagtaagaaacagttcagatagtgtgaagaagttcatctgttggcctgctatttcagatactgtgtgtgttcctgaaacttcatggagacttccatatctccaccaggcacatcaaagcagtcagctgtccgcaaaccttctcctggaagctctcttaaggatctgtgccttgtttccaaacaagggtcaatagctgaagtagaatctgctttggccttgttgaaaaaaagtggtgggaacattgatggtagaaatgcatttggtcttagtgccctccaccttgcaacatggagaaatcatctacccattgtgaggcgactcctagatgctggcgctgatccagatgcaagggatggagaatctggctggagtagcctgcatagagcacttcattttggtcacctatgtattgctggtgttcttttacagtttggtgcttccctcgctttggaggacactaagggccgtacacctgttgaccttatctcctgtccagtatcacaggccaatggagattttccagatgcagttgcaacggaagtcttcagttggggaagtgggacaaattatcagctgggaactggcaacgcccacatacaaaaactaccatgcaaagtagaagctttgcatggatcatatatcaaaacagttgctgcatcaaagtttcacagtgtagcagttagttctaatggtgaactatacacatggggatttggtcgaggtggtcgtcttggtcatccagatattcacagtggacagacaactgctgtgattacccctcgccaggtgacagtaggattaggccgtaaacgagttaatgctgtggctgcagccaaacatcatactgtgattgctacagagctgggggaattgtttacctggggatcaaatagagagggtcagcttgggtacccttctgttgatacccaaccaacaccaaggcgtgttggttcgctcaagcaaaggataatttcagtagctgctgcaaacaagcactccgctgcagttgctgatactggcgaagtattcacctggggttgcaataaggagggccaactaggatatggcacttcaaactcagcatcaaactgtatcccaagaatggtggagtacttgaaaggaaaagtacttagaggtgtttctgcagcaaagtatcatacaatagtgttaggagctgatggagaggtgttcacttggggccatcgccttgtcaccccacggcgtgtcgtagtagctcgatgccttaagaagggtggaaatacaaatctgaagtttcatcgtatggaacgacttcaagtgatttcagtggctgctggaacaacgcacaatactgctttaacagctgatggtgctcttttctactgggtttcatcagatcctgatctaaaatgccagcagatattttcaatgtgtggaaggaatattgtgaacatctcggctggaaagtactggaccgctgtggctacatcaactggtgatgttttcatgtgggatgcaaagaaacgtaaggacgaaacgccaattttcactcgggtgcatggtgttaagcgagcaacatttgtttgtgttggtgaaacgcacatgcttgtgctctcaagtatataccatcctgagtatccacccaagcctaaaagccaaggcttaaaatccatgttagaatggaacggtggaacagaagagctgggtgaagatatcctgtttgatgatgttcagcccaacagtggtttatcaggaagcagtggtgaaatgagcaaaggtgtgcctagcttgaaaagcctctgtgagaaggttgcagttgagtatttattggagccaaaaaactcaatacagcttcttgaaattgctgattccttggaagctaaggagctcaagaagcattgtgaggatttagctattcgcaacctcgattacattttcacagtgggagcttcttcaattatgaatgcttcttctgaaattcttgtgaacttagagaaattgctagatgagaaatcctcagagccttggagtcagcaccgtcttcccacaatgacagctacctatcctgctgtcattgacagtgatgtagaggaagatgaagcaagagaattccccaagacccgtaaatgtgggaaatctgcatcaaggccatctgcgatgtctagtgatgacagcttccttcagaaagactgcaccgctgaacaagccgtctctaagcagatcagagcacttcgcaagaagctgcaacagattgagattctcgaggctaaacaacttgcaggtcatcagcttgacagtcagcaggtagcgaagctcgagtctagggctgcccttgaaggtgaacttgctgaacttggcattccctcagagatatactcaacttcctctgcttgtccagcagaaggtaggacaaacagaaaacctgaggtttctaagaaacagaagagaaagaacaagcagtcaacacagaccccgtcagtgaaaaatgagcctgggcaacaaatccccattacggaacttcaagttctacaagtcaatgtctctgctgaaaaggaggcgtatgccgctgatccaattaaacctatggaggctgccgcgttcagcaacacaaaggacaccgcttctccaccggagaagaaaccttcccaaccaactccatcaaagaagaagaacagaaaaggcggcctgtcgctgttcctgagcggcgctctcgacgacaccccaaaaccaagcctccctgcccccgctgtgcctgccacaccgaagcccgaaggacccgcctggggcggcgtgaagataaccaagggacccgcttcgcttcgagacatccagaccgagcagagcagaacaaacgagcccgcgtcggccaaggcgaaggaccgccacgagaactcgccggacagcgccggccgcgcgacaaggctctcctcgttcatccccgacgcgcgttccagcccagtagccgtcgtggcgcctgctcgcgcagcggcggcgccttcttccgaaggtgacaggagcacgccgccgtggtcgtcctctgccacctcgcccaacgtgtcgcagccttcgctcagggacatacaacagatgcagcaggcaccatggcggcgtctcccacagcccgaaaacccagacatcgggcttctgtataccgccccacggcggagcgccagaggccgctggcggtggcggcgtgaaggacaacgtgcccaaccggtggttcaggccggagaccgacgccccgtcctccatccgctccatccagatcgaggagcaggctatgaaggacttcaggcgcttctacagcagcgtgaggatcgtcaagccgcaggtctagtagcactggcggcggcggcggtggcggccttggcggagagtgactgatggcacaacaaccccctttaggctcaccctcccatttgacactggctcgttgtacattcgagtgtacagttggttctgttcgccataggttccttgagctgaacaataaacaaacaccctttgctgctgttgctgctgctttcgcagtgagtggtctcgtttagttgtaacagaagattgtacaggccatgtgagatcaccaccccccggctttggcttaacagtttaacttgagccaatgcttctttttttttttttggcgccaaaatgtctttggttgttccaagcagaggtcataaaaactgtgtggtgcgtctgcacccaggtacccaacatttttagcttcgatcggacatgatctcactttggggctgtagcctagtgcttctatatgctctcgatctgcttgactggtcggtgtgagaatttggtagatagcggcatacttgtgctgttgtgcaatagtagcactatgcatggtcatctgctaagatcgatggcagctcgtaattaatggagctagtctgcctggttcagtagcttgtcgcctatggctatcggtaataaggccggttgcaatatttttttgtttggtgagcactagctagccatgaggcgatcaaatgtcatgtgctcccatgaaccctgatgacatgtatcttcac

SEQ ID NO: 217769 - DNA, 4655 bp, Zea Mays
ctcaatttctgttcgcgtataatcgtcggatatctccctctcctcaaaatactcacaacccagagatctcacacccacgaccaccacgagggaaaaaaaacaacaacagaggagagagactagagagagagagagagagagaggagcgttggagtttggaagcagttcctgcgacctgcggccggagccccggggcatattcctcgcccggagatcccgtacccgaccctcccctgataaacagacgcaagcgtcagggagggagggagggacagagagaggtagagagggccggggcgaagggggcaaagatgcgttcttgaggagcctgtgcaggggaggtccaatccagaggccgccattccttttcttttccccccaacctctgcaggctcttcagatccagcaatccggcttgtttcttttgctggttgatttatactctatagtggttctctacttagcatcaagtcttggcatggcaatggcctcgtagctcgcggctctctaataggaataattttactcaaaatgaagctatagcgtcatgctatcttaggttgtttggacagttccttaggatactgaaactgtcttagataatggagatgatgttcactcaaacatttctcccgatagatatacaattgtaattacaccagaactgtacttacaattaagaacaacatcagctgtaacattagtagtaagaaacagttcagatagtgtgaagaagttcatctgttggcctgctatttcagatactgtgtgtgttcctgaaacttcatggagacttccatatctccaccaggcacatcaaagcagtcagctgtccgcaaaccttctcctggaagctctcttaaggatctgtgccttgtttccaaacaagggtcaatagctgaagtagaatctgctttggccttgttgaaaaaaagtggtgggaacattgatggtagaaatgcatttggtcttagtgccctccaccttgcaacatggagaaatcatctacccattgtgaggcgactcctagatgctggcgctgatccagatgcaagggatggagaatctggctggagtagcctgcatagagcacttcattttggtcacctatgtattgctggtgttcttttacagtttggtgcttccctcgctttggaggacactaagggccgtacacctgttgaccttatctcctgtccagtatcacaggccaatggagattttccagatgcagttgcaacggaagtcttcagttggggaagtgggacaaattatcagctgggaactggcaacgcccacatacaaaaactaccatgcaaagtagaagctttgcatggatcatatatcaaaacagttgctgcatcaaagtttcacagtgtagcagttagttctaatggtgaactatacacatggggatttggtcgaggtggtcgtcttggtcatccagatattcacagccaaacatcatactgtgattgctacagagctgggggaattgtttacctggggatcaaatagagagggtcagcttgggtacccttctgttgatacccaaccaacaccaaggcgtgttggttcgctcaagcaaaggataatttcagtagctgctgcaaacaagcactccgctgcagttgctgatactggcgaagtattcacctggggttgcaataaggagggccaactaggatatggcacttcaaactcagcatcaaactgtatcccaagaatggtggagtacttgaaaggaaaagtacttagaggtgtttctgcagcaaagtatcatacaatagtgttaggagctgatggagaggtgttcacttggggccatcgccttgtcaccccacggcgtgtcgtagtagctcgatgccttaagaagggtggaaatacaaatctgaagtttcatcgtatggaacgacttcaagtgatttcagtggctgctggaacaacgcacaatactgctttaacagctgatggtgctcttttctactgggtttcatcagatcctgatctaaaatgccagcagatattttcaatgtgtggaaggaatattgtgaacatctcggctggaaagtactggaccgctgtggctacatcaactggtgatgttttcatgtgggatgcaaagaaacgtaaggacgaaacgccaattttcactcgggtgcatggtgttaagcgagcaacatttgtttgtgttggtgaaacgcacatgcttgtgctctcaagtatataccatcctgagtatccacccaagcctaaaagccaaggcttaaaatccatgttagaatggaacggtggaacagaagagctgggtgaagatatcctgtttgatgatgttcagcccaacagtggtttatcaggaagcagtggtgaaatgagcaaaggtgtgcctagcttgaaaagcctctgtgagaaggttgcagttgagtatttattggagccaaaaaactcaatacagcttcttgaaattgctgattccttggaagctaaggagctcaagaagcattgtgaggatttagctattcgcaacctcgattacattttcacagtgggagcttcttcaattatgaatgcttcttctgaaattcttgtgaacttagagaaattgctagatgagaaatcctcagagccttggagtcagcaccgtcttcccacaatgacagctacctatcctgctgtcattgacagtgatgtagaggaagatgaagcaagagaattccccaagacccgtaaatgtgggaaatctgcatcaaggccatctgcgatgtctagtgatgacagcttccttcagaaagactgcaccgctgaacaagccgtctctaagcagatcagagcacttcgcaagaagctgcaacagattgagattctcgaggctaaacaacttgcaggtcatcagcttgacagtcagcaggtagcgaagctcgagtctagggctgcccttgaaggtgaacttgctgaacttggcattccctcagagatatactcaacttcctctgcttgtccagcagaaggtaggacaaacagaaaacctgaggtttctaagaaacagaagagaaagaacaagcagtcaacacagaccccgtcagtgaaaaatgagcctgggcaacaaatccccattacggaacttcaagttctacaagtcaatgtctctgctgaaaaggaggcgtatgccgctgatccaattaaacctatggaggctgccgcgttcagcaacacaaaggacaccgcttctccaccggagaagaaaccttcccaaccaactccatcaaagaagaagaacagaaaaggcggcctgtcgctgttcctgagcggcgctctcgacgacaccccaaaaccaagcctccctgcccccgctgtgcctgccacaccgaagcccgaaggacccgcctggggcggcgtgaagataaccaagggacccgcttcgcttcgagacatccagaccgagcagagcagaacaaacgagcccgcgtcggccaaggcgaaggaccgccacgagaactcgccggacagcgccggccgcgcgacaaggctctcctcgttcatccccgacgcgcgttccagcccagtagccgtcgtggcgcctgctcgcgcagcggcggcgccttcttccgaaggtgacaggagcacgccgccgtggtcgtcctctgccacctcgcccaacgtgtcgcagccttcgctcagggacatacaacagatgcagcagaggcaccatggcggcgtctcccacagcccgaaaacccagacatcgggcttctgtataccgccccacggcggagcgccagaggccgctggcggtggcggcgtgaaggacaacgtgcccaaccggtggttcaggccggagaccgacgccccgtcctccatccgctccatccagatcgaggagcaggctatgaaggacttcaggcgcttctacagcagcgtgaggatcgtcaagccgcaggtctagtagcactggcggcggcggcggtggcggccttggcggagagtgactgatggcacaacaaccccctttaggctcaccctcccatttgacactggctcgttgtacattcgagtgtacagttggttctgttcgccataggttccttgagctgaacaataaacaaacaccctttgctgctgttgctgctgctttcgcagtgagtggtctcgtttagttgtaacagaagattgtacaggccatgtgagatcaccaccccccggctttggcttaacagtttaacttgagccaatgcttctttttttttttttggcgccaaaatgtctttggttgttccaagcagaggtcataaaaactgtgtggtgcgtctgcacccaggtacccaacatttttagcttcgatcggacatgatctcactttggggctgtagcctagtgcttctatatgctctcgatctgcttgactggtcggtgtgagaatttggtagatagcggcatacttgtgctgttgtgcaatagtagcactatgcatggtcatctgctaagatcgatggcagctcgtaattaatggagctagtctgcctggttcagtagcttgtcgcctatggctatcggtaataaggccggttgcaatatttttttgtttggtgagcactagctagccatgaggcgatcaaatgtcatgtgctcccatgaaccctgatgacatgtatcttcac

SEQ ID NO: 217770 - DNA, 3126 bp, Zea Mays
ctcaatttctgttcgcgtataatcgtcggatatctccctctcctcaaaatactcacaacccagagatctcacacccacgaccaccacgagggaaaaaaaacaacaacagaggagagagactagagagagagagagagagagaggagcgttggagtttggaagcagttcctgcgacctgcggccggagccccggggcatattcctcgcccggagatcccgtacccgaccctcccctgataaacagacgcaagcgtcagggagggagggagggacagagagaggtagagagggccggggcgaagggggcaaagatgcgttcttgaggagcctgtgcaggggaggtccaatccagaggccgccattccttttcttttccccccaacctctgcaggctcttcagatccagcaatccggcttgtttcttttgctggttgatttatactctatagtggttctctacttagcatcaagtcttggcatggcaatggcctcgtagctcgcggctctctaataggaataattttactcaaaatgaagctatagcgtcatgctatcttaggcacatcaaagcagtcagctgtccgcaaaccttctcctggaagctctcttaaggatctgtgccttgtttccaaacaagggtcaatagctgaagtagaatctgctttggccttgttgaaaaaaagtggtgggaacattgatggtagaaatgcatttggtcttagtgccctccaccttgcaacatggagaaatcatctacccattgtgaggcgactcctagatgctggcgctgatccagatgcaagggatggagaatctggctggagtagcctgcatagagcacttcattttggtcacctatgtattgctggtgttcttttacagtttggtgcttccctcgctttggaggacactaagggccgtacacctgttgaccttatctcctgtccagtatcacaggccaatggagattttccagatgcagtggacagacaactgctgtgattacccctcgccaggtgacagtaggattaggccgtaaacgagttaatgctgtggctgcagccaaacatcatactgtgattgctacagagctgggggaattgtttacctggggatcaaatagagagggtcagcttgggtacccttctgttgatacccaaccaacaccaaggcgtgttggttcgctcaagcaaaggataatttcagtagctgctgcaaacaagcactccgctgcagttgctgatactggcgaagtattcacctggggttgcaataaggagggccaactaggatatggcacttcaaactcagcatcaaactgtatcccaagaatggtggagtacttgaaaggaaaagtacttagaggtgtttctgcagcaaagtatcatacaatagtgttaggagctgatggagaggtgttcacttggggccatcgccttgtcaccccacggcgtgtcgtagtagctcgatgccttaagaagggtggaaatacaaatctgaagtttcatcgtatggaacgacttcaagtgatttcagtggctgctggaacaacgcacaatactgctttaacagctgatggtgctcttttctactgggtttcatcagatcctgatctaaaatgccagcaggaggcgtatgccgctgatccaattaaacctatggaggctgccgcgttcagcaacacaaaggacaccgcttctccaccggagaagaaaccttcccaaccaactccatcaaagaagaagaacagaaaaggcggcctgtcgctgttcctgagcggcgctctcgacgacaccccaaaaccaagcctccctgcccccgctgtgcctgccacaccgaagcccgaaggacccgcctggggcggcgtgaagataaccaagggacccgcttcgcttcgagacatccagaccgagcagagcagaacaaacgagcccgcgtcggccaaggcgaaggaccgccacgagaactcgccggacagcgccggccgcgcgacaaggctctcctcgttcatccccgacgcgcgttccagcccagtagccgtcgtggcgcctgctcgcgcagcggcggcgccttcttccgaaggtgacaggagcacgccgccgtggtcgtcctctgccacctcgcccaacgtgtcgcagccttcgctcagggacatacaacagatgcagcagaggcaccatggcggcgtctcccacagcccgaaaacccagacatcgggcttctgtataccgccccacggcggagcgccagaggccgctggcggtggcggcgtgaaggacaacgtgcccaaccggtggttcaggccggagaccgacgccccgtcctccatccgctccatccagatcgaggagcaggctatgaaggacttcaggcgcttctacagcagcgtgaggatcgtcaagccgcaggtctagtagcactggcggcggcggcggtggcggccttggcggagagtgactgatggcacaacaaccccctttaggctcaccctcccatttgacactggctcgttgtacattcgagtgtacagttggttctgttcgccataggttccttgagctgaacaataaacaaacaccctttgctgctgttgctgctgctttcgcagtgagtggtctcgtttagttgtaacagaagattgtacaggccatgtgagatcaccaccccccggctttggcttaacagtttaacttgagccaatgcttctttttttttttttggcgccaaaatgtctttggttgttccaagcagaggtcataaaaactgtgtggtgcgtctgcacccaggtacccaacatttttagcttcgatcggacatgatctcactttggggctgtagcctagtgcttctatatgctctcgatctgcttgactggtcggtgtgagaatttggtagatagcggcatacttgtgctgttgtgcaatagtagcactatgcatggtcatctgctaagatcgatggcagctcgtaattaatggagctagtctgcctggttcagtagcttgtcgcctatggctatcggtaataaggccggttgcaatatttttttgtttggtgagcactagctagccatgaggcgatcaaatgtcatgtgctcccatgaaccctgatgacatgtatcttcac

SEQ ID NO: 217771 - DNA, 4685 bp, Zea Mays
ctcaatttctgttcgcgtataatcgtcggatatctccctctcctcaaaatactcacaacccagagatctcacacccacgaccaccacgagggaaaaaaaacaacaacagaggagagagactagagagagagagagagagagaggagcgttggagtttggaagcagttcctgcgacctgcggccggagccccggggcatattcctcgcccggagatcccgtacccgaccctcccctgataaacagacgcaagcgtcagggagggagggagggacagagagaggtagagagggccggggcgaagggggcaaagatgcgttcttgaggagcctgtgcaggggaggtccaatccagaggccgccattccttttcttttccccccaacctctgcaggctcttcagatccagcaatccggcttgtttcttttgctggttgatttatactctatagtggttctctacttagcatcaagtcttggcatggcaatggcctcgtagctcgcggctctctaataggaataattttactcaaaatgaagctatagcgtcatgctatcttaggttgtttggacagttccttaggatactgaaactgtcttagataatggagatgatgttcactcaaacatttctcccgatagatatacaattgtaattacaccagaactgtacttacaattaagaacaacatcagctgtaacattagtagtaagaaacagttcagatagtgtgaagaagttcatctgttggcctgctatttcaggcacatcaaagcagtcagctgtccgcaaaccttctcctggaagctctcttaaggatctgtgccttgtttccaaacaagggtcaatagctgaagtagaatctgctttggccttgttgaaaaaaagtggtgggaacattgatggtagaaatgcatttggtcttagtgccctccaccttgcaacatggagaaatcatctacccattgtgaggcgactcctagatgctggcgctgatccagatgcaagggatggagaatctggctggagtagcctgcatagagcacttcattttggtcacctatgtattgctggtgttcttttacagtttggtgcttccctcgctttggaggacactaagggccgtacacctgttgaccttatctcctgtccagtatcacaggccaatggagattttccagatgcagttgcaacggaagtcttcagttggggaagtgggacaaattatcagctgggaactggcaacgcccacatacaaaaactaccatgcaaagtagaagctttgcatggatcatatatcaaaacagttgctgcatcaaagtttcacagtgtagcagttagttctaatggtgaactatacacatggggatttggtcgaggtggtcgtcttggtcatccagatattcacagtggacagacaactgctgtgattacccctcgccaggtgacagtaggattaggccgtaaacgagttaatgctgtggctgcagccaaacatcatactgtgattgctacagagctgggggaattgtttacctggggatcaaatagagagggtcagcttgggtacccttctgttgatacccaaccaacaccaaggcgtgttggttcgctcaagcaaaggataatttcagtagctgctgcaaacaagcactccgctgcagttgctgatactggcgaagtattcacctggggttgcaataaggagggccaactaggatatggcacttcaaactcagcatcaaactgtatcccaagaatggtggagtacttgaaaggaaaagtacttagaggtgtttctgcagcaaagtatcatacaatagtgttaggagctgatggagaggtgttcacttggggccatcgccttgtcaccccacggcgtgtcgtagtagctcgatgccttaagaagggtggaaatacaaatctgaagtttcatcgtatggaacgacttcaagtgatttcagtggctgctggaacaacgcacaatactgctttaacagctgatggtgctcttttctactgggtttcatcagatcctgatctaaaatgccagcagatattttcaatgtgtggaaggaatattgtgaacatctcggctggaaagtactggaccgctgtggctacatcaactggtgatgttttcatgtgggatgcaaagaaacgtaaggacgaaacgccaattttcactcgggtgcatggtgttaagcgagcaacatttgtttgtgttggtgaaacgcacatgcttgtgctctcaagtatataccatcctgagtatccacccaagcctaaaagccaaggcttaaaatccatgttagaatggaacggtggaacagaagagctgggtgaagatatcctgtttgatgatgttcagcccaacagtggtttatcaggaagcagtggtgaaatgagcaaaggtgtgcctagcttgaaaagcctctgtgagaaggttgcagttgagtatttattggagccaaaaaactcaatacagcttcttgaaattgctgattccttggaagctaaggagctcaagaagcattgtgaggatttagctattcgcaacctcgattacattttcacagtgggagcttcttcaattatgaatgcttcttctgaaattcttgtgaacttagagaaattgctagatgagaaatcctcagagccttggagtcagcaccgtcttcccacaatgacagctacctatcctgctgtcattgacagtgatgtagaggaagatgaagcaagagaattccccaagacccgtaaatgtgggaaatctgcatcaaggccatctgcgatgtctagtgatgacagcttccttcagaaagactgcaccgctgaacaagccgtctctaagcagatcagagcacttcgcaagaagctgcaacagattgagattctcgaggctaaacaacttgcaggtcatcagcttgacagtcagcaggtagcgaagctcgagtctagggctgcccttgaaggtgaacttgctgaacttggcattccctcagagatatactcaacttcctctgcttgtccagcagaaggtaggacaaacagaaaacctgaggtttctaagaaacagaagagaaagaacaagcagtcaacacagaccccgtcagtgaaaaatgagcctgggcaacaaatccccattacggaacttcaagttctacaagtcaatgtctctgctgaaaaggaggcgtatgccgctgatccaattaaacctatggaggctgccgcgttcagcaacacaaaggacaccgcttctccaccggagaagaaaccttcccaaccaactccatcaaagaagaagaacagaaaaggcggcctgtcgctgttcctgagcggcgctctcgacgacaccccaaaaccaagcctccctgcccccgctgtgcctgccacaccgaagcccgaaggacccgcctggggcggcgtgaagataaccaagggacccgcttcgcttcgagacatccagaccgagcagagcagaacaaacgagcccgcgtcggccaaggcgaaggaccgccacgagaactcgccggacagcgccggccgcgcgacaaggctctcctcgttcatccccgacgcgcgttccagcccagtagccgtcgtggcgcctgctcgcgcagcggcggcgccttcttccgaaggtgacaggagcacgccgccgtggtcgtcctctgccacctcgcccaacgtgtcgcagccttcgctcagggacatacaacagatgcagcagaggcaccatggcggcgtctcccacagcccgaaaacccagacatcgggcttctgtataccgccccacggcggagcgccagaggccgctggcggtggcggcgtgaaggacaacgtgcccaaccggtggttcaggccggagaccgacgccccgtcctccatccgctccatccagatcgaggagcaggctatgaaggacttcaggcgcttctacagcagcgtgaggatcgtcaagccgcaggtctagtagcactggcggcggcggcggtggcggccttggcggagagtgactgatggcacaacaaccccctttaggctcaccctcccatttgacactggctcgttgtacattcgagtgtacagttggttctgttcgccataggttccttgagctgaacaataaacaaacaccctttgctgctgttgctgctgctttcgcagtgagtggtctcgtttagttgtaacagaagattgtacaggccatgtgagatcaccaccccccggctttggcttaacagtttaacttgagccaatgcttctttttttttttttggcgccaaaatgtctttggttgttccaagcagaggtcataaaaactgtgtggtgcgtctgcacccaggtacccaacatttttagcttcgatcggacatgatctcactttggggctgtagcctagtgcttctatatgctctcgatctgcttgactggtcggtgtgagaatttggtagatagcggcatacttgtgctgttgtgcaatagtagcactatgcatggtcatctgctaagatcgatggcagctcgtaattaatggagctagtctgcctggttcagtagcttgtcgcctatggctatcggtaataaggccggttgcaatatttttttgtttggtgagcactagctagccatgaggcgatcaaatgtcatgtgctcccatgaaccctgatgacatgtatcttcac

SEQ ID NO: 217772 - DNA, 4354 bp, Zea Mays
ctcaatttctgttcgcgtataatcgtcggatatctccctctcctcaaaatactcacaacccagagatctcacacccacgaccaccacgagggaaaaaaaacaacaacagaggagagagactagagagagagagagagagagaggagcgttggagtttggaagcagttcctgcgacctgcggccggagccccggggcatattcctcgcccggagatcccgtacccgaccctcccctgataaacagacgcaagcgtcagggagggagggagggacagagagaggtagagagggccggggcgaagggggcaaagatgcgttcttgaggagcctgtgcaggggaggtccaatccagaggccgccattccttttcttttccccccaacctctgcaggctcttcagatccagcaatccggcttgtttcttttgctggcacatcaaagcagtcagctgtccgcaaaccttctcctggaagctctcttaaggatctgtgccttgtttccaaacaagggtcaatagctgaagtagaatctgctttggccttgttgaaaaaaagtggtgggaacattgatggtagaaatgcatttggtcttagtgccctccaccttgcaacatggagaaatcatctacccattgtgaggcgactcctagatgctggcgctgatccagatgcaagggatggagaatctggctggagtagcctgcatagagcacttcattttggtcacctatgtattgctggtgttcttttacagtttggtgcttccctcgctttggaggacactaagggccgtacacctgttgaccttatctcctgtccagtatcacaggccaatggagattttccagatgcagttgcaacggaagtcttcagttggggaagtgggacaaattatcagctgggaactggcaacgcccacatacaaaaactaccatgcaaagtagaagctttgcatggatcatatatcaaaacagttgctgcatcaaagtttcacagtgtagcagttagttctaatggtgaactatacacatggggatttggtcgaggtggtcgtcttggtcatccagatattcacagtggacagacaactgctgtgattacccctcgccaggtgacagtaggattaggccgtaaacgagttaatgctgtggctgcagccaaacatcatactgtgattgctacagagctgggggaattgtttacctggggatcaaatagagagggtcagcttgggtacccttctgttgatacccaaccaacaccaaggcgtgttggttcgctcaagcaaaggataatttcagtagctgctgcaaacaagcactccgctgcagttgctgatactggcgaagtattcacctggggttgcaataaggagggccaactaggatatggcacttcaaactcagcatcaaactgtatcccaagaatggtggagtacttgaaaggaaaagtacttagaggtgtttctgcagcaaagtatcatacaatagtgttaggagctgatggagaggtgttcacttggggccatcgccttgtcaccccacggcgtgtcgtagtagctcgatgccttaagaagggtggaaatacaaatctgaagtttcatcgtatggaacgacttcaagtgatttcagtggctgctggaacaacgcacaatactgctttaacagctgatggtgctcttttctactgggtttcatcagatcctgatctaaaatgccagcagatattttcaatgtgtggaaggaatattgtgaacatctcggctggaaagtactggaccgctgtggctacatcaactggtgatgttttcatgtgggatgcaaagaaacgtaaggacgaaacgccaattttcactcgggtgcatggtgttaagcgagcaacatttgtttgtgttggtgaaacgcacatgcttgtgctctcaagtatataccatcctgagtatccacccaagcctaaaagccaaggcttaaaatccatgttagaatggaacggtggaacagaagagctgggtgaagatatcctgtttgatgatgttcagcccaacagtggtttatcaggaagcagtggtgaaatgagcaaaggtgtgcctagcttgaaaagcctctgtgagaaggttgcagttgagtatttattggagccaaaaaactcaatacagcttcttgaaattgctgattccttggaagctaaggagctcaagaagcattgtgaggatttagctattcgcaacctcgattacattttcacagtgggagcttcttcaattatgaatgcttcttctgaaattcttgtgaacttagagaaattgctagatgagaaatcctcagagccttggagtcagcaccgtcttcccacaatgacagctacctatcctgctgtcattgacagtgatgtagaggaagatgaagcaagagaattccccaagacccgtaaatgtgggaaatctgcatcaaggccatctgcgatgtctagtgatgacagcttccttcagaaagactgcaccgctgaacaagccgtctctaagcagatcagagcacttcgcaagaagctgcaacagattgagattctcgaggctaaacaacttgcaggtcatcagcttgacagtcagcaggtagcgaagctcgagtctagggctgcccttgaaggtgaacttgctgaacttggcattccctcagagatatactcaacttcctctgcttgtccagcagaaggtaggacaaacagaaaacctgaggtttctaagaaacagaagagaaagaacaagcagtcaacacagaccccgtcagtgaaaaatgagcctgggcaacaaatccccattacggaacttcaagttctacaagtcaatgtctctgctgaaaaggaggcgtatgccgctgatccaattaaacctatggaggctgccgcgttcagcaacacaaaggacaccgcttctccaccggagaagaaaccttcccaaccaactccatcaaagaagaagaacagaaaaggcggcctgtcgctgttcctgagcggcgctctcgacgacaccccaaaaccaagcctccctgcccccgctgtgcctgccacaccgaagcccgaaggacccgcctggggcggcgtgaagataaccaagggacccgcttcgcttcgagacatccagaccgagcagagcagaacaaacgagcccgcgtcggccaaggcgaaggaccgccacgagaactcgccggacagcgccggccgcgcgacaaggctctcctcgttcatccccgacgcgcgttccagcccagtagccgtcgtggcgcctgctcgcgcagcggcggcgccttcttccgaaggtgacaggagcacgccgccgtggtcgtcctctgccacctcgcccaacgtgtcgcagccttcgctcagggacatacaacagatgcagcagaggcaccatggcggcgtctcccacagcccgaaaacccagacatcgggcttctgtataccgccccacggcggagcgccagaggccgctggcggtggcggcgtgaaggacaacgtgcccaaccggtggttcaggccggagaccgacgccccgtcctccatccgctccatccagatcgaggagcaggctatgaaggacttcaggcgcttctacagcagcgtgaggatcgtcaagccgcaggtctagtagcactggcggcggcggcggtggcggccttggcggagagtgactgatggcacaacaaccccctttaggctcaccctcccatttgacactggctcgttgtacattcgagtgtacagttggttctgttcgccataggttccttgagctgaacaataaacaaacaccctttgctgctgttgctgctgctttcgcagtgagtggtctcgtttagttgtaacagaagattgtacaggccatgtgagatcaccaccccccggctttggcttaacagtttaacttgagccaatgcttctttttttttttttggcgccaaaatgtctttggttgttccaagcagaggtcataaaaactgtgtggtgcgtctgcacccaggtacccaacatttttagcttcgatcggacatgatctcactttggggctgtagcctagtgcttctatatgctctcgatctgcttgactggtcggtgtgagaatttggtagatagcggcatacttgtgctgttgtgcaatagtagcactatgcatggtcatctgctaagatcgatggcagctcgtaattaatggagctagtctgcctggttcagtagcttgtcgcctatggctatcggtaataaggccggttgcaatatttttttgtttggtgagcactagctagccatgaggcgatcaaatgtcatgtgctcccatgaaccctgatgacatgtatcttcac

SEQ ID NO: 217773 - DNA, 2945 bp, Zea Mays
cttccttccgcttcctccgtcccctggcggcctggcccctgcggtttctggttgtccctcacgccaatgtagcttgcccctgttttgttgctttgaccaccttaaaaacctcagggccttcaaatatactcaccgaatcacatcctgtcacgcctcctgctcaaattcctaacgcccgagaaaccaagaaccggggtgaggccgctgtgcgacgccgtcaccttcacctaatcccaacttccccactagtcctcaagtgtctctcttcttctcttcggttacaagagcagaccggagttaccgggcggtggaggccgcgatgaagagccctcctgtcatggatcccgaggcgccgccatcgccgccgctgccgggcactcctcccgatgacgaggaggagaagcggggaggacggaacggggtgccatggcggatgacgctgagcctggcgtaccagagccttggcgtggtttacggcgacctcagcacgtcgccgctgtacgtgtacaaggcggcgttcgcggaggacatccagcacacggagagcaacgaggagatcctcggcgtgctctccttcgtcttctggacgctcacgctcgtcccgctcctcaagtacgtctgcgtcgtcctccgcgccgacgaccacggcgaaggaggcaccttcgcgctctactccctcctctgccgccacgcgcgcgccgcgctcctcccgccaggacgaaccgccgccggggacgaggaccagttcttggacggagccgacggtggcaccaagaaggctacggcgcagaacggcaatgcagtgacgctgggcgggggcgctgctgccagcgtcaggaggctgctggagcggcacaaggtgctgcagcgtgtgctgctcgtgctggcgctggtgggcacctgcatggtgatcggcgacggtgtgctcacgccggccatctccgtgttctctgcagtttccgggctggagctgtccatggagaaggaacatcataagtatgtggaacttcctattgcctgtatcatactggtttgcctgtttgcactgcaacactatggtacacaccgggttggcttcatttttgctccagtagtggtcacatggctcctatgtataagcgttattggtgtttacaatattattcactgggaacccactgtatatcgagcattatctccgtattacatgtacaagttcttgaggaagacacagagaggaggttggatgtccctgggaggaatactgttatgcgtaactggttctgaagcaatgtttgccgatctagggcattttaaccagttgtcaatacagcattgatccttgcatacatgggacaagctgcttatctgtgtaagcatcataccatggaaagtgactataggattggattctatgtgtctgtgccagagaaaattaggtggcccgttatggcaattgctattcttgcagcagttgtgggaagccaagctgtcatcactggtacattctcaatgatcaagcagtgcacttctctgggctgctttcctcgggtgaagataattcatacatctgccaaagtacacgggcaaatatacatccctgagatcaattggattctgatgatactgtgcttagctgtaaccattggtttcaggaacacaaaacacttggggaatgcatcaggattggctgttataaccgtcatgctggtgacaacgtgtctgatgtccctggtgatagtcttgtgctggcataagagcatatttctggcaattggcttcattgtgttctttggaaccattgaggcactgtacttctcagcggcactcatcaagttcagggagggggcctgggtcccaatcgtccttgcttttatcttcattttgataatgtgcatctggcactatggcaccatcaagaggtatgagtttgacgtccagagcaaggtttccatcaactggctccttggtctcagcccgaacctcggcatagttcgtgtccgcggcattggcctcatccacaccgagctcgaaactggcgtcccggcaatcttctcgcattttgtcaccaacttaccagccttccaccaggtactcatattcatgtgcatcaagaacgtaccaataccacatgtccgtcctgaagagaggttcctcgttgggaggatcggcccgaagcagtacagaatgtaccggtgcatcgtcaggtacggctaccacgacttccacaaggacgacattgagttcgagaaggagctggtgtgcagcgtcgcggagttcatccggtcagggtcgtccaagttgaacggcatgcccgaggagttcgacgaggaggagcagcgcatggcggtagtccgctccaacagcatccgcatgctcgaggaagaggctacagtggagaagaccgtcggcccgtcccaggccagcagggagatacggtcgccgtcgcccactcctcccccggtggttggccccaagaagcgggtgcggttcgtgctgccggcagcgagcccgaagccgaatgccggcgtgcaggaggagctgcaggagctgtccgacgcgcgggaggccggcatggcgttcatcctgggccactcgcacgtgaaggcgaagagcgggtccagcttcctccgccggttcgtgatcaacttctgctacgacttcctgcggaggaacagccggggtcccaactacgccgtctccatcccgcacgcctccacgctggaggtgggtatgatgtactatatctgatctgatgactgaacccctgaaactgagggggagaaatataggagcaggaaaagatgaagaggaaatggaacaaaaagttttcagctgtatatgctagatcttgtaagtaactgctggtgagttccgttgtaaatgcagcttagttttcttgttaggccttcggcttctctcgtgaataggagtaccaaaattgccttcgccggtggagaaaattt

SEQ ID NO: 217774 - DNA, 2921 bp, Zea Mays
ccgcttcctccgtcccctggcggcctggcccctgcggtttctggttgtccctcacgccaatgtagcttgcccctgttttgttgctttgaccaccttaaaaacctcagggccttcaaatatactcaccgaatcacatcctgtcacgcctcctgctcaaattcctaacgcccgagaaaccaagaaccggggtgaggccgctgtgcgacgccgtcaccttcacctaatcccaacttccccactagtcctcaagtgtctctcttcttctcttcggttacaagagcagaccggagttaccgggcggtggaggccgcgatgaagagccctcctgtcatggatcccgaggcgccgccatcgccgccgctgccgggcactcctcccgatgacgaggaggagaagcggggaggacggaacggggtgccatggcggatgacgctgagcctggcgtaccagagccttggcgtggtttacggcgacctcagcacgtcgccgctgtacgtgtacaaggcggcgttcgcggaggacatccagcacacggagagcaacgaggagatcctcggcgtgctctccttcgtcttctggacgctcacgctcgtcccgctcctcaagtacgtctgcgtcgtcctccgcgccgacgaccacggcgaaggaggcaccttcgcgctctactccctcctctgccgccacgcgcgcgccgcgctcctcccgccaggacgaaccgccgccggggacgaggaccagttcttggacggagccgacggtggcaccaagaaggctacggcgcagaacggcaatgcagtgacgctgggcgggggcgctgctgccagcgtcaggaggctgctggagcggcacaaggtgctgcagcgtgtgctgctcgtgctggcgctggtgggcacctgcatggtgatcggcgacggtgtgctcacgccggccatctccgtgttctctgcagtttccgggctggagctgtccatggagaaggaacatcataagtatgtggaacttcctattgcctgtatcatactggtttgcctgtttgcactgcaacactatggtacacaccgggttggcttcatttttgctccagtagtggtcacatggctcctatgtataagcgttattggtgtttacaatattattcactgggaacccactgtatatcgagcattatctccgtattacatgtacaagttcttgaggaagacacagagaggaggttggatgtccctgggaggaatactgttatgcgtaactggttctgaagcaatgtttgccgatctagggcattttaaccagttgtcaatacagattgcttttacatgcatggtgtatccagcattgatccttgcatacatgggacaagctgcttatctgtgtaagcatcataccatggaaagtgactataggattggattctatgtgtctgtgccagttgtgggaagccaagctgtcatcactggtacattctcaatgatcaagcagtgcacttctctgggctgctttcctcgggtgaagataattcatacatctgccaaagtacacgggcaaatatacatccctgagatcaattggattctgatgatactgtgcttagctgtaaccattggtttcaggaacacaaaacacttggggaatgcatcaggattggctgttataaccgtcatgctggtgacaacgtgtctgatgtccctggtgatagtcttgtgctggcataagagcatatttctggcaattggcttcattgtgttctttggaaccattgaggcactgtacttctcagcggcactcatcaagttcagggagggggcctgggtcccaatcgtccttgcttttatcttcattttgataatgtgcatctggcactatggcaccatcaagaggtatgagtttgacgtccagagcaaggtttccatcaactggctccttggtctcagcccgaacctcggcatagttcgtgtccgcggcattggcctcatccacaccgagctcgaaactggcgtcccggcaatcttctcgcattttgtcaccaacttaccagccttccaccaggtactcatattcatgtgcatcaagaacgtaccaataccacatgtccgtcctgaagagaggttcctcgttgggaggatcggcccgaagcagtacagaatgtaccggtgcatcgtcaggtacggctaccacgacttccacaaggacgacattgagttcgagaaggagctggtgtgcagcgtcgcggagttcatccggtcagggtcgtccaagttgaacggcatgcccgaggagttcgacgaggaggagcagcgcatggcggtagtccgctccaacagcatccgcatgctcgaggaagaggctacagtggagaagaccgtcggcccgtcccaggccagcagggagatacggtcgccgtcgcccactcctcccccggtggttggccccaagaagcgggtgcggttcgtgctgccggcagcgagcccgaagccgaatgccggcgtgcaggaggagctgcaggagctgtccgacgcgcgggaggccggcatggcgttcatcctgggccactcgcacgtgaaggcgaagagcgggtccagcttcctccgccggttcgtgatcaacttctgctacgacttcctgcggaggaacagccggggtcccaactacgccgtctccatcccgcacgcctccacgctggaggtgggtatgatgtactatatctgatctgatgactgaacccctgaaactgagggggagaaatataggagcaggaaaagatgaagaggaaatggaacaaaaagttttcagctgtatatgctagatcttgtaagtaactgctggtgagttccgttgtaaatgcagcttagttttcttgttaggccttcggcttctctcgtgaataggagtaccaaaattgccttcgccggtggagaaaattt

SEQ ID NO: 217775 - DNA, 2024 bp, Zea Mays
aaaggaccttattcttgacttttaaatcaataattttttcctttgtcaaatgtggaacttcctattgcctgtatcatactggtttgcctgtttgcactgcaacactatggtacacaccgggttggcttcatttttgctccagtagtggtcacatggctcctatgtataagcgttattggtgtttacaatattattcactgggaacccactgtatatcgagcattatctccgtattacatgtacaagttcttgaggaagacacagagaggaggttggatgtccctgggaggaatactgttatgcgtaactggttctgaagcaatgtttgccgatctagggcattttaaccagttgtcaatacagattgcttttacatgcatggtgtatccagcattgatccttgcatacatgggacaagctgcttatctgtgtaagcatcataccatggaaagtgactataggattggattctatgtgtctgtgccagagaaaattaggtggcccgttatggcaattgctattcttgcagcagttgtgggaagccaagctgtcatcactggtacattctcaatgatcaagcagtgcacttctctgggctgctttcctcgggtgaagataattcatacatctgccaaagtacacgggcaaatatacatccctgagatcaattggattctgatgatactgtgcttagctgtaaccattggtttcaggaacacaaaacacttggggaatgcatcaggattggctgttataaccgtcatgctggtgacaacgtgtctgatgtccctggtgatagtcttgtgctggcataagagcatatttctggcaattggcttcattgtgttctttggaaccattgaggcactgtacttctcagcggcactcatcaagttcagggagggggcctgggtcccaatcgtccttgcttttatcttcattttgataatgtgcatctggcactatggcaccatcaagaggtatgagtttgacgtccagagcaaggtttccatcaactggctccttggtctcagcccgaacctcggcatagttcgtgtccgcggcattggcctcatccacaccgagctcgaaactggcgtcccggcaatcttctcgcattttgtcaccaacttaccagccttccaccaggtactcatattcatgtgcatcaagaacgtaccaataccacatgtccgtcctgaagagaggttcctcgttgggaggatcggcccgaagcagtacagaatgtaccggtgcatcgtcaggtacggctaccacgacttccacaaggacgacattgagttcgagaaggagctggtgtgcagcgtcgcggagttcatccggtcagggtcgtccaagttgaacggcatgcccgaggagttcgacgaggaggagcagcgcatggcggtagtccgctccaacagcatccgcatgctcgaggaagaggctacagtggagaagaccgtcggcccgtcccaggccagcagggagatacggtcgccgtcgcccactcctcccccggtggttggccccaagaagcgggtgcggttcgtgctgccggcagcgagcccgaagccgaatgccggcgtgcaggaggagctgcaggagctgtccgacgcgcgggaggccggcatggcgttcatcctgggccactcgcacgtgaaggcgaagagcgggtccagcttcctccgccggttcgtgatcaacttctgctacgacttcctgcggaggaacagccggggtcccaactacgccgtctccatcccgcacgcctccacgctggaggtgggtatgatgtactatatctgatctgatgactgaacccctgaaactgagggggagaaatataggagcaggaaaagatgaagaggaaatggaacaaaaagttttcagctgtatatgctagatcttgtaagtaactgctggtgagttccgttgtaaatgcagcttagttttcttgttaggccttcggcttctctcgtgaataggagtaccaaaattgccttcgccggtggagaaaattt

SEQ ID NO: 217776 - DNA, 3447 bp, Zea Mays
ctcgctcactccccgctttacgctctcttcccttcgtccaaacttggcacccgcggcgcccttaagaacgcgcatgcacactctccttcaggagaatccggaatcatgaaacaacagggaccactgctgcaggtgtgaatggattatttgcttttcgttcggacttgttggggtttcatccgaattaactaacgaggcagaccacaaagagtggaaaagggggcactccgtactctatctaattcagggagatttgcatgagctgatccaaaacagaggatggccctgttcgatcggaaccagaggcagaggtcgtcgttctgctccacggcgaccttcgtcgtgttcgtcgcgctctgcctcctcggcatgtggatgatatcctcccccgagaacgtcccgtcggccatttccttgtcctcggagaaggtcgtcaagtccgacgtcaaagaggaggacagctccattgacgccaccaataccgtcaagcaggacagtgccaacgtcgtctcagaggcgaccacggacggtggcgctgccacggagagcgccgaggatgtcgacctcccgggcaagcccggtggcggtggagcatcagaaggcgatggcgggaaggcgtcgtccaaggaccagtcgtttgacgacgagaacggcagaaccgagagcggggagctcgtcaaaccaggggccggagagacggacgccgtcgcggggcaggagcaggacaagggcactggcgaggacccggtgctggagaacgacgcgaaggtcgatgccgccggcaaggagcagacgccgatcgacaccaaggatgcctccgggctggatcagagcgtcgagcagacagtcacggacacgaaggcgagcgcatcagagcaggcggcggcgactggcctcgacaaggtgagcagcgccgaggcaggcggtggcacgcccaagaaactgacgttcgatgacgagaacggcaagatggacggagtcgacctcgtgaaggatgacggcaacaagactcgcatctcggaggagagtgccaaggtcgaaggcgccgcgttgacggtgaagccatcggccaaagcggcgacagcgactgccaccgacgctgagaaacaggaggaggcgtcggcggttgctactgacgctgagaaacaggaggaggcgtcggcggtcgccactgacgccagcaccactgcatccaccacgacttccgaggacgagaggaaacaggacggtgtcgagcagcagctgcctgcaacggaggcgcagcctaacgtccaggcagagctactcacagagcgcgcggcacagaacggatcgttcacgacgcaggcggcggagtccaccgaggagaagaagaaccgcgccgagaagaaagggaagaaaggaaagaagaaggcggccggcgtggcggcggtggcatggaaactgtgcaactcgagcgccggcgccgactacatcccgtgcctggacaacgtggcggccatcaagaagctcaagacggacaagcactacgagcaccgggagcggcactgccccgaggtggcaccgacgtgcctggtcccggcgccgccggagtaccgagagccgatccggtggccgcacagccgcgacaagatctggtactacaacgtgccgcacacgaagctggcggagtacaagggccaccagaactgggtgaaggtctcgggcgagtacctgacgttcccgggcggcggcacgcagttcaagcacggcgcgctgcactacatcgagttgatccagaactcgttcccggatgtggcgtgggggaggcaaagccgcgtagtgctggacgtcggctgcggcgtggccagcttcggcgggtacctgttcgaccgcgacacgcttaccatgtccctggcgcccaaggacgagcacgaggcgcaggtgcagttcgcgctggagcgcggcatcccggccatctccgccgtgatgggcacccagcgcctcccgttccccgccaacgtcttcgacgtcgtgcactgcgcgcgctgccgcgtgccgtggcacatcgacggcggcatgctcctcctcgagctcaaccgcctgctccgcccgggcggcttcttcgtctggtcggccacgccggtgtaccagaagctcccggaggacgtggagatctgggacgaaatggtgaagctgaccaaggcgatgtgctgggagttggtggcgaagaccagggacaccgtcgacctggtcggactcgtcatcttccagaagccgatagacaacgtctgctatgataggaggccggagaaggagccggcactgtgcgagccctccgacgatcccaacgctgcatggaacataaagttccgggcgtgtatgcaccgtgttcccgaggaccagtcagtgcgtggcgcccggtggccggtgctctggccggcgaggctgcggaaggcgccatactggctggaccgcagccaggtgggtgtgtacggcaagccggctccggacgacttcgcggcggacctccagcactggaagaaggtggtccggagctcgtacctcgccggcatgggcatcgactggaagaccatccggaacgtcatggacatgagggccgtctacggagggttcgcggcggcactgcgggacatgaaggtgtgggtgatgaacgtggtgaccatcgactcgccggacacgctgccggtgatctacgagcgcgggctgttcgggatctaccatgactggtgcgagtccttcagcacctacccgaggtcctacgacctcctccatgccgaccacctgttctccaagctcaagcccaggtgcaaggtgttgccggtgatcgtggaggtggaccggatcctgaggccgaacggcaagctcatcgtgcgggacgacaaggagacggtggacgagatccagggcgtggtgaggtctttgcagtgggaggtcaggatgaccgtgtccaagaacaagcaggcaatgctgtgtgcgaggaagacgacgtggcggcccacggaaatcgagaccagatgacctaaccgtgtagttgtttcaaaacacgtgaatctggatatcgtggagcttgcgtgcagaggaagacgaaaggggtctgcacacagtttgttgtttaggatacgacatattgctctcatgtggtgactcggcggattttgtactcacgttaatttggttgatttttgtagaagctattctcacacaaatggattaagaaacgaatcgtttgatggctagaatctagccaggagccaaaaaaacagggccataatagcatatattgcaatgtattatgtattcatattcgaccatgatagaattgaagaaaagttgtagatgactggaaacattttgtaggagttgtgttatattgtttttagagggtttcgatggatatatattttctagtggtcttgcttgcacctggcacttaaaatcgagtacgtagatatgtaatttgtgcaa

SEQ ID NO: 217777 - DNA, 3785 bp, Zea Mays
ccggaatcatgaaacaacagggaccactgctgcaggtgtgaatggattatttgcttttcgttcggacttgttggggtttcatccgaattaactaacgaggcagaccacaaagagtggaaaagggggcactccgtactctatctaattcagggagatttgcatgagctgatccaaaacagaggatggccctgttcgatcggaaccagaggcagaggtcgtcgttctgctccacggcgaccttcgtcgtgttcgtcgcgctctgcctcctcggcatgtggatgatatcctcccccgagaacgtcccgtcggccatttccttgtcctcggagaaggtcgtcaagtccgacgtcaaagaggaggacagctccattgacgccaccaataccgtcaagcaggacagtgccaacgtcgtctcagaggcgaccacggacggtggcgctgccacggagagcgccgaggatgtcgacctcccgggcaagcccggtggcggtggagcatcagaaggcgatggcgggaaggcgtcgtccaaggaccagtcgtttgacgacgagaacggcagaaccgagagcggggagctcgtcaaaccaggggccggagagacggacgccgtcgcggggcaggagcaggacaagggcactggcgaggacccggtgctggagaacgacgcgaaggtcgatgccgccggcaaggagcagacgccgatcgacaccaaggatgcctccgggctggatcagagcgtcgagcagacagtcacggacacgaaggcgagcgcatcagagcaggcggcggcgactggcctcgacaaggtgagcagcgccgaggcaggcggtggcacgcccaagaaactgacgttcgatgacgagaacggcaagatggacggagtcgacctcgtgaaggatgacggcaacaagactcgcatctcggaggagagtgccaaggtcgaaggcgccgcgttgacggtgaagccatcggccaaagcggcgacagcgactgccaccgacgctgagaaacaggaggaggcgtcggcggttgctactgacgctgagaaacaggaggaggcgtcggcggtcgccactgacgccagcaccactgcatccaccacgacttccgaggacgagaggaaacaggacggtgtcgagcagcagctgcctgcaacggaggcgcagcctaacgtccaggcagagctactcacagagcgcgcggcacagaacggatcgttcacgacgcaggcggcggagtccaccgaggagaagaagaaccgcgccgagaagaaagggaagaaaggaaagaagaaggcggccggcgtggcggcggtggcatggaaactgtgcaactcgagcgccggcgccgactacatcccgtgcctggacaacgtggcggccatcaagaagctcaagacggacaagcactacgagcaccgggagcggcactgccccgaggtggcaccgacgtgcctggtcccggcgccgccggagtaccgagagccgatccggtggccgcacagccgcgacaagatctggtactacaacgtgccgcacacgaagctggcggagtacaagggccaccagaactgggtgaaggtctcgggcgagtacctgacgttcccgggcggcggcacgcagttcaagcacggcgcgctgcactacatcgagttgatccagaactcgttcccggatgtggcgtgggggaggcaaagccgcgtagtgctggacgtcggctgcggcgtggccagcttcggcgggtacctgttcgaccgcgacacgcttaccatgtccctggcgcccaaggacgagcacgaggcgcaggtgcagttcgcgctggagcgcggcatcccggccatctccgccgtgatgggcacccagcgcctcccgttccccgccaacgtcttcgacgtcgtgcactgcgcgcgctgccgcgtgccgtggcacatcgacggcggcatgctcctcctcgagctcaaccgcctgctccgcccgggcggcttcttcgtctggtcggccacgccggtgtaccagaagctcccggaggacgtggagatctgggacgaaatggtgaagctgaccaaggcgatgtgctgggagttggtggcgaagaccagggacaccgtcgacctggtcggactcgtcatcttccagaagccgatagacaacgtctgctatgataggaggccggagaaggagccggcactgtgcgagccctccgacgatcccaacgctgcatggaacataaagttccgggcgtgtatgcaccgtgttcccgaggaccagtcagtgcgtggcgcccggtggccggtgctctggccggcgaggctgcggaaggcgccatactggctggaccgcagccaggtgggtgtgtacggcaagccggctccggacgacttcgcggcggacctccagcactggaagaaggtggtccggagctcgtacctcgccggcatgggcatcgactggaagaccatccggaacgtcatggacatgagggccgtctacggagggttcgcggcggcactgcgggacatgaaggtgtgggtgatgaacgtggtgaccatcgactcgccggacacgctgccggtgatctacgagcgcgggctgttcgggatctaccatgactggtgcgagtccttcagcacctacccgaggtcctacgacctcctccatgccgaccacctgttctccaagctcaagcccaggtgcaaggtgttgccggtgatcgtggaggtggaccggatcctgaggccgaacggcaagctcatcgtgcgggacgacaaggagacggtggacgagatccagggcgtggtgaggtctttgcagtgggaggtcaggatgaccgtgtccaagaacaagcaggcaatgctgtgtgcgaggaagacgacgtggcggcccacggaaatcgagaccagatgacctaaccgtgtagttgtttcaaaacacgtaagtacagaacagatcgatctacacacttggtgctgcagtattgcaataactaagtgagctagtccttatatgacaaaaaaaagacaaaggaaaacctgagcgatatgtagatgattggaaacattttgtaggtattgtgtgttatattgtttttgggggtcttgcttgtacctggcacttcaaatcgagtacatagatatgtaatttgtgcagttatcgaataaatcgtagcaaatgccctatatatctattaaaaaaatcagaattattcatcggtagcaaaaaaggttaccaagacgtggagggccaatcagtgtcagtgttcataaaagggtttagaatttgatcaacagtcaatatagggcccgtttgagactttttatatgaagagcttttatgagaatctgaattcctagataatctatctgttaggtgaatctggatatcgtggagcttgcgtgcagaggaagacgaaaggggtctgcacacagtttgttgtttaggatacgacatattgctctcatgtggtgactcggcggattttgtactcacgttaatttggttgatttttgtagaagctattctcacacaaatggattaagaaacgaatcgtttgatggctagaatctagccaggagccaaaaaaacagggccataatagcatatattgcaatgtattatgtattcatattcgaccatgatagaattgaagaaaagttgtagatgactggaaacattttgtaggagttgtgttatattgtttttagagggtttcgatggatatatattttctagtggtcttgcttgcacctggcacttaaaatcgagtacgtagatatgtaatttgtgcaa

SEQ ID NO: 217778 - DNA, 3239 bp, Zea Mays
cattaataggcaacgactgctatgcaagcagtccttctgtgcaagcgtgcaagcaaaccatctgatccatcagattacgatccaaccacagatacaaccatgaaagtaacaccctggaataccaaaaggctccaagaagctataaggaatggtgccgatatacatccaggtgcaacacattacagggacaacaatagcatgtataagttacaggcagtccctgccaaacgccgttccattgctaagatgctacctgcatctagaggatcaatttgtcagccagggagagatcctaattgtgagtttgaaagcaaggttgtatatcggcatcttcaagatggtgacattgtacttgtcaataggcagcctactcttcacaagcccagcatgatggctcattttgttcgggtgttacctggagaaaagacgttacgaatgcactacgccaattgcagcacctacaatgctgattttgacggagatgagatgaatgttcatgttccgcaagatgaaatatctcgtgctgaggccatgaatattgttgacgcaaacaagcaatacattggtcctaggagtggggatgctgtcagaggtctcatacaggaccacattgttggtgctgtactattgacaaaaccagacacattgctaagccgtgaagaatatagtcagcttgtctttgggtcttgtgtgccgtcctcaaattgtggctctcatcaccctgctaaggtgtctgctattgaggattacgatacacttgaacttgtccatcctgctatttggaagccaaggcccttatggacaggaaaacaggttataacaaccatcttgaatcatttaacaaaaggttgtcctccatttactgtggagcagaagggaaaaataccaaaagaatatctgaaagaagatccttccgctcaaaaggaaaaagaagatccttccgctcgaaaagaagctcattctgctaaaaaaggaaaacgagaagatccttccgctcaaaaagaaaaagattcttcagttaataaagaaaaacaagagaagatacaaaaacaaaaacaaaaagatcgttctgaactggtcttatatattcacaataatgagctcataaagggcataatagacaaggcccagtttgggaagtatgggatagttcatacagttcatgaactctatggtgcatatacagctgggatactgctctcgacattcagccgcttatttacactgttcttgcagttgcatgggtttacttgtggggtagatgacctgctactattgccagagaaggataaactgagaagtaaaattcttagtggaagcgaagtgcgtagtaatgaagtccactggaaatttactggagctgacgaagatcataaaggtgatctggtaaaattgcatatggaggttgagaaggctgtaagaagtaacggtgaatcggacacggctaccttggacaatgatatgaaaaatgctctaaatgggataacaaccgacgtcaataaaatattatttcctgatggtctacaaaagccctttcctggaaattgtctctctcttatgactacaactggagctaaaggtggtccggttaacatgaatcaaatatcatcattactaggccagcaagagctagaaggaaagcgtgttccacggatggtttctgggaagactttaccgtgctttccgccatgggatatttcttcaagagctggtggctttatcagtgatcgatttttaactggtctgcgtcctcaagagtattactttcactgtatggcaggcagagaggggttggttgacacagcagtcaaaacatcccgtagtggataccttcagcgttgtcttatcaaatgtctggaatcgttgaaagtctcctatgatcacacggttcgggatgctgatggatcaattgtacagttctgctatggagaagatggagttgatgtgctgaaaactagctttctgaacgagttcaaagaacttgctgataacagaaaagctgtccttgccaagctcggtggctgcagtaaggatcccacattatcaaaatgtaatggatacattactgaactgcctcctaaattgattgataaagcggaagagtttcttaagcattcaaaggaatgctgtcgttacaacattgaggcaaaggaattaaaggagttacttaaagtcaagttcctatccagtcttgtagatcctggtgaggctgttggtgtggttgctgctcagtcaataggagaaccttctacgcagatgacgctcaacacttttcatcttgctggaaggggtgacatgaatgtaactcttggtataccccggctgaaagaaatactgatgactgcatcagataatattaggacgcctgttatgaagtgtcctttgctcgaacatatttctgaggatgatgctaaaatggtggttgcaaagcttaggagggttcgtgtggctgatgtagtggagaaaattgaagtctgcacagttcctttttacaactctaatgggcgtgtttcaaccctgtacaagttacagatgaaactctatccacaagaccagcttgagtcaggtcttactatagatgagtgtcaggcaaccttgagaacagtttttgttgaggcaatggaacatgcaattgaaaagcatctagatctgctatacaaaataaatgaaatccgtgctgttaagatagaagatacagagggctcattattaaatggtgatgaagaatctcaaagtagacatgctgatggaggagacactggtactagtgatgatgacgatcaaaatgataatgatgttgacttgggaactgatgcagaaaagatgaaacggcaagagaaagatgagatggagtatgatgatgatactgaaaccgaggagggaatgggtagcgaatctgaggagagcgatgaggatccagctgagtcaggtgatgattcacaagaggctgacaaagaacacacgatctcgaagtctgagacgacttcagtggatgacctgccatattctgtaaaaaaggggaaaaaatcaaaagatgatcgtggaacagctaaactagaagagaaaaatcaaaatgagggaagattagatgaccagaaacagggtcaaataaagaagcgcaggaaaaagttaaaacatactatccatgttgaatccagtgatttggattttgagattcactatgcctttcatgatgaacctcatattttactagctcagcgtccatttcactatcgaaa

SEQ ID NO: 217779 - DNA, 3234 bp, Zea Mays
gcaacgactgctatgcaagcagtccttctgtgcaagcgtgcaagcaaaccatctgatccatcagattacgatccaaccacagatacaaccatgaaagtaacaccctggaataccaaaaggctccaagaagctataaggaatggtgccgatatacatccaggtgcaacacattacagggacaacaatagcatgtataagttacaggcagtccctgccaaacgccgttccattgctaagatgctacctgcatctagaggatcaatttgtcagccagggagagatcctaattgtgagtttgaaagcaaggttgtatatcggcatcttcaagatggtgacattgtacttgtcaataggcagcctactcttcacaagcccagcatgatggctcattttgttcgggtgttacctggagaaaagacgttacgaatgcactacgccaattgcagcacctacaatgctgattttgacggagatgagatgaatgttcatgttccgcaagatgaaatatctcgtgctgaggccatgaatattgttgacgcaaacaagcaatacattggtcctaggagtggggatgctgtcagaggtctcatacaggaccacattgttggtgctgtactattgacaaaaccagacacattgctaagccgtgaagaatatagtcagcttgtctttgggtcttgtgtgccgtcctcaaattgtggctctcatcaccctgctaaggtgtctgctattgaggattacgatacacttgaacttgtccatcctgctatttggaagccaaggcccttatggacaggaaaacaggttataacaaccatcttgaatcatttaacaaaaggttgtcctccatttactgtggagcagaagggaaaaataccaaaagaatatctgaaagaagatccttccgctcaaaaggaaaaagaagatccttccgctcgaaaagaagctcattctgctaaaaaaggaaaacgagaagatccttccgctcaaaaagaaaaagattcttcagttaataaagaaaaacaagagaagatacaaaaacaaaaacaaaaagatcgttctgaactggtcttatatattcacaataatgagctcataaagggcataatagacaaggcccagtttgggaagtatgggatagttcatacagttcatgaactctatggtgcatatacagctgggatactgctctcgacattcagccgcttatttacactgttcttgcagttgcatgggtttacttgtggggtagatgacctgctactattgccagagaaggataaactgagaagtaaaattcttagtggaagcgaagtgcgtagtaatgaagtccactggaaatttactggagctgacgaagatcataaaggtgatctggtaaaattgcatatggaggttgagaaggctgtaagaagtaacggtgaatcggacacggctaccttggacaatgatatgaaaaatgctctaaatgggataacaaccgacgtcaataaaatattatttcctgatggtctacaaaagccctttcctggaaattgtctctctcttatgactacaactggagctaaaggtggtccggttaacatgaatcaaatatcatcattactaggccagcaagagctagaaggaaagcgtgttccacggatggtttctgggaagactttaccgtgctttccgccatgggatatttcttcaagagctggtggctttatcagtgatcgatttttaactggtctgcgtcctcaagagtattactttcactgtatggcaggcagagaggggttggttgacacagcagtcaaaacatcccgtagtggataccttcagcgttgtcttatcaaatgtctggaatcgttgaaagtctcctatgatcacacggttcgggatgctgatggatcaattgtacagttctgctatggagaagatggagttgatgtgctgaaaactagctttctgaacgagttcaaagaacttgctgataacagaaaagctgtccttgccaagctcggtggctgcagtaaggatcccacattatcaaaatgtaatggatacattactgaactgcctcctaaattgattgataaagcggaagagtttcttaagcattcaaaggaatgctgtcgttacaacattgaggcaaaggaattaaaggagttacttaaagtcaagttcctatccagtcttgtagatcctggtgaggctgttggtgtggttgctgctcagtcaataggagaaccttctacgcagatgacgctcaacacttttcatcttgctggaaggggtgacatgaatgtaactcttggtataccccggctgaaagaaatactgatgactgcatcagataatattaggacgcctgttatgaagtgtcctttgctcgaacatatttctgaggatgatgctaaaatggtggttgcaaagcttaggagggttcgtgtggctgatgtagtggagaaaattgaagtctgcacagttcctttttacaactctaatgggcgtgtttcaaccctgtacaagttacagatgaaactctatccacaagaccagcttgagtcaggtcttactatagatgagtgtcaggcaaccttgagaacagtttttgttgaggcaatggaacatgcaattgaaaagcatctagatctgctatacaaaataaatgaaatccgtgctgttaagatagaagatacagagggctcattattaaatggtgatgaagaatctcaaagtagacatgctgatggaggagacactggtactagtgatgatgacgatcaaaatgataatgatgttgacttgggaactgatgcagaaaagatgaaacggcaagagaaagatgagatggagtatgatgatgatactgaaaccgaggagggaatgggtagcgaatctgaggagagcgatgaggatccagctgagtcaggtgatgattcacaagaggctgacaaagaacacacgatctcgaagtctgagacgacttcagtggatgacctgccatattctgtaaaaaaggggaaaaaatcaaaagatgatcgtggaacagctaaactagaagagaaaaatcaaaatgagggaagattagatgaccagaaacagggtcaaataaagaagcgcaggaaaaagttaaaacatactatccatgttgaatccagtgatttggattttgagattcactatgcctttcatgatgaacctcatattttactagctcaggattgactacatataacttgacag

SEQ ID NO: 217780 - DNA, 5169 bp, Zea Mays
gccacacgcacggctccatccttctgtccacgctcgcgccgccagggcgctcgagctcgccgtcgtcatctcgtcgggccgccgcctcgcagcttcgcccgcggctctggtccgcgccccgccaaggcccagccccaagctgccagcggcctccggcgttgctcgccgctcactgcgcgccgtctcgcgctctcgcgccctcgcccagtcctgctctcccttcgtcgctccgcggctccgccggcgtctgggcatccggccttcgggctttggtggcgccccccaccggccaccggcccaccccagcgggcagcggccactgcaactctgcggctctgccaggaacaaggaggaacagtggcgattctgccagggacagggaggagcagtggcagacaacgtccttccttttgtttggcccggggcttcggaattatctggagccgctactgcccccagcgttcggactcccgggtcgcaggcagccacgtctcgtcctggctctgggctcgccgcgctatcgtctcggccattcgctccgacgtccgtattcaatagatttgccctactcgtgaccacgagaatccggcgaggagggagaccgctcgtgcggagtctataatggctgacgggcagcatattcaggcagcatcagaggaagtggattcaatccacttcagcttctatagtgatgatgaaattaagaggatcagcattaaaaagatcaccaagtcggagcgccttgatgccaaaaaccttcctgtgccaggtggattactggaccctgcaatgggacctatcaatgatattgatatctgcaagagttgtggtcagcattctgttcgttgccctggtcacttcggtcatattgagttggcaaaaccattgttcaatcctttgctgtttatgagtctgaaaaaccttctccatgtcacgtgtttccattgtcacaagttccgcctgaacaaggaacaggttgacagatatgtgaatgaacttgaacttttagtaaagggtgatattgtctgtgctaaaaatttggaagactcagtagaagaagcatatctttccaaggaagatgaaaacatgaacaagaccacttcaggtgataactcatcttctgtgaaagacaagaaaacctggacatctatccaattgaaagaggttttgtctattttttccaagataatgaaaaagagacagaagaagtgtgcaaaatgtgacatgaagagcccaacaatctcaagtcctatatttggttggctggtcaaggacacaaaggcttctgctgtaagaacaaatgcaattgctgattttaaactcaagggagatggtgatattcacaactcaggggaaacaggggtttctggtcttgaggaagagtcatcttcacctggaatggtgtctaaagactcaatcaatgaagttagaggtctttctgatgatacaattaaagaattggtagcatcatcaggaaaaaaacatctattgcctacagaggttgaatctattctcaaggacttgtggaaaaatgaagctaggttctgcatgttactttgtgatttccagaagaatatgtcaagtgaaccagaaaagagaaggggctatgaaatgttcttcttgagtagtctccttgtggcaccaaatagattccgcccatcaactagctctagtcttggaattatggaacatcctcaaagtgttctgctaagtaaagtgcaagaatccaatcttgcgctacaacataacaatgcatcttctaaccatatggatgttcttcaaagatggatggatctacaacggagtgtaaatgtgctatatgatagtagcaaaggccttgcaagaagcgagaagaatgctcatggtatacgccagctattggaaaagaaagaaggaattcttcgacaaaagatgatggggaagagggttaattatgcatgccgatctgttatatctccagatccgtacttggctgttaatgaaattggcattcctcctgtttttgcgacacgattgacatatcctgagaaagtaacaccctggaataccaaaaggctccaagaagctataaggaatggtgccgatatacatccaggtgcaacacattacagggacaacaatagcatgtataagttacaggcagtccctgccaaacgccgttccattgctaagatgctacctgcatctagaggatcaatttgtcagccagggagagatcctaattgtgagtttgaaagcaaggttgtatatcggcatcttcaagatggtgacattgtacttgtcaataggcagcctactcttcacaagcccagcatgatggctcattttgttcgggtgttacctggagaaaagacgttacgaatgcactacgccaattgcagcacctacaatgctgattttgacggagatgagatgaatgttcatgttccgcaagatgaaatatctcgtgctgaggccatgaatattgttgacgcaaacaagcaatacattggtcctaggagtggggatgctgtcagaggtctcatacaggaccacattgttggtgctgtactattgacaaaaccagacacattgctaagccgtgaagaatatagtcagcttgtctttgggtcttgtgtgccgtcctcaaattgtggctctcatcaccctgctaaggtgtctgctattgaggattacgatacacttgaacttgtccatcctgctatttggaagccaaggcccttatggacaggaaaacaggttataacaaccatcttgaatcatttaacaaaaggttgtcctccatttactgtggagcagaagggaaaaataccaaaagaatatctgaaagaagatccttccgctcaaaaggaaaaagaagatccttccgctcgaaaagaagctcattctgctaaaaaaggaaaacgagaagatccttccgctcaaaaagaaaaagattcttcagttaataaagaaaaacaagagaagatacaaaaacaaaaacaaaaagatcgttctgaactggtcttatatattcacaataatgagctcataaagggcataatagacaaggcccagtttgggaagtatgggatagttcatacagttcatgaactctatggtgcatatacagctgggatactgctctcgacattcagccgcttatttacactgttcttgcagttgcatgggtttacttgtggggtagatgacctgctactattgccagagaaggataaactgagaagtaaaattcttagtggaagcgaagtgcgtagtaatgaagtccactggaaatttactggagctgacgaagatcataaaggtgatctggtaaaattgcatatggaggttgagaaggctgtaagaagtaacggtgaatcggacacggctaccttggacaatgatatgaaaaatgctctaaatgggataacaaccgacgtcaataaaatattatttcctgatggtctacaaaagccctttcctggaaattgtctctctcttatgactacaactggagctaaaggtggtccggttaacatgaatcaaatatcatcattactaggccagcaagagctagaaggaaagcgtgttccacggatggtttctgggaagactttaccgtgctttccgccatgggatatttcttcaagagctggtggctttatcagtgatcgatttttaactggtctgcgtcctcaagagtattactttcactgtatggcaggcagagaggggttggttgacacagcagtcaaaacatcccgtagtggataccttcagcgttgtcttatcaaatgtctggaatcgttgaaagtctcctatgatcacacggttcgggatgctgatggatcaattgtacagttctgctatggagaagatggagttgatgtgctgaaaactagctttctgaacgagttcaaagaacttgctgataacagaaaagctgtccttgccaagctcggtggctgcagtaaggatcccacattatcaaaatgtaatggatacattactgaactgcctcctaaattgattgataaagcggaagagtttcttaagcattcaaaggaatgctgtcgttacaacattgaggcaaaggaattaaaggagttacttaaagtcaagttcctatccagtcttgtagatcctggtgaggctgttggtgtggttgctgctcagtcaataggagaaccttctacgcagatgacgctcaacacttttcatcttgctggaaggggtgacatgaatgtaactcttggtataccccggctgaaagaaatactgatgactgcatcagataatattaggacgcctgttatgaagtgtcctttgctcgaacatatttctgaggatgatgctaaaatggtggttgcaaagcttaggagggttcgtgtggctgatgtagtggagaaaattgaagtctgcacagttcctttttacaactctaatgggcgtgtttcaaccctgtacaagttacagatgaaactctatccacaagaccagcttgagtcaggtcttactatagatgagtgtcaggcaaccttgagaacagtttttgttgaggcaatggaacatgcaattgaaaagcatctagatctgctatacaaaataaatgaaatccgtgctgttaagatagaagatacagagggctcattattaaatggtgatgaagaatctcaaagtagacatgctgatggaggagacactggtactagtgatgatgacgatcaaaatgataatgatgttgacttgggaactgatgcagaaaagatgaaacggcaagagaaagatgagatggagtatgatgatgatactgaaaccgaggagggaatgggtagcgaatctgaggagagcgatgaggatccagctgagtcaggtgatgattcacaagaggctgacaaagaacacacgatctcgaagtctgagacgacttcagtggatgacctgccatattctgtaaaaaaggggaaaaaatcaaaagatgatcgtggaacagctaaactagaagagaaaaatcaaaatgagggaagattagatgaccagaaacagggtcaaataaagaagcgcaggaaaaagttaaaacatactatccatgttgaatccagtgatttggattttgagattcactatgcctttcatgatgaacctcatattttactagctcaggattgactacatataacttgacag

SEQ ID NO: 217781 - DNA, 5892 bp, Zea Mays
aactcgacaccaatcccccaatcacaaaccctaggccgacaggcgcaacgacgcgacggtgcaacaagcggacaacggcgaccgcgcggccaccgcttagtgtgcgaactctgcagcgcgccagcggaagcagaggaggcgtgcagcatctggcgtcccggcctcccggggtcgagttcgagcgccgcgcgcacacgtccgccagatggtgtgtagtagcggtggttgggaatatctaatcacccaaatcctggtctgacactgttccactgatagaatcagtatgtccgacgctgagccacctcctgcaatggaggaggccacgctgacaacgccggatgttgtgctaggcgagggatacaaagatatcgagggtcagaaggatggccgaacttgttatggtgaaggtggcgatgttatagtggctgatgagttcgcgggtattgttgaagaccccaaccaacccgatgtttttaaggctaaagagccagaggagggtgttgatgtaggggggcaaactaatgtcattagtgctgctgtgcatgttctcacagaggtggatgctgctgtgtcatcctccacactggtggatgatcccatggaggttggcatgcaaaccaaagaggttagtgctgctgcggatgatctcatagaggtgggtgctgccctggtaccatctgcacaggatcacacagcagtggctgcttgcctggttaatgatgactgcaatatagttatcactggtggtgtgcataggtcggatgaccaaactgttcaggagtttgggggtgactcccttgacgctgatgaggttgctcccttggtaaatgatgtacaagatgacagtgcaaggattgatatggatgttgcagctaatgatcatgtgcatgctcaggatcaggaaagctcacagttggatgtggctacagctctgttaaatgaggtggaaacagagattgccgaagctggagaccatgttgtacaggactgcacaaatatggatatgcagatccaaactggagatgacaaacatgttggcactattgcggacactgccacagatgaggagggcaagcacatgggtgaagataccatgggcagagatggtagtgagaaacatgatggggcagtcggtgttgatgtgtctgatgagagggtagaaatgggtaggggtggactgtctggagatgataacgagcaaaaggaagttgcaacagctgatgaagatcgtgtggaagaggaagacatgcaggtggatgccgtaagcattactggagacatggttgaggaaggcagaattgctgttgaatacattgcaggcgaagctgtaaatggcaaggatggtattgatgtccctgaagaaaagactcctcagatagacaaggctggtaatgatatccctgaagaagagggtctccaaatggggggagctggcttgattggcaataaaaatgggccgaaagaggctgtgatagctgattaccatggagtggaagaaaataccatactgatggaggcagctaccacgactaacaatgatgatgatgatgacaacaaaattgttggtgaagatgttgcagaagctgtcaatgacataactggtgatggtgtccctgaacaagaggctgcacatatggatgacgatgatgacgatgagccacctcctttagtggcaaagaaaggtggagggcgtcgtaagaggggccgtccatcttccaaggtccaggctgtggtgaaaccatctgtaaaggggaaagatgaagaggaggtttgcttcatttgctttgatggtggtgatcttgtgatttgtgatcgtaggggctgccctaaagcttaccatccttcttgtgttaatcgggatgacgacttcttcaagtcaaagggtcggtggaactgtgggtggcacatttgtagcaactgtcagaaacctgcccgccatatgtgctacacctgcaccttttcattatgcaaggcatgcatgaaagatgcaaagtttagctgtgtcagagaaaacaagggcttttgtgctacgtgcatgaacactgtgatgttgatagagaacagagaggaggctgcagacccaatggaggtggattttgatgacaaaagcagctggtggtatttgttcaaggactattggttaaatttgaagacaaacttgtcattgacagttgaggaaatatcagcagccaagtctcaaaagagtggagaattacctgatactaatgacgaaattaattcagagagttcatcagggcgtcatctagaaaacaatacatcgaaaaagaggggcaggaaccgatctaaacaagctgccatcgagcagggctctgaaggaaaagagaccactgggaaatctgccaaactaggtctgtcaggcattcgtgatgctcagacttcttcagggaaaaaggttagaaaattatccaggcgttctttgagcagccagcattcaccaaaagattctgaaagtgttgggacatcaacatcctcagctgacgaggtcagctgggcttctaaggagctcataaactttgtagctcatgcgagaaatggtgataaatctgtgatcaatcagtatgacgtccaaccccttttacttgactatatcaaacgcaacaatctgcgcgatcctcgtcggaaaagccagataatttgtgattctttgctccaaagtctcttcgggaaagaccgtgttgggcattttgagatgcttaagcttcttgaatcacattttcccacgagtgaggtttcaccaattgatgctgatgaaaatcatggtggtgtagtagaccctgatcctagtcaggatgctgatggtaacagtgaagcttcagttgttatgagttcagaaaaaagaagaaaatcacaattgattgatgacgttgacacttttgatgagaaagttgttggatcgtttgtgagaataagaattcctggtacagggcaaagacaggacatttatagacttgtacaaattgttggcactggaagatctgcagaaaaatataaatctgggaaaaggactactgatataacgctagtgatactaaacttagacaagcgggaggcagtaactattgacataatctcaaaccaggagttcactgaagaggagtgcaaacgcttgcgtcagagcataaagtatggattcattccaaggctgacagtgggagaggttcaggagaaggcaaaggttctccaaactctgaaagtcaatgattggattgaaagcgaaaagatgcgacttgggcatcttcgtgaccgtgcaagtgatatgggacgtagaaaagagcttagggaatgtgtagagaagctgaaattgctaagcactcctgaggagcgtgctcgtaggctcaatgaagaacctgaaatacatgctgaccctgcaatggatccatattatgaatctccggaagaacaggagcaggagattgaaagaagtagcttcaataagtccagaagttctttcttgaggaaagatggtagtcttgtgtctccaggtaaaggagatggtagaaatgctgcacagcgagatccaaaaactaactgggaatctaatcgaaacacaagggctgaatcgagttctcatatggaatcacccctttcacggaggtccacatattcttctcaaggagaaagtgttggttatacaaataagccagagggcttgaacattgatgcacaaaccgttagactggaaggcaccacgcgcagtgctccacaagggtcacctggtgcctcatctggaagtctagctactaacataggttcaggggcaaaaactgcatctcaatcagccattaacgagtctgagaagatctggctgtacatggatccttctaataaaatccaaggtcctttctcaatcatacagctgcggaaatggaacagcaatgggtacttccctcctagtttgaaaatatggaaagctagtgagaagcaggatgattccattctattgactgatgctttggcagggaagtttgagaaagaccttcctccatgggaaccaccacatgttagtttgtctcaaattaacaaaacccctcttgagcaaagcacaatagctgatgaacaaactccaaaatcagtaattgcaaagtctttctcaagcagtgatcaaagacatgattatagttcaacgaaccttggaacaaccatgatccattctggctcacaaggttattatggaatgcaaaattcccatgcagcatacacaagccagcaatctcttactgggagttggaatgccacgtcaagtcagtttggggttgcaataagtcctttgacacctacccagcctgccatgcaaagcctttcaggacaaaatattgtggctgcagaaaatatgggtcatttaactactggaatggctcctgcaactgcaaatgcagaaatggttaattcagatttgacttcccagaaccaaatgttgtcttctttaccgcaaacggatgacagattagctgatggaattgaatccaaatcaggagaagatgtttcacatggaagagtgaggtcttcggctgaagctatcggaccacaggatgcacagcttggaccagtgcaactaaacgctcagcaacttgaaaacacaagaaaccatatgtcatcaattgatctctccaagtcaatgatgccatcacagatgatgtcagcaccatctgctgcatcagtacagccttcattgacaaccactgctcgcagtgataatcaaagcagtgggtgggctgtacctgcacaaatggcgaacacacctggccagtctcagataactggaaatctaacctggggaaatacacctcagggtgacgcaagcttaggttggggaatggtgggacagagcaatatgaatatgccttgggtagcatcagctcaaggtgcttcaggctacaacatgggtgtagccatgccgacgcagccaaatgcagttccaaacatgggctggttaccaaatccaggaaacaccagcatgaacatgatctgggctgcaactcaaggccaggggactccaaatgcggctcctatgatgggaggtcagatgcaaggagtcccaatggccccttggggtggtgttgcagcaggaagtgcaaattcttatcctgcctggggaaaccaacaagctggaaacatgaaccaaaatgttggctggagtgctcctgtgcagggaaatccaggtcaggcaaataacaacatgaactggaacgcaccaaatggtaatcctaattggaataatcaacagagagagaatgggggcaggcactctggacaccgcggtgcttttagtggtggtgactcaggcggaaggtcatggaagtcacgctctggtggcgatggggggtcaaggggacatagcagattctcccattcaacaaacacagagggatatccatccaggactgatcggcattacgataggcagaattcaggcaacgagaggcgatatgagaatcacaatgagagaaatggtcgacagtttgataggcagccttcggataatgaaaggaaccatgataggcctgatggcagacatggtggcagggatgacgataggcaggctgataggtccgagtcaagagagctgcgttagaactggtttctgtttcttacattcgtttccttgtatgtgcagtagcaaactagcatagtagcttccgtgcatgttttgaactttatgctctgtagcgatctgcatacatgtgcagatcaccgtgtataacatttgtagtttaatgctgtgtgcatcctagttccgaatttgtaatttacttgaataaatcgtcttgtctgatttctgatgtaaagcaggggctacacgcccaggttcttggactagggttgttggagcatcaatggaagacaagggagagccagtggtggttggagtag

SEQ ID NO: 217782 - DNA, 4455 bp, Zea Mays
attttttgtcctttttgtgcctttgatgcttctcatctaggaattgttagacatatgttaggctcacacggttgggcccttttgtctgacggcttaggccttttgcctcttgtatatttgctaagatgattagagataggcaatgatatcctcgattgatcctatttctataaaccagcccataggaatacttgcctatatatacgtgtaccctgcacctcctctaatcaatgtgaccattcaagagccatatcttatcttaaaattgtgttagttatgtaaggcttgccttgttttttggtcgtgtatgtaaggttatcgttgggcatggtggttgcacttggctattttggcctttctcataatgcaatggatcggaagtacgtgacagcaaaaagtcgagttctacaccctgagttccgtggtcgaatggtctcggcattccttttgcaccatttctctgaggtttctgattacaactttacagctaacatggagacagaggtttttaaatatttctcagcctatgttttctgtgcgcttctttgttttcagtttatgccatagttttagaaacctgtttaagctgcctggttagtggtcactgctatgggttaaaccaatatgaggattcaggaaatcagcatctcaatggacattggtacacttctaattttgctcatgattattcttggatttaagacattaggaacattgctgtctgtagttgtggagctaattcaagattgttgtcatggacttaatgctttggtctattatccaggcataggccaattttgccttaactattctctatatgcaagtaatttgtccctagtgattctgggtgcgtggatcatctggaagcatataaatagatgtgtctttgagggctttgctcccaaccttgcggttgctcagcaggcagctagggaggggataaatctttgggctatagctggcgccaaagcctttcactgtcatagggtaggtttggctcgtgtggtctctttgacctttatttatttcttcttcttagtatattgaggcgcagttctcctgcgttttcgagaaaaaaatggtctagttggttttctatggaagtgttcttgtacgctttggacttggttcctggtcctctttggaccttctttactctttttaatatattaatacgcagctctcctgcgtattcaataaaaaacttgtaggcgtttttaggttctctttctttgttgcccttgctgaataacgtgactcataagttaatgaaccatcactcccacttcccaccttactatataattgagggaacaagttcatttaacctactttcttaatctttgtgcaccactctagaacaacctacatttgggaaaaatggtagtgatccttttacaagaacatctttcagtaataggctagcacaaaaaatagttggttatactaacactgtgttgaagtttcttttcttttacataatagctagataatgtctctgctgggtcaactgaatggaagggtcttctgaaagactactgggaacgattcagcaaatattgtgcagatgtgagtaaactggatggcagaaaggtagagagaatgcttgaagaaaaatttggtcctatcctcttttccgatgtttacaaggattgtagaatttgccctagttgttctgaaggaaccttgagattcaaagttagtaggtacggtgaaggctattttgtaggttgtgatcgacatccaaaatgcaagtacattgctcgctcactgtcacagcaagaagatgaaactgaacccatagaagaaaatgcaaaatcttttgaacccaggttacttggtgtcatgcctgattctgatcaaaaggtgtttttgaaacaagggccatatggctactatgttcaagttggagaggacaaaaaaggtctgtttccaaaaagggtttccctttccaaggtcaaagatatagactctgttactctagaagatgcaattgagcttttgcaatatcccaaaatcctgggaaaacatcctgaagatgataatcttgtacttataacacattctaaggttggatacaacatcaagcacaggagatttattgctcaagtgccaaagaacatggacccaaagaagatgacacttgagcgtgcactcaagcttctgagtagtaaaagtgtcagacggattggtcgtctaaaggggaaggtcgaaaagaaggaacccattgaatggcattagctgagcctgcctgcactcgtgtgtgcaaaaaaaaaaaaaaaattcagagagaagtcaacattcatagcatgcagaggttcagcctttcgtgtgtttaactgcttatgatgagagcggagaagggggccccatgtgtgacaaagaacaagtgccaagggaatgcacaaccagacatattcgggtcatatctttgatttcatatttttcctttagtcatcaacatcataagctgcattgaacgcgcggacacagaataccagactataaaattctgagcttaacaaagatgagagggtggtttcatcacctattttacataatcgctgcatttcctaattactttcacattttgtactagagataaatgcatcttttaccacaggaaacccattttagttgtgaccgtcgtgtaggttatgtactcatgtgtaagaattgtatatgctacttcacagctgaaattccatctgttttgcactccttttttttaatttgttttcaccggttgatcccgaataacggctagtcttagtaatgctgtcgcgggaatttttttttttacttttgaatacctttacgaacatcgtaagtttttcaccattcaaccgattggatccacttttaaatgtctttagttcagtagcactacttagttttgtctatgaaaaaatgtctcaccaataagtactggagagatgtaaaagtaaaactgagctgtggtataggtactagaagacgtccacgttctttcactcatgcatagcatagcctgttggtcaaagtaaatatcagacagagtaaaatacatccagacagcaaacttcaatttcagacattcctgttctagctcctggttcgttgacacactaaagcacacgttcacctctccattctcggtcacgcagagacctcagcgccaccacacgctcgccatccacctactcatacctgtagatgaagtcggagttgccgaccatggcattgagcacctgcgagacgaggaagccgctgccggcgatgacggccacgatgagcagcgccgtgacggggttcttgagcagctccactatgggctgcagcaccgtgtacgccacccctgtgctcaccgtcacaacgtacagcgcgtaccgccgcatgttgtcccagaactcctccaccagggggccctctggccccagcgccagggcggggcctggccccgcggacagggccagcgccacggtcacgcccaccgtgatgccgccgaggagcgcccacgtcggcagagcgcacgtcctgccgccgccgccggcctcgttattattgcccgctgcagcgagctcttgacgcaagtggctctcctcctccctagctgctgcgatgctttcgtgaggcgctatggcaaggaggcgttttgcgtgctgctgcggggttggtggttcacaggaggagagcccagctcggacgacggcggtgaggccatggccgcgtccgggagacagccgatgtaggtggtggaggagagagagctggttcatcttgtgcaggcgccgtcgcttggtggttgttttttgtgataaggcttctccaaccatccatctctccctatacgtactttatactctttttattaccttcctccccccaccccccaaactttcacttctccaaccgttcaacctagcaatttcatatcgccattaaccgggaccacgccgctggacacgcgaggatcatggcggactacttcagcgataacccggtctacagtgattggcagttccgacgaaggtttaaacccttgctttttttccgtttccatttctcattttgcaatggggattttacaaagttctaaagcttttttacttaggtatgaggcgaccattattcattcgcctcatggaaagcgtgaccgaaagggacccatggttctcaagtcgtcccgatgcggcgatgccaccgggaagatggaactagctccattccagaaatgcattgccgcattttggcatacgaagttcatgctgatgcggtcgacggatatgtgcacatatccgagtccactgccttttagacaaaaggcttctgtcttacacaaaacagatgcaaaggattggaacttcggattttgaagtataatactcacctgatttggtacaaaagcagggtcctagtaaaactcaaactttatccatcgattcaaattggatgtatcgtggttttagaaacgag

SEQ ID NO: 217783 - DNA, 1189 bp, Zea Mays
ctaaatcatcatttggagagtcgtttacataatagtcactttctatatctttttaatctctaacagcatttctatatcttgtttgcgctctagaaagctattcatgttttctatctttagctagcaagaaatccagaatagaataagacactctagagagccatatttatccaaacagatccttaattcctaaaattagggttggccggttgggattaatatggcctcttgctgcaaggagtggatgacaacgcttgttgcttgtcattctgcatagctgattgttagttgtttatcttcctcacagtcgactatgataaagagggaggtggtccagtcaagatgaagatcgagtaggcaaacatagaagggtttgtgtcaccgcaaaagtggggctacttccagttcgttgcgccctgcacgttcttcggcacgccgtttccacaggagggccataagaaggcgcctcgggtcatgctggtgttcttctgcatcccggtcggtccatggcaaacgaggagtatcaggagaggagagaagaatcctctgaggatatgaagaaaacgagaaagaacttcatgcatgctctgaagtgcctcgtagttgagtcagaacaaggcgcggatgggtgcgacagagctgtgggatctcttggcctccgactcagagcaattcgtggagatgtgcagggtgtatcaacacctcaagctgaagaactgttcgtggaggttgtggctctagaagggaaagcattcgacaccaggtgtgccctcatgaaggtctggtctgaactattatgtgcgctttgggactcttcaagtgtggccaagacgttacttcttcttaccatcagcaccaagagctatgagctaggatacttggattgtttggagcaaatgattgttcatgagaggacgatcacgagatggataccatagccatgtcgtgagcaacaagacaaaccatgcagagaagaaaccaacaaggacgagcaaagacaacaatcctgcagagaagtattaagcaacgaataacagagcatacaagtgtgggggtggtgtagtgtttagctattgggatgtagtgcagatctttacaattatttctagcttacttatctacaagctgaaattaactaaagagctccctatttctatatactcatgttgatgaacgtgaataatgcaat

SEQ ID NO: 217784 - DNA, 3273 bp, Zea Mays
tgacctcacggccccaccctacctccgtctccccttcccagcgcgggcgctcggcctgccgctcttgtcgtcttcggcccttccgttcgccgtctgcccgtcgccgtccccaaactatcgccctttcgctgtcgccttccattttccaatcgtcaacaaccacctcgctcccgcttagttaaactcgtcgccatgccgtccgtggaggtccactggccactccaaccttccccttcctcccctactatccgctctccggtccccacccacgaccgccgtgatgcggccgcggccctcccgcttcctccagctactccttgtcgttgtgatcgcctgcgccgttccgggggtgagatgctccgaccggcggtttccgcacctcgaccgcgtccgcgagctccaacgccgggagggctcgtcatcggccgagcaggaggccgctgcgaggggacttctggcgcgcctcctaccgtcacactctaccagctttgagttcagagtcatctccacctccacggagctatgtggtgggaagacatgtttcgtcatcaacaaccacccgttgtttgatggagaagggactccagaaatattgatacttggagcaagtggggtggaaatttctgctggctttcattggtacttgaaacactattgtgcagcacatatatcttgggataaaaccggtggtgcacaactatcaaccattccgcgtcctgggtcactacctcgtgttcctgatggtggtgtactgattcaaagacccattgactggagctactaccagaatgcagttacatccagctattcttttgcttggtgggattgggaccgttgggagaaggaaattgactggatggctcttcaaggaataaatttgcctcttgctttcactgggcaagagtctatatggcagaggatttttgagaggtacaacattagcaaatcagatctggatgatttctttggtgggccagcctttcttgcatggtctcgaatggctaatatgcatggatggggtggacctctccctcagacttggcttgatgaccaactagttcttcaaaagaaaatcctttctaggatgtactcttttggcatgttcccagttcttccagccttctctggcaacatcccagctgcgttaaagtcaaagttcccttcagctaaagtcactcaccttggaaactggtttacagttgacagcaatccaaggtggtgctgcacatatcttcttgatgcatctgatcctttatttgtagaaattgggaagatgtttatagaagagcaaatcagagaatatggtaggacaagtcacatctacaactgcgatacttttgatgagaacactcctccattaagtgacccgaattatatatcttcgttgggtgctgcaacgttcaggggtatgcagagcggtgacaacgatgctatttggttgatgcaaggttggctgtttacctatgatcctttctgggaacctccacaaatgaaggcactactgcattctgttcctgttggcaaaatgattgttcttgatctttacgccgaagttaaaccagtgtggataaattctgatcagttatatggtgttccctacatctggtgcatgctccacaatttcgctgcagattttgaaatgtatggtgttttagatgctttggcttctgggcctattgatgctcgattaagtgataactccacaatggttggagttggtatgtctatggaaggtattgagcaaaatcctattgtttatgaccttatgtcagaaatggccttccatcacagacaagttgatcttcaggtttgggtcaagacatatccaacaagaagatatggaaaaccagtgaagggactgcaagatgcttggtggattttgtatcgaactttatataactgcacagatggtaaaaatgacaaaaatcgggacgtgatagtagccttcccagatgtcgaaccttttgttattgcgacaccagggttgcatgtgaatactagacaaatgtattctacagtaccatcgaagaattacatacggaaggacgtctctagtgatgcatatgaacatcctcatctatggtatgatactaatgctgttattcatgccctggaactttttcttcaacatggagatgaagtatctgacagcaacaccttcaggtatgatcttgtggatttgactcgtcaagttctggctaaatatgctaatgacgtttttctaaagatcatcgagagctataaatcaaacaacatgaatcaagtcaccatcctctgccagcactttctcagcctcgtaaatgaccttgacacattactatcctctcatgagggttttctgcttggcccttggttggaaagtgccaagggccttgcacgaaacagtgagcaagaaatacagtatgaatggaatgctagaacacaaattacaatgtggtttgacaacactgagacaaaagcaagtttattgcgcgactatgcaaacaagtactggagcggcctgctgcaagattactatgggccaagggccgccatctacttcaagcacttgttattaagcatggagaacaatgcacctttcgccctcaaagaatggaggagggaatggatcagtctcaccaacaactggcagagcgataggaaggtgttttcaaccacggctacaggagaccctctgaacatatcgcagtcgctttacacgaagtacttgagcaacgctgatctacttgggctagtagaagtggggtggggctccttccagctgggctactccggcaatgcggatctggagcctgggcggtgccgccggacggacggcaagaagtggcggtgctccagggacgcggtcgccgaccagaagtactgcgagcgacacatgaaccggggacgccatcgttcaagaaagcatgtggaaggccagcctggccatgctgcgaaagccatgtccgcggtggccgtggcggctgctgttgctgctctggccggcgccgaagctaccgctgctgctggccttgctgtcaaccagcaccggcagccggggaagagctatgccacggttattgggaaaagtggggctaatgttaggcgggtagagcagcagactggtgctcgcattaaagttcaagagattgacaaagatgcttctggagaaaggctgatcattgtttcatctaacgagataccaactgaaccaatatccccaacaattgaggcactcattttgctccatgataaagtgggcaggtgattactgaaatgagaagacgaactggg

SEQ ID NO: 217785 - DNA, 1320 bp, Zea Mays
aggctgtcaggcatcaccgcgtcagctactcaggtcaggctagggcgttgggctgccatcctgctggtttaactccacgccgcctgcacctgccaggcaggggcgctaggttgccatccctccaggaaccgatcagccgagtagttgctgcctcgctggtcaggttgctgtctggctatttacttttattgatggaatcggctgtggaaggaaaggggaggactgcaagtgatggaactgattcagaaagtaattcgtttgacaagagggatgatatgtctgaagatgaactggtagtgcttggtggaaaaattgatgattcagtggacaatgtcaatattgatgaatctgaggacaacagaagtaaacaaggggtcaagagaaggcgcaaaagggtgaagatgaaggctacagctgaaactgaaaggagcaaaaaggcaaaatctaaagtttgggatgcctttactaaggtgactgtgccggatacgacagagaaggggaagatgatatcaaaggcaaaatgtaactattgtaagaagctatattcttacatacaaggatcaacaacatctcatttgtcaaggcacatgagaatttgtgccgtgtatttgaagcatgtggcaaagcagcagaatcaatctcttctaaattttgctccatcaacagcaggtgaatctggatctggccttcctactatcacttctccaaaagattataaccatgagaaagtaaaaaaactaattgctaagatgataatagttcatgagtatccatttaggatggttgagcatacttggtttaacattgtcatgaggtatttgaatccttcatatgagtttattggtaggaagactataagagctgaatgtttaaagatctatgagtctgaaaaagaatcactagcaaaagtccttaaaggtgttgagtatatttccctaaccactgatttgtggacatccaatcaaacattatcctatatgtgtttggttgcacactacatagatagtgattggaagatgcaatgtcgtgtcctgaatttttttgaattggaccccccacacaaagggcctgttataggacaagcagtatatgaatgtgttgctggctggaaaatagaagataaaattgttttccatgactttagataatgcctcaaacaatgatggtgctattcgaggtttgagggccagattttcagctagacaaggaagtgcttttgttgcaaaatatttccatatcagatgttgtgcacacataactattcttgatccaaggtataaaatgagatttattgagtggtgcttcaataagatatttgat

SEQ ID NO: 217786 - DNA, 1382 bp, Zea Mays
aggctgtcaggcatcaccgcgtcagctactcaggtcaggctagggcgttgggctgccatcctgctggtttaactccacgccgcctgcacctgccaggcaggggcgctaggttgccatccctccaggaaccgatcagccgagtagttgctgcctcgctggtcaggttagtgatctgaaaatctgaagttcatcctccaagcttcagtccgcctgtcaggtactcaggttgctgtctggctatttacttttattgatggaatcggctgtggaaggaaaggggaggactgcaagtgatggaactgattcagaaagtaattcgtttgacaagagggatgatatgtctgaagatgaactggtagtgcttggtggaaaaattgatgattcagtggacaatgtcaatattgatgaatctgaggacaacagaagtaaacaaggggtcaagagaaggcgcaaaagggtgaagatgaaggctacagctgaaactgaaaggagcaaaaaggcaaaatctaaagtttgggatgcctttactaaggtgactgtgccggatacgacagagaaggggaagatgatatcaaaggcaaaatgtaactattgtaagaagctatattcttacatacaaggatcaacaacatctcatttgtcaaggcacatgagaatttgtgccgtgtatttgaagcatgtggcaaagcagcagaatcaatctcttctaaattttgctccatcaacagcaggtgaatctggatctggccttcctactatcacttctccaaaagattataaccatgagaaagtaaaaaaactaattgctaagatgataatagttcatgagtatccatttaggatggttgagcatacttggtttaacattgtcatgaggtatttgaatccttcatatgagtttattggtaggaagactataagagctgaatgtttaaagatctatgagtctgaaaaagaatcactagcaaaagtccttaaaggtgttgagtatatttccctaaccactgatttgtggacatccaatcaaacattatcctatatgtgtttggttgcacactacatagatagtgattggaagatgcaatgtcgtgtcctgaatttttttgaattggaccccccacacaaagggcctgttataggacaagcagtatatgaatgtgttgctggctggaaaatagaagataaaattgttttccatgactttagataatgcctcaaacaatgatggtgctattcgaggtttgagggccagattttcagctagacaaggaagtgcttttgttgcaaaatatttccatatcagatgttgtgcacacataactattcttgatccaaggtataaaatgagatttattgagtggtgcttcaataagatatttgat

SEQ ID NO: 217787 - DNA, 1314 bp, Zea Mays
ggctgtcaggcatcaccgcgtcagctactcaggctagggcgttgggctgccatcctgctggtttaactccacgccgcctgcacctgccaggcaggggcgctaggttgccatccctccaggaaccgatcagccgagtagttgctgcctcgctggtcaggttgctgtctggctatttacttttattgatggaatcggctgtggaaggaaaggggaggactgcaagtgatggaactgattcagaaagtaattcgtttgacaagagggatgatatgtctgaagatgaactggtagtgcttggtggaaaaattgatgattcagtggacaatgtcaatattgatgaatctgaggacaacagaagtaaacaaggggtcaagagaaggcgcaaaagggtgaagatgaaggctacagctgaaactgaaaggagcaaaaaggcaaaatctaaagtttgggatgcctttactaaggtgactgtgccggatacgacagagaaggggaagatgatatcaaaggcaaaatgtaactattgtaagaagctatattcttacatacaaggatcaacaacatctcatttgtcaaggcacatgagaatttgtgccgtgtatttgaagcatgtggcaaagcagcagaatcaatctcttctaaattttgctccatcaacagcaggtgaatctggatctggccttcctactatcacttctccaaaagattataaccatgagaaagtaaaaaaactaattgctaagatgataatagttcatgagtatccatttaggatggttgagcatacttggtttaacattgtcatgaggtatttgaatccttcatatgagtttattggtaggaagactataagagctgaatgtttaaagatctatgagtctgaaaaagaatcactagcaaaagtccttaaaggtgttgagtatatttccctaaccactgatttgtggacatccaatcaaacattatcctatatgtgtttggttgcacactacatagatagtgattggaagatgcaatgtcgtgtcctgaatttttttgaattggaccccccacacaaagggcctgttataggacaagcagtatatgaatgtgttgctggctggaaaatagaagataaaattgttttccatgactttagataatgcctcaaacaatgatggtgctattcgaggtttgagggccagattttcagctagacaaggaagtgcttttgttgcaaaatatttccatatcagatgttgtgcacacataactattcttgatccaaggtataaaatgagatttattgagtggtgcttcaataagatatttgat

SEQ ID NO: 217788 - DNA, 1372 bp, Zea Mays
gtcaggcatcaccgcgtcagctactcaggctagggcgttgggctgccatcctgctggtttaactccacgccgcctgcacctgccaggcaggggcgctaggttgccatccctccaggaaccgatcagccgagtagttgctgcctcgctggtcaggttagtgatctgaaaatctgaagttcatcctccaagcttcagtccgcctgtcaggtactcaggttgctgtctggctatttacttttattgatggaatcggctgtggaaggaaaggggaggactgcaagtgatggaactgattcagaaagtaattcgtttgacaagagggatgatatgtctgaagatgaactggtagtgcttggtggaaaaattgatgattcagtggacaatgtcaatattgatgaatctgaggacaacagaagtaaacaaggggtcaagagaaggcgcaaaagggtgaagatgaaggctacagctgaaactgaaaggagcaaaaaggcaaaatctaaagtttgggatgcctttactaaggtgactgtgccggatacgacagagaaggggaagatgatatcaaaggcaaaatgtaactattgtaagaagctatattcttacatacaaggatcaacaacatctcatttgtcaaggcacatgagaatttgtgccgtgtatttgaagcatgtggcaaagcagcagaatcaatctcttctaaattttgctccatcaacagcaggtgaatctggatctggccttcctactatcacttctccaaaagattataaccatgagaaagtaaaaaaactaattgctaagatgataatagttcatgagtatccatttaggatggttgagcatacttggtttaacattgtcatgaggtatttgaatccttcatatgagtttattggtaggaagactataagagctgaatgtttaaagatctatgagtctgaaaaagaatcactagcaaaagtccttaaaggtgttgagtatatttccctaaccactgatttgtggacatccaatcaaacattatcctatatgtgtttggttgcacactacatagatagtgattggaagatgcaatgtcgtgtcctgaatttttttgaattggaccccccacacaaagggcctgttataggacaagcagtatatgaatgtgttgctggctggaaaatagaagataaaattgttttccatgactttagataatgcctcaaacaatgatggtgctattcgaggtttgagggccagattttcagctagacaaggaagtgcttttgttgcaaaatatttccatatcagatgttgtgcacacataactattcttgatccaaggtataaaatgagatttattgagtggtgcttcaataagatatttgat

SEQ ID NO: 217789 - DNA, 1098 bp, Zea Mays
ctttcccagcgagcagtcagcagcaccatcggtctcctccacgacaaaaaacagatattctatcgtcaggaatcaatcagcaatcctgcgttgcctgcccgacggagctgcttccctcgttgctgcattgcactgcggcggcctcgcgcttgttgtcgattccagctccatgcgcccatgatttactttacttgtccccaccatatcttactctttcagattgcaaggagccgtcagtttcatttgaagaacctgcaaatctctcatccgtcaagcacctgaacttttcatggtgcaaaacagagtccctgcctagaaatctaaaatctgtctcaagtctggagagtctttctatagaacattgccccaacataacatctttaccagatctgccgtcctccctccagcgcataactatattgtattgccccgtcttgatgaagaattgccaagaacctgatggagaaagctggccaaagatttcgcacgttcgttggaagagctttctaccaagaccgcaccactttgaaataaatgagaaggcaccttgacgtcacccctcttctcttgaagctccagagttcaggctcaagtcagaagccaatccgtcgttaattctgccgtccccgcggttccctgtttttgccgcttgtattgctccgctatttcagttgctatatcattcattccttggttgtgcacaattgccaatatgtatttctctgacagaatggagtaataactgtggccagagcttttgttttcatgtgcacaattgctatatcattcatgtggcaattagtataaatactccaggcaatgcaatagagaagatagctcattttcctacacttgtgcttgtggatggtgtggcagagaagttcaccatggaaccagttccagtaatgtgtgtgctacagtcaaaataggtcttaattctctgctacgtacagtcaaaatgtgtctgctacagtccgagtgtttctggagattcgttgttggcggatgatgagctacatttgtacagtatggattgagctcgaggacttgttcatctccttgctctattaccagttaaaaggtgattgcttgttctct

SEQ ID NO: 217790 - DNA, 1522 bp, Zea Mays
ggaatccgtcactttctaaatcctgagccctatgaacaattttatcttcctccacacgtaatcgtaatgatactcagattctccccacatccagattctccccacagctagatttttaaaaaagctggtcagaaaaaagctgaaccaaacaagccctataccacttatctctcaactgtttaggacacatcgtccaagaaattctccttaagcgcaccgccgcaccctgaattctagttgctttgcaggaaattgctattgaggcacatagtgaatcaaagtggaagcagttgggggaactcgctatgtccactggaaagctcgagatggcagaagaatgtcttcttcaagctacagactttagtgggttattgcttctatattcatcacttggagatgctgaagggataacaaaactggcatccatgtctaaagaactaggaaagaacaatgttgctttcctttgcttgtttatgttaggcaaattggaagaatgtcttcaattgttggttgatagtaatcgtattccagaagcagcactgatggcacgatcttaccttccaagcaaagtttctgatattgtctcaatatggaaaaaggacctccaaaaggtgaattccaaagctgcagaatctctggcagatcctgctgagtacccaaacctgttcgaggactggcagattgctctgaatgtagaagctactgttgctcccaagaggggtgtctacccacctgctgaggagtacatgacttatgcggagaggtctaatgacagccttgtggaagttttcaaaagtatgaatgtggaagaagtaccaagtgataatggagatcctgttcatgaggtcactgaggatgacggagtcgagggaagtatggatgatgttgttgaagttgaacccgatgattcaacagatggcggtgtccttgtgaatgggaatgatggtgaggaacactgggtgcttactcctgaccagcagtagagatatcacgacaacattctgcaccagcagattagttgcctattgtaaaaaattgtaggtcgccacatgttcagactcgatagtcatgtaaaagaagttcctccccatttgtacaaggcgttgtgcgtggtctagtattgcggttacagaaacagtcttggatggtaattagcatttggtctagataagaaattttgtaattcgattcattttgggtgggcattgtagatttgtggtatgttatagattatctacccttgtatgtttaccacatgatacgatactaacattctttaaggttggaatttgttcaccgacacatgggctgcgacctgcatagcatgtgaaagttgtatttttggttccccagttgtcgataacttgatccttggtttctgccatgtattgtactgccttcttgtaacttattttgccttttttagatgtactgtttttagtatatagtgtatttagatacaatgtataaccagttgtataataaaaactagttaagtgtccgtacgtcgctacgacacata

SEQ ID NO: 217791 - DNA, 2012 bp, Zea Mays
cttctataaaattcgttggagcaaaaatcatctaaaatcaacataaacacataatggttgagtcggtgtaatagtaggaatccgtcactttctaaatcctgagccctatgaacaattttatcttcctccacacgtaatcgtaatgatactcagattctccccacatccagattctccccacagctagatttttaaaaaagctggtcagaaaaaagctgaaccaaacaagccctataccacttatctctcaactgtttaggacacatcgtccaagaaattctccttaagcgcaccgccgcaccctgaattctagttgctttgcaggaaattgctattgaggcacatagtgaatcaaagtggaagcagttgggggaactcgctatgtccactggaaaggtatttgtgtcaatttttttttttctgaaatgcgcaggagaactgcacaactttgtattaagcagagaattaaagcggagagaactccaatacaccacacacacccacactagaaactaacttgtgatcaccggctaacaggaaaaaacacgatcaacagagctgttttaagccagcagctcttcgaccttgagcaaagacagggccttggctccagccaaggaccaaagcaccgtctcttccttacaccctaagggttgtgaccaagctaggattacattcatcaaagacacatctatgcctatgtttccatatggtccaagcacctagaattactaaggaattgaagcccttcctcatttgatcagttgtccgagagctgctagtccttcaccacgactggaaggaatcctcctcgagatggcagaagaatgtcttcttcaagctacagactttagtgggttattgcttctatattcatcacttggagatgctgaagggataacaaaactggcatccatgtctaaagaactaggaaagaacaatgttgctttcctttgcttgtttatgttaggcaaattggaagaatgtcttcaattgttggttgatagtaatcgtattccagaagcagcactgatggcacgatcttaccttccaagcaaagtttctgatattgtctcaatatggaaaaaggacctccaaaaggtgaattccaaagctgcagaatctctggcagatcctgctgagtacccaaacctgttcgaggactggcagattgctctgaatgtagaagctactgttgctcccaagaggggtgtctacccacctgctgaggagtacatgacttatgcggagaggtctaatgacagccttgtggaagttttcaaaagtatgaatgtggaagaagtaccaagtgataatggagatcctgttcatgaggtcactgaggatgacggagtcgagggaagtatggatgatgttgttgaagttgaacccgatgattcaacagatggcggtgtccttgtgaatgggaatgatggtgaggaacactgggtgcttactcctgaccagcagtagagatatcacgacaacattctgcaccagcagattagttgcctattgtaaaaaattgtaggtcgccacatgttcagactcgatagtcatgtaaaagaagttcctccccatttgtacaaggcgttgtgcgtggtctagtattgcggttacagaaacagtcttggatggtaattagcatttggtctagataagaaattttgtaattcgattcattttgggtgggcattgtagatttgtggtatgttatagattatctacccttgtatgtttaccacatgatacgatactaacattctttaaggttggaatttgttcaccgacacatgggctgcgacctgcatagcatgtgaaagttgtatttttggttccccagttgtcgataacttgatccttggtttctgccatgtattgtactgccttcttgtaacttattttgccttttttagatgtactgtttttagtatatagtgtatttagatacaatgtataaccagttgtataataaaaactagttaagtgtccgtacgtcgctacgacacata

SEQ ID NO: 217792 - DNA, 8062 bp, Zea Mays
gtactgtcttctccttccctcgccccttccctccactcgcgatctcgcgccctgccctcccctcggctccctccgcctctcggacagagggtgagagggtattctaacagcccccatatacaccccaccggcgccggaacctacgacgtcgcaatgccgctccagttagagatcaagaggaagctcgcgcagaggtcggagagggtcaagtccgtggacctgcatcccacggaaccatggatcatgtcaagtctttattctggcagtgtctgcatctggaactaccagactcagacaatggtgaaatcttttgaagtcagtgagttaccagttcgttcggctaaatttattgcacagaagcaatgggttgttgctggtgccgatgacatgttcatccgtgtgtataactataataccatggataaggtcaagttgttcgaagctcatactgattacatcaggtgtgtggctgttcatccgaccctgccatatgtgttgtcatcatcagatgacatgcttataaagctttgggactgggataagggttggatgtgtactcaaatttttgagggccactctcactatgtcatgcaagtcacatttaaccccaaagacacaaatacttttgctagtgcttctcttgatcgtactgtaaagatttggagtcttggttcccctgatcctaatttcacattggatggtcattcaaaaggtgtcaattgtgttgattacttcactggtggtgaccggccatatctaattacaggctctgatgaccaaactgcaaaggtttgggattatcaaacaaagagctgtgttcaaacacttgaaggacatgcacataatgtctctgctgtatgtttccatcctgagcttccaataataatgacaggttcagaggatggaactgttcgcctatggcactccactacttacaggcttgagaatacacttaactatggccttgaacgagtttgggcattaggttacatgaagggctcacgaagagtcgtgattggatatgacgaaggaacaataatgattaagattgggcgtgaagcacctgttgctagtatggatagcagtggtaaaatcatatgggccaaacataacgaagttcaaactgtcaatatcaaggcagttggtgcggatgctgagattgcagatggagaacgtctgccattggctgtgaaggagctaggaagttgcgacctttacccacaaagtttacggcacaatccaaatgggaggtttgttgctgtatgtggagatggagagtacattatctacacagcgctagcatggagaaatagatcctttgggtctgctcttgaaattgtttggtcaactgaaggagagtatgctgcaagggaaagcacatcaaaaataaagatctacagtaaaaactttcaggagaggaaaagtataagaccagcattctctggagaacgtatatatgggggagtattgcttgctatatgtacaaatgatttcatttgtttttatgactgggcagagtgcaggttgatacgtcgaattgacgtgaatgtaaaaaatgtatattgggctgacagtggtgatttggtgacaatagcaagcgattcgtcattctacattttgaagtacaatagggatctagtttcttctcatctagatggaggggcatcagttggcgaggaaggtgttgaagatgcctttgaattgcttcatgagataaatgaacgtgtccgtactgggttatgggtcggagactgttttatatacaataattcttcatggcgcctgaactactgcgttggaggagaggttactacaatgtttcacttggatcggcctatgtatttattaggatatcttgctaaccaaagtcgtgtatatcttattgacaaggaatttaatgtggtgggttatactttactactcagtttgattgagtacaaaacacttgtgatgcgtggggatttggaacatgcgaatattattttaccatccataccaaaggaacaacacaacagtgtggcacatttccttgaatcacgtggcatgttggaggaagcccttgatatagccactgaccctaattacagatttgatctggctgtgcagcttggaagcctcgaagttgcaaaggcatagtgcaattatagtattatgggcctgtttgtttcggtttctagcagcttctggccaccaaaagctgctgcggactaccaaacgttcagcttttcagtcagcttctataaaattcgttggagcaaaaatcatctaaaatcaacataaacacataatggttgagtcggtgtaatagtaggaatccgtcactttctaaatcctgagccctatgaacaattttatcttcctccacacgtaatcgtaatgatactcagattctccccacatccagattctccccacagctagatttttaaaaaagctggtcagaaaaaagctgaaccaaacaagccctataccacttatctctcaactgtttaggacacatcgtccaagaaattctccttaagcgcaccgccgcaccctgaattctagttgctttgcaggaaattgctattgaggcacatagtgaatcaaagtggaagcagttgggggaactcgctatgtccactggaaaggtatttgtgtcaatttttttttttctgaaatgcgcaggagaactgcacaactttgtattaagcagagaattaaagcggagagaactccaatacaccacacacacccacactagaaactaacttgtgatcaccggctaacaggaaaaaacacgatcaacagagctgttttaagccagcagctcttcgaccttgagcaaagacagggccttggctccagccaaggaccaaagcaccgtctcttccttacaccctaagggttgtgaccaagctaggattacattcatcaaagacacatctatgcctatgtttccatatggtccaagcacctagaattactaaggaattgaagcccttcctcatttgatcagttgtccgagagctgctagtccttcaccacgactggaaggaatcctcgtgagtgggacacaactcctgcatccccactgtcaaattttcatgcatgcacaaatcacagatgtgcttcacttgatatgttttttccctaaattactagtatatctatctctgacatttgtactagttacaatttacttagtaattgggatggttagcttgcagtcttaatgacatttctcaattttacaaatcttgagtcttctatcataattttccattagattgagctttctgcttcctccttgtcatgtatttgccctgcgtttctggaggaccattctgcttttccaaccggacacaaggagcttgggctgaaaaacttcattagcaaagtcagtagagttacaacagagcttcttccaacaccaaaatctaaccagaaggccccgaccacacagtccgtcaatgcccagcaggcgtattgcaggaattggagtggaatacagcatgcaatattggaacaaacgatcagtcagaacagccatgagagccttgcgcatcatcaatgaagctgaagaagttagtcaggaagcctgaatgaatatgccatgctattcaaacgccccttgacgcaaacccaggtggaggcccttgcagctctattcggctggtctactccagtggacttagagtcccagtagcccccccccctcgggtgtgttttttttgttgataatccttgttcatggatccttccaaaattctagtctggaatgtaaggggtcttaactcctcggttaggcaatatgcgatgagggatgttgtaaactctactcaagtggatgtgctctgttgccaggaaacaaaaatgcaacatattttccagaggaattatactctctatgttgggaacagagtttactgaatttatttatctgtcttctgtggggtctagtggtggcatctttgttgcttggaaaagacatgttgggcacataggattacagagagtggataaccactgtgtttctattcagttctgcagagaagaaggtcaaccttggtggttaacctgtgtgtatggccctcagggggattttgataaagttcttttcctccaagaattaagggatgttaaggctgcttgttctggcccttgggtggtggcaggagacttcaacctgatctatagaagctctgataaaaataactccaatctgaatagggccatgatgggtcgttttaggacagtgatcaatgatctcgctctcaaagaaattcagctccatggctgcaaattcacttggtctaaccgtctaaccaacaggacaaccctgtgctggttaagttggacagggtcttttgctcagttttgtgggaatccatcttccccaatgtggttctccaaagtacagcctctcatgattcagaccactgcccattgatccttggcctcaaagaataacctgtggaaaaaagaggtttgactttgaatctttctggaccaagttagaaggctttcatgaatcatgatactgttcaggctgcttggattttagtggaaccttccagatatccttttctgaccttggaaagaaaactaaaggagagtgataaaaaagtgtgacacgtgacctcccagttatatctggcaaaagagctactaagagctactgcataaattagaaatagctcaagatcatagggtattttcaccggctgagttatggctcaagaataagctcaagaagcattccctgccgctggcctccttcaaaagaataatggcaagattgagatcgagaattttgtggttgaaggagggggatgcaaataccaaattctttcacatgcatgctaggcatcgaaaaagaaagaatctggtggtcaggctaagggatgatgagtgtatccttatcaatcatgctgaaaaagcagctctggtggatcagttcttctctaatctcattggtcggtctgaagacagaaatagatccattgatcttggggctcttggtttgccaacacataaccttgctgatttggactcaccttttacagaacaggaagtgtggggaaccatcaggactcaggagtctacctgcaaggccccagggacagatgggttcactggaagattctataaagtgtgttggaacttggaacattatcaaggaagatgtgctaaatgcaatgtctgcaatttggagcagaaattttgcaaaccttcacagactcaatacagcatacatcacaatggtgccaaagagagagggggctaaccaggttacagatttcagaccaataagtgtagtgcacagctttgcaaagttagtcaccaaggtccttgctaacaggctggctaaaagattaaatggtatggtctctccaatccaaagcacattcattcaagtaaggtttatacaggataacttcatgctagtgcagcagacttcaagactgctacatcaacaaaatttggcaactcttttgtttaaattagacataacaaaagcttttgattctgtgtcttggccattcttgattgaggtaatgcaacaaatgggttttggacaactttggagagatcatttgtgggcttcttggctcttccaccacacaagtgcttctcaatggatgtccaggaaaaaggatacaacacagaagagggcttagacaggggatcccctttccccaatattgttcattcttgcaatggatgttctgggtcttctttcctccaaaactgaagatgctggatttctgcagcagttgtccagaaaaagaagctacacagaatctctatttatgccgatgatgtggccttattcctgcacccctctgttgctgatatctccaccactcttgatattctctacctttttggggatgcctctggtctgcacaacaacacccagaaatcaaatgtttatcctatcagatgctctgaagagatcattgtggaggtccaaaataggttgccttgtgcaattgcttcctttccctgcaaatacttgggccttcctctatccttgcacaaattatccaaacaacagttctttcctctggtggaaaagattgcagatcgtctcccaagctggaaggctgatttgatgaatagggctagcagaaaagtgcttgtgcaacatgttctttctggaatgacagtctttgctgcaatggcgatcgactttccccattgggctatttgaagccattgataaaataagaaaatgtttcttgtagagaggtagaaaagaagcaaaaggggggcattgtctagtcgcttggaacaaggtgtgcaaacccttgcacttggggggtctggggatttctagcttacaagacctctgctgggctcttcgcatgcaatggttatggctggagaaaactgatcctaccaggcattgagcagagctcccaattcaagtccctagtaaagccaaatccttcttctctgcagtcttgatcactgagattggtaatggatccaacactttgttctagatagatagatggataaatggtaaaagagtctcagatattgctctaagactgtttgccataatcccaaaaagaataatatacaggagaattgtgcaagaggccttgctaaacagaaggtggatttcaaatataaagggtgctctgactatgggagccctgatagactatctacatctttgggattctctttctggcctgagtctgcagccgaacatggaggatagacacatttttaccagggcatcggatggcaaatactcagcaaaatctgcttataatggcctcttcttaggctcaagctcctttggtcatcacaaaaggatttggagatcttgggccccctccaaatgccggttctttatgtgcatggtggcttagaatagatgttggactgcaacactgacaaaaagaggcttgaatcatcctgctagctgtcctctctgtgaccaagaactggaaaccatcaaccacctgctggtgtcctatgttttcacaagaggcttctggtacaccatgctaagaaaatttggtcttcgcagtctaggccctcagccggatgctacatctactggtggaagaaatattcagacattgtttctggattagttaagggtctggattgcctcatcatcttgggtgcctggatggtttggaagcatcggaatagggtggtgtttgatggagccactccagacctcacccttctcctcagatctgctgaggaggaaaggcaaaaatggcaattggccggtgccaaagggctttccttcttggcggtgcctccctctaatgtttaggagaggtgttggtgtgttgtttgtatgcctgtttctttagtgtccagatggatagttatttgtatgcctgtttctggcctccataagggaaaggtcttgtattttgggtcttctatagacctcttgttttctcttctaatataattaaaaggagtagctctcctactcttttcgagaaaaaaagtgatatgtaagcagctcccttgcatatttgagataaacagctcgagatggcagaagaatgtcttcttcaagctacagactttagtgggttattgcttctatattcatcacttggagatgctgaagggataacaaaactggcatccatgtctaaagaactaggaaagaacaatgttgctttcctttgcttgtttatgttaggcaaattggaagaatgtcttcaattgttggttgatagtaatcgtattccagaagcagcactgatggcacgatcttaccttccaagcaaagtttctgatattgtctcaatatggaaaaaggacctccaaaagaatctctggcagatcctgctgagtacccaaacctgttcgaggactggcagattgctctgaatgtagaagctactgttgctcccaagaggggtgtctacccacctgctgaggagtacatgacttatgcggagaggtctaatgacagccttgtggaagttttcaaaagtatgaatgtggaagaagtaccaagtgataatggagatcctgttcatgaggaacagctgggatcagctcagaaacatatgctatatttgct

SEQ ID NO: 217793 - DNA, 2373 bp, Zea Mays
caaaagagcctccagctgaataggttaaacattctgactagcacttctcagctcctgaagacctgagttggactcttcgttggagtgaatttcaggatgaggttttattgcacattatgctactctggctagcagggacgtggattgttgcttgatcccagaatcaccgttctatttggaaggcgaaggcggactttttagatacatagaaaaacgtttgaaggacaatggtcatatggttatcgttgttgctgagggtgctggacagaaacttattgctgaaaccatgcagtcaattgggaaagatgcttcaggcaacgagctgcttcttgatgttggcctttggttatctcagaagataaatgaacatttcaagaaaaacaagatgaccattaatctgaagtacatagatccaacgtacatgatacgtgccatcccaagcaatgcttctgataacgtctattgcacactgctggctcacagcgtggtccatggagccatggctggatatactggttttaccattggccaagtgaatggtcggcactgctacatcccattctatagcacgctgggttgcgcgcgtggcgtggcccgtgacgactcaaaaaggcccatgtggaaacagaaagttccgtcagcggtgaccggtgagcagtcgcgttttagcgggacgtttgtcccacctcggaagcggaagacggggaggcagggggaggcgggcataagaaacggcggtgggctacctgctgaagacatctttgcgcttggggcaatgacgcagcttatgaggtcataccgaggcgcgtcaattgctggttgaaaactatttccaaaccccctctttggcccactgggccactgagaatttctggaagggctccttttcctcggagaagcaatcttgagtcctggcctgggtcttcgctgccagcacgcttgtggccaagaaacgttgggggcagtttggacctcggagcagcagcatccatggcgggagaggaggccgggaggaggggcgttccctctctgctgaacccgccgtccgcttccagcgaggggcagcaggagcacatcgcctctgatgtcacacagctcatcggatggacacctctggtcgagctcaagcgaatcgccgccaaggaaggggtatgcgcgcgcatcgtcggcaaggtggaggcgtaccagcctctgtgctccgtcaaggatcgcagcgctctgagaatgatcgaagacgcagaggagagggggctgatctcgcccggcaccacgacgctcgtggagccgacgagcggcaacctggggctgggcctggtcctcgtcgccctccgcaagggctacaggttcgtcgcggtcatgccaggccagtactcgctcgacaagcagatcctgctgacatacatgggcgcagagctgtacgtaacagatccatccctggggttcccgggcataaccgccaaggtcgaggagctcaagaaggagctgcccaacgtgcacgtcctcgaccagttctccaacagagcgaatcctgaagcgcatgttagatggactgggcctgagatctggaaggacaccgccggtaaggtggacatattcgtggccggttcaggctcgggaggcacggtgtctggcgtcggcaagtacctcaagacgcagaaccccagcgtcaaggtcatctgcgttgagcctgccgagagcccagttgtttcaggcggggaaccaggcagccacaagatccagggaatagggccgggattcataccggaagtgctggacacctcggtcatcgacgaggccgtcacggtgaccaccgaggaggcgatggcgggcgcccggaggctggccagggaggagggcctgctcgtcggcatctcttccggggccaacctggcggcctgcttgaaggtcgcggcgcgagaagagagcaaggggaagatgattgtcaccgtgtttccgagcgggggcgagaggtacatgacctccgacctgttcgccgccgccagagaggagtgtattgccatgacgttttgatctttttttaccccctccccccagaaaaaaggggaaaacaaatacgcgtgtatctttatcttcacatggtattggtttaccatgcatgtacatttaaaaatatttttccccgaaacggaatagaacagctgcgtgcttgtttacacatcaagtcgatctctcctgaaccgatggtgaaaacagtggcggagcccggatccggaaaagttctaactactacaacaaaaaaaccggtagtatattatcaccgaggtctaatctaatttaggaaccccattttcttaaggtatctccatttttctaagagaaattagctaattttttccttagaaaaaataagaa

SEQ ID NO: 217794 - DNA, 1609 bp, Zea Mays
gaaaaaaactcacagttgggttcgaccttgccgtctcccactctcccttctcgcgccgttggaggcggcctttgtcggcaaactcgggcacgacgagttcggaagaatgcacgcggccatcctccacaacaacggcatcgactactatgtcgtcgtcttcgatgtgggcgcgcgcactgcactcgtcttcgtcaccctatgcgccgatggggagcgtgaaccccagtgccgacatggtcctcaatgccaacgagctcattatgaggatatttgttggtaagggacataacacttcacatgcccatatgactttagaagctcatggatccttttagtgtctcctgaaattgaggtatatgaagggatgatagtttgatgccatccacgtgacagtgaccttgaggtaagatgatcaaatacatatcactatctatttctttttctctgtccatacttgagaccaatgtctctttggtagatggatcctatgaaactaaataacttacagacatccgagcccttagaaaggttcaaattgtccgtttgtctccacctcgattggtatatcttctttccgctcttttactgagatatcatgagagatggtgtttcttttatgtaaaagaaacacaatagtgcaatgcctgatcagttggttaattgagcactgtaacttggatagatgttgtggatcatttctttgtcacaccacatgagatagctgcatcgtgcatttattttgtgcttccactaacaaagattagacgctaagcagtaatagagaggcactgaataccagcattctacattaatacattatgcaggccattgacaccaatatagatcatgttgagcctgagcacaaagaccttctgagagtccatgaagtgggaggtggctctacaatgtgttgcatccactcagttggatctaatcttactcgtactagggagctactagagttgtagtagaatgtgttcatgcagagcgggcaagaagctttcacagtgggtaaggattcaaacaggactccaacaagtgtgcatgagctggttgtacctatttgttccctggaaactggagtgcttggaaagagaatcaaaaggtctctaactggtgggcatgagatgcagtctacccaggacaagtgatcagggaggctagcatggtgaaggaagcaatactccaacatgtcaagttacaaaaccttcaagttcagtgagatggggtgacaggagtagctaaccacagttgaggcgacaaaaatacatatccaagtttaggtccttgtgcagatagacagataaacaagtatgacagtcacttcagaagtagcttccactccctatgttttgcaaggtagagagctccacgatgtagattccagacccaatgttgcgcaaggtagtaaaagttgtacacatctgttagcctgttgctgttgttgatctggtgatgaacattctcttctacaaaatcaaaagatgttttatttacatagaaattggacatatgaagcttctgttgagtgcatgataattcaatatattatgggttatattccatgatatgaattcatatgatgtgtttcttgtgatgacgattatag

SEQ ID NO: 217795 - DNA, 1898 bp, Zea Mays
atagataggtgttcctacattcatatgattcaggtatatgtgttcttgaagggagaatttgataaggagcccaccagcaaggagttcctacgattgcgaacacagaggtgtcacagatcactaaagctcaacatatcgatgtccaatttatcctgcaaaagctggcagaaagtatggcacttgtattgtgaatttgcaactcggggcctcttcattgagttcaggcgcacccttagtgggtgcttcaggaaaagcaagttcctcaagaacatctcattctcatggagcgatgtgttgcatgagaaagcacttgctctcacagaagaacttgatgtcaggatgagagcgatggcatcaattacccctccagttcaagcaccatacttgttgaagtgtgtgcctgatcgagtaactgatgatggtggggccatgatttctgatgtcatattgcgcatgagaaattaccgtccccaagaaggacgttggctgacacgcactgtacttgatcacagtgggagagaatgttttgtcatccggatgaggcagagggatttggcggagaggtgctgaaactcccatggcagtgaaatgggaggataggagcattgaggttcgagaaggatcatggtcatacattgccagtacaagctctgttggttatgctcctgaaaagatagtgggcacaggaacagtgatgaaagatcatcaggagaataaggtagtttggagcttatcaacaggagatacgctgacaatacgtttgggagatgaactcagctttcagttaaaaaatgacagctcagaagaggaggcaaggctgcttgtcgggaggaggttgagctacagagtaaacacagataatgcgtcgagcaacctagtcgaggaggagcaatacctgacacttgttcgtaagtcaccgtatcatcatggtgacagagcaaccgtgcttctaaactggaaattacttgctgtggagttcttacctgaagaggatgcagtttttgttcttctcctatgcatggtgattgcacggaccatgacagagatcaggagagaagatgtggctgggcttttagtgcggcggaggataagtgaagcaagggccgggcagagagactggggttcggtgatgcttcctggctcgctttcaccggatcctcatctgcagccttggtaccggaacgcaacgcaggttttgagctctgcggagacaggaccagtgctcacaaagtactcacctgctgacgggaaggacatgttgtacaggcaagctcttataccctgatgaagccctaatagagattattaccataccatcaggacttgcctgatagataaaaaaaacgaacccaatcttcctgggtatcgcagggaaattatttcatttcctcaatgctatgacatacgacatttgtacatgacaattttttgtggttcgagctgttgtttcactaatgatgattgtcctttgatacgaatccaatgattgctgtcatatattgtttgtactgagaattttacacatttcatttcaagtttgtctggtttctgtagtttgacaatgaactaaaagaagagcttatgtccatttgaacaaactgattatagaggataaaggattcagaatctgatatccgaagagtctgaatgttcatctcgtgcatatttcttcaggaaaaaaaaaatagaatggcaccattctagccgaaaaggactcagtgagaatgtaagatggaagatgaaaatccttcgacgtgtgatagtgctttgtgcgttggggtgtgactgtgactgccgctccagccggctttgattgcctctattgctttttgtatctcctcaatgaggatggcaatgggcactgtctacgctcccagtcttcccagatgatatcttct

SEQ ID NO: 217796 - DNA, 3841 bp, Zea Mays
taaaacaaagaaatccgaaactttatctcgtttcctccccgcctctccccctccccggctctaagggctcttctacaccgaagcaccgcacctcccgccatgcactgcatcgccccccgcctgctcctcctcccgctcccgaccgtctcccgccacgcgctatcgccaacccagacgccacctcttcctcccctcctcccctcccgcgcctgtaagttccacctcgcctcggcgcgctcgccgtcccgcgccgccgcttcggtttccggcgacgacgaggatgaggaggttgacgtggatgacgacgaggacgacgagacaaccatccgcaacgtagacgatgaatacgacgacgatttcgaggacggggatgagggagatgagggcgatgaggaggcggtggacgaggagagcggtggtgagtacgaggaagaggcgggggaggacgaggacaagcgggaggataccgcagcgcggaggcgggactcggaggagtataagtcgcggcgggtggcgaagctggtcgccgaggtgcgggagttcggggaggacgtcatcgactacaacgagctcgccgggatctacgacttccccatcgacaagtttcagcgcttggctatacaagcatttttaagaggttcatctgttgtagtttctgcacctacaagtagtgggaaaacattaatagcagaagctgcagcagttgcaacagtagcaagaggaaggcgtctcttctacacaacaccattaaaggcattgtcaaaccagaagttccgtgatttccggaataccttcggtgatcataatgttggccttcttacaggagattctgctatcaacaaagatgctcagatcctaatcatgacaacagagattttacgtaacatgctgtaccaaagtgttggcatgacagcctctgaaggtagattatttcaagttgatgtcattgttttggatgaagtccattatttgagtgatatctcacgtggcactgtttgggaagaaactgtcatatattgtccaaaggaagtccaacttatatgtctgtcagccactgttgcaaatcctgatgaattagctggctggataagtcagattcatggtaaaacagagcttgtaacatcgaacaaacgtccagttccgcttacttggcacttctcgaagaaatattcattacaaccgcttcttgatggaaaggggaaaaaaatgaataggaaactgcggatgtctaactcccaaaacttagcatctccaaagagtgagttctattatgtgaaagggaagaggaggtttagaacaaataaaattgagcaaggtaatagcaggcctttggacatatcgaaacaggttcagttatcaaagcatgaactcagcaatatgcgtcgttcccaagttccactaatacgtgacactttatcacaactatgggaaaatggcatgcttccagctatctggtttatttttagtagaagagggtgtgatgcagctgttgagtaccttgaggattgcagactgttgcatgactgtgaggctagtgaagttgagctggaacttaggaggttcaagatgcaatatcctgatgctattcgagaaagtgctgtgaaaggactcatgcgaggagttgcggcccatcatgctggttgcttgccactgtggaaatcatttattgaagaattatttcaacgtggccttgttaaagtagtttttgcgacagaaacccttgcagctgggattaatatgcctgccaggacggctgtaatttcttctctcagtaaaagaatagatgctgggcgccagctcttaaccccgaatgaactattccagatggcaggtcgtgctggaaggagagggattgatacagttgggcatgctgttcttgttcagactccatatgaagggcctgaagagtgttgtgacatcatctttgccggacttgagccacttgtctcacaattcactgcatcatatgggatggttttgaatcttcttgccggttcaaaagttacacataaacagaaagaatcggatgatgttaaggacaagcattctggaagaaccttagaagaagctcgaaagctagtggagcaaagctttgggaattatgttggtagcaatgtaatggttgctgccaaagaagagactgaaagaataaggcaagaaatacaatacctctcttcagaaattactgatgaatctattgatcgaaaatgcagggaagaattatcagaagaagactatgctgagatttccctcctacagaagagactaaaggaagagaagcagatcagaaatgagctgaaaaaaaagatggaactggagagaatggctgcatggaaaaatcggttagaggaatttgaaagtggccatcttcctttcatgtgcctgcaatacaaagataaggattcaattcagcacacgatccctgctgtatttattggaaacctcaactcatttgctgatcaaaagatcatgaacatggtggaagatgattcacttgtttctggcaagccgaaacgtgatagtggggaacaactttatcgcccatcttactatgtagctttaagttcagataattcatggtatctgttcacagaaaaatggattaaaactgtttacaagacaggtctacctgctgtcccttctgttgaagggggcacactccctagagaaaccctgaaacagctcctcctgcgtgaagagttggtgtgggataaagttgaaaaatcagaatacggctctttgttaagcatggaaggttctttagacacatggtcgtggagtctcaatgttcctgtgcttaatagcctttcggaagacaatgaggtagaacgattctcccaggaacatcaagatgctgtagaatgctacaagcaacagaggaggaaggtttcacatttaaagaaaacaataaaggctactaggggtttcaaagaattccaaaagatcatcgacatgagaaattttacaaaagagaagattgagcgcttagaagctagatcccgtcgcttgactcgacgaataagacaaattgaaccgaccggttggaaagaatttctccagattagcaaagtcatacaagaggctagagcattggatatcaatactcaggtaatctatcctttgggtgagacggcagcggctatacgaggggaaaatgagctatggcttgctatggttcttaggaacaaggtcctcttggatctaaagccatctcaactggcagcagtttgtggaagtttagtttccgaagggatcaaacttcgtccttggaaaaatagcagctatgtatatgaaccttcttctgttgttactggtgttataagttatttagaagagcagagaaattcgctaatcgatctccaagagagacatagtgttaagataccttgcgaaatagatgcccagtttgctgggatggttgaagcctgggcttcaggactgacttggagggagataatgatggactctgcaatggacgatggagatttagcccgtctactcaggcgctctatagatttactagctcagattcccaaactgccagacattgatccggttctccaaaagaatgcacaaattgcttgcagcgtcatggaccgagtaccgattagtgagcttgccggttgaaaactcaacctaattatttcggtgcttcgatatggatcttgattgaagaaatggacaaaagaaccaatgcaaaaattgctctatgtacagtctgaagctatcctatacctctacaacaaagaattcaaaacaacgcaaacaatcatctacagccacccgttcaatctattcctcgtcactacttgaatcagaatctgcactatccttcatgaag

SEQ ID NO: 217797 - DNA, 4041 bp, Zea Mays
aagaaatccgaaactttatctcgtttcctccccgcctctccccctccccggctctaagggctcttctacaccgaagcaccgcacctcccgccatgcactgcatcgccccccgcctgctcctcctcccgctcccgaccgtctcccgccacgcgctatcgccaacccagacgccacctcttcctcccctcctcccctcccgcgcctgtaagttccacctcgcctcggcgcgctcgccgtcccgcgccgccgcttcggtttccggcgacgacgaggatgaggaggttgacgtggatgacgacgaggacgacgagacaaccatccgcaacgtagacgatgaatacgacgacgatttcgaggacggggatgagggagatgagggcgatgaggaggcggtggacgaggagagcggtggtgagtacgaggaagaggcgggggaggacgaggacaagcgggaggataccgcagcgcggaggcgggactcggaggagtataagtcgcggcgggtggcgaagctggtcgccgaggtgcgggagttcggggaggacgtcatcgactacaacgagctcgccgggatctacgacttccccatcgacaagtttcagcgcttggctatacaagcatttttaagaggttcatctgttgtagtttctgcacctacaagtagtgggaaaacattaatagcagaagctgcagcagttgcaacagtagcaagaggaaggcgtctcttctacacaacaccattaaaggcattgtcaaaccagaagttccgtgatttccggaataccttcggtgatcataatgttggccttcttacaggagattctgctatcaacaaagatgctcagatcctaatcatgacaacagagattttacgtaacatgctgtaccaaagtgttggcatgacagcctctgaaggtagattatttcaagttgatgtcattgttttggatgaagtccattatttgagtgatatctcacgtggcactgtttgggaagaaactgtcatatattgtccaaaggaagtccaacttatatgtctgtcagccactgttgcaaatcctgatgaattagctggctggataagtcaggaaactgcggatgtctaactcccaaaacttagcatctccaaagagtgagttctattatgtgaaagggaagaggaggtttagaacaaataaaattgagcaaggtaatagcaggcctttggacatatcgaaacaggttcagttatcaaagcatgaactcagcaatatgcgtcgttcccaagttccactaatacgtgacactttatcacaactatgggaaaatggcatgcttccagctatctggtttatttttagtagaagagggtgtgatgcagctgttgagtaccttgaggattgcagactgttgcatgactgtgaggctagtgaagttgagctggaacttaggaggttcaagatgcaatatcctgatgctattcgagaaagtgctgtgaaaggactcatgcgaggagttgcggcccatcatgctggttgcttgccactgtggaaatcatttattgaagaattatttcaacgtggccttgttaaagtagtttttgcgacagaaacccttgcagctgggattaatatgcctgccaggacggctgtaatttcttctctcagtaaaagaatagatgctgggcgccagctcttaaccccgaatgaactattccagatggcaggtcgtgctggaaggagagggattgatacagttgggcatgctgttcttgttcagactccatatgaagggcctgaagagtgttgtgacatcatctttgccggacttgagccacttgtctcacaattcactgcatcatatgggatggttttgaatcttcttgccggttcaaaagttacacataaacagaaagaatcggatgatgttaaggacaagcattctggaagaaccttagaagaagctcgaaagctagtggagcaaagctttgggaattatgttggtagcaatgtaatggttgctgccaaagaagagactgaaagaataaggcaagaaatacaatacctctcttcagaaattactgatgaatctattgatcgaaaatgcagggaagaattatcagaagaagactatgctgagatttccctcctacagaagagactaaaggaagagaagcagatcagaaatgagctgaaaaaaaagatggaactggagagaatggctgcatggaaaaatcggttagaggaatttgaaagtggccatcttcctttcatgtgcctgcaatacaaagataaggattcaattcagcacacgatccctgctgtatttattggaaacctcaactcatttgctgatcaaaagatcatgaacatggtggaagatgattcacttgtttctggcaagccgaaacgtgatagtggggaacaactttatcgcccatcttactatgtagctttaagttcagataattcatggtatctgttcacagaaaaatggattaaaactgtttacaagacaggtctacctgctgtcccttctgttgaagggggcacactccctagagaaaccctgaaacagctcctcctgcgtgaagagttggtgtgggataaagttgaaaaatcagaatacggctctttgttaagcatggaaggttctttagacacatggtcgtggagtctcaatgttcctgtgcttaatagcctttcggaagacaatgaggtagaacgattctcccaggaacatcaagatgctgtagaatgctacaagcaacagaggaggaaggtttcacatttaaagaaaacaataaaggctactaggggtttcaaagaattccaaaagatcatcgacatgagaaattttacaaaagagaagattgagcgcttagaagctagatcccgtcgcttgactcgacgaataagacaaattgaaccgaccggttggaaagaatttctccagattagcaaagtcatacaagaggctagagcattggatatcaatactcaggtaatctatcctttgggtgagacggcagcggctatacgaggggaaaatgagctatggcttgctatggttcttaggaacaaggtcctcttggatctaaagccatctcaactggcagcagtttgtggaagtttagtttccgaagggatcaaacttcgtccttggaaaaatagcagctatgtatatgaaccttcttctgttgttactggtgttataagttatttagaagagcagagaaattcgctaatcgatctccaagagagacatagtgttaagataccttgcgaaatagatgcccagtttgctgggatggttgaagcctgggcttcaggactgacttggagggagataatgatggactctgcaatggacgatggagatttagcccgtctactcaggcgctctatagatttactagctcagattcccaaactgccagacattgatccggttctccaaaagaatgcacaaattgcttgcagcgtcatggaccgagtaccgattagtgagcttgccggttgaaaactcaacctttaacagttgtcacagtgaaattcaagagcagctcatatcccactgactaaacatgtttttcaagaagatcagcaactacagtgattggttcaaggaatcaacattcagaatgatgaacaagacaaatgatcacatcaaaggttcataggattattcatccaaaaaattctatcactaccaattccagaattttcaaccacgtgaccaatcaaatggatatggagatcaaagcgcagcaacaatctctaggttttctcacggcttctagatgcctgaacaccagaaatactcagaatcagaactgcagtgtcaatggatatgactattaagggcatgttcgtttcacccccaatccatatggattgaaggggattgagtgagtttcaatccctgataaggccttgttgggttattcacatctcacatgggttggaagggattggaaaattttaagaagaattttgacttgctatggatttaaacacacccaatctcacccaatccacatggactgacactaaaacgaac

SEQ ID NO: 217798 - DNA, 3086 bp, Zea Mays
tgcgctgcggcctgcggctctctctctcctgccccatgttcatgttctttgcttgctcctccgccatggattaggctaggctaggccatcaaggtctaggtcccttcttgctctgctctggtgctcatgtttctctccatacaccacgacgacgacgatggtgtcgatgttttttgttgttgttgttgttgtactctttccccagattggcagcttgctgtccacagcctagcggctctgttttggatggactcactgttgtgtactgtctagccgcttgtttcttgtggacgtctaggccttgtggacgagtgaagtgaagcctgccatatcctgttggaatcgaacctgcttcgattcttccctcttgtagttacctccagatagcccccaattttttttttggcaccacctaccttggcatcgtcttccccaattcggtcgcgtccaacccttcctttcaggcctttccgaatgttttgcccttgatttgtactccgtcgcaggtttaggagccgtgtccggcttgtcacatcccggtggtttcacgcccgtctctgaccgagtgactgctagctagttcctgatccttcgatagcttgtttgtcacacgccaatggagtcgccctgtttccactcattatgctcacctgcaactctgcttccgcatcattagtgtctacaggaagagcacgtcgcaaccttccattttttacgctcagttgcagagtgctccgctgcagagcacacagtgaagctgtgtccgtttccccatcactgtcatcaatgagctacacctcatcttcttcgcccttttctatgcgagctttaatgcccgtttggtggctacgactactgtacgtactcgtttattgccactagcttcttcccccattgaaaaagctttattactacattctgctccgcaaagagagagagtgacctgatcttcccttcaatttggcgtcggtgttaatttggattcctacaagacgttctagcgcgcttctgcggcaggatcaggaggctggtggtcgccggcgcagcgtctgcggggcggcgtccgagggtgactctgcaaggactccccggtggccccgaggcgttcgagctcgtcgcgaggttctgctacaccgacgacggcggacggggcggggcggtgacggcgggcaacgcgtgcgtgctgcggtgcgcggcggagttcctggacatggcggcggcggacgtggccgcggccgaggccgaggccgaggccgcgccgagcctggtgcggatgacggagaaggcgctggaggagatgccgcactggccgtggcacacggtcgtggacgccgtgaagcagtgccagcgcctggtcccgctcgcggactccaccggcgcgttcgacgcggccgtggcggcgctggtgtcccagatggccgtgcccccgccggccggggacgccacgcccacgggctcctcgccggagagcaccgcgttccggttctcgtgcgacaccaagagcagcagcctcagcctgcgcggcgggtcctgcgtcagccgcacctggtggttcgaggacctcgtcgcgctcggccctgccacggtggagcgcgtcgcctcggcgctcgtggccaggggcgccgaccacggcgtcgtcgcccggttcctcttctactacctaaagtgccgcgtcgccggtgcgagcgccgaggagaagaaggcgatgctgcaggcctcggtcgccgtcatggcgaagctggaccgaagcgccgtctcctgcaagggcctcttcggcatcctgaggatcgccgcgccgctgaggctggccgacgcgtgccaggagcggctcgtggccatgatcggccgcaagctggaccacgcgacgctcgataacctgctcgtcccggcgccgcccgggacgggcagcctgtacgacgtgagcctggtgctgaggttcttggccgcgttcctccgcggcggcgccagtgacgagccggcgaggctgaagaaggtgggcaagctcgtggacctgtacctggccgaggtcgctccggacccgtcccttcgcccggccaagttcctggagctcgccaccgcgctgccggctcacgcgagggactgccacgacgcgctgtatcgcgccatcgacgtctatttccaggttcacggccgcctgacggacgaggagaagatgaagatctgcagggggctgagctacgagaagctgtcgcccgagagctgcaagcacctggcgcggaacggcgagttcccgacgagggcggcggtgcaggcgctggcgtcgcagcacacggtgctgaagagcatcgtgctgcgcgagcccgcgggccagctgaagcccgtgtcgctgtcccctcccccgtccacgggtaagcaccgcgacgtcggcggcggcgagaacgacgagggtcaggtggtcctgtacgcggggcggctggacctgtcgctggagaaccagaacctgcggtcgctcctggacgggatgcactggcgggtgatggagctggagaaggtgtgtagccggatgaagacgcagatgagcaagatgaagcagcccaggcgcggaggcggtggcggccgcgccggcaggtcgtcgctccccaggatgtgctcctgatccaccacctcgcctcctcgcgctgccgttattagcgcgcgctttagcggtgaccccgcaacactgtaccatagcgacgatgtacataccgactgccgtgctaggaggaatcagtgaagcgcggcgcggcgcggtgcaggcggcagagcatcgtcctcctccctgcatcttgtcccttttttttttttgcctagcttcctcccgtgtatgatgatgcgtgtatcggttctcggtggtggcaatttgaaaagaagggctggctagcagcgtcagcctgagctgagtggtcctgctggttgaatggatgtggtctatctgaaataataaaaaaaggggtactgtgtggcatgcttcgtgcctgaagaatctcgcaatgctgctacagcagcttgccaggtcgagcatacagtaactgctcgcattcgcaccagtagcgttttgcctcaaaaaaaaaaagctagccaagtac

SEQ ID NO: 217799 - DNA, 2021 bp, Zea Mays
ccaaaaactcgaacctccgtgactgggtcggccacggcaatctcgaaatcaacgagatcggcgaccaacacggagatctcgaacctcaggaaagatccaacacaaccgaggtggaggtggtctcgaggcagcggtgttgaattgacgatgtgtgacatttgggaggaattccgggcggcgctttgcatatccggtggaaaccgccgcccgcccccaaccctccctcccccgaatctcgccggcggcggtgacgaagatggcggtggtgtcgaaagtggcggcggccaggaggagggggacatcatcagtgcgctacccgacgacgtcctcctcttcatcctcagccgcctcccgtccgccgccgccgcgcggaccagcgtcctctccaaccgctggcgcctcctctgggcgcagctcccggtgctgtggttcccgctccccgccgaaccggcccgcgcgctgccctcgcccgctaccgccgcgcggaccagggaccgctcccaccgttggcgccgccgcctcttggcgcatctcccagcgctgcggttcccgctccccgtcggaccggcccgcgcgctgccctcgcttgcctccgctcgcgccgcactcacccaacactcggcaccctcgctctggatcctgaggatagacgctaacgacgcggacccggtggacgcggccgcggtactccgcctcgccgcgccccgcctcaccaacgcgctctttctccgcaacgtggtacccgaggatcggaagaaggccgtagtgatggaagtcattgagctgccctgcttcgacagggctgcacatcttttcctcgacttaggttaccttcgcctcgcatttccaccgtcgggcgtgttcacgaagctcactgtgctagttctgagccacgtccggttccaaggcgccttggacatcggcgacaccttgtcgtcggcccgctgcccttcgctgcgactactccatctcttcgacgcccaaggggtgtccaaccttggcatctgttcggagtctctcgtcagtatggttctgcataacctgaaagggttacagcagctcagggttgtgtcgccaatgctgagagatctgcatatgtttaattgcttcttcaagaggcaaccggtggccagcatcactgctccagtggctgacatcactgctccgattctggaaaagttcgggtggcttgatgaatatgatccgaggtgggtccagctgggtgaattgtcccagctacaggtactggcgatctccttctttgcaggtgcatggtatggattggttgaacatcagtacaaccggggcagtgtgaagttgttgcaacgctttagggagatccgcgatcttcacatcacgatcttctatccaattgctcaaacctaacacttgtaatttcattgcttcacggtaatgaaattcggtcatgctgttgtgaaaaaagatgtgattctttactggagacatctgtgccattactcagcagaacaagtctgaagtagttctgcagcattttataacgtttatcccttaagatcgtttacttccactactgcacggaaggcctgacctcgctgctggctaagaaattacacctgatccttctaacatgtggacatgctattggctcttgtgtgttccatctccttaagatttctactaggataagaagtctgtttctggatatacgtgaatccattaaggaacgagctgcttgttcaccagactgtgcttgtcaccagcagcatgactgggaaagcgaggagctcgtgctgaactctctccaggaactgaacgtttgcggacttagagcaaaccgtgacttcatgtttgtgaaacgactgctgggctggatgggagcgctcaaatcagttaccataatcttcgatcctaaagccactgtccacgaggagctctgcgaggagctactgggcctctctggaccagagacttgcgtgaagatttacctgtatcgcgatggggcaaagaaatatattctaccgttgtacctatttggttga

SEQ ID NO: 217800 - DNA, 5734 bp, Zea Mays
ggcactcacactaccatcgctttccgcgtccgccgttttaacaatcgcattgtcagatctacttcgatctcacttctggttaactgagggcgttcctcgatcggatctcctgctccggctccggctcctgctccagctgaatggataacatgctaggcgacttgtacaagccagatgacggcgacgacttctacagcaaaaaataccgcgacgagctagagaatgtgtcattccaactattagaagaaattacagatggtttctctgagagtcgagagctcggccgaggatcctttggagtggtttacaggggattgactaaaaatggtgattacgttgctgtgaagaagcttcatgctaatgtcactgatcttaaccataagcagtttcaaaatgagttatataaccttgcaaaacttaagcatgaaaacattgtacggatttatggctattgctatgaaattaagaaaacatttatggagcacgatagaagaaaaattcttgtcgaagagccgcgtatagcgctctgccttgagtatttacacaatggaagccttcaagatcatatttcggatgagttttctggtcttgactgggacacacgctacaggattatggaaggggtctgtcgtggtttatatcatatccataggaatctaaagaaacctctttatcatttggacctaaaacctgccaacatattactaagtaaaaccatgcaaccaaagcttgcagattttgggttatctaggatctttcggaatgaagaactaacacgaacgactaaaagtcctctaggaactcttgggtaccagccaccagaatacattgaaagaggtgaagtctcagaaaaattcgacatattcagcttaggtgtcgtaatgatacacctggtttcgggacgtggaggcttcgaaagatatgcatgcatgcatagtgaagaatttatcaatcaggtaaaaacaaactggaggaaaagatttaagcaattacagaggaattccttacgtaaagtcaaagtgtactgccacgaggtagagacatgcactcggatagcactgaattgtgtggagaaagacacacagaaaaggcctgatatagatatggtcatcaataatctaaaggaccgtaagacccatagattcaagagtacttggacaagtagttttcggcaggatggaagaatgtatggaagctatatgccatattcaaacagatatttaaacaaattgatgtcaggctctatttgcaccgaaacaaaattttatcgaagagaaaaattaccgaatgttggagaagaattcattatagggagaaaagaagagaaacagaaaatagtggcatctttactacagagcatgacacaacacatcactatccttcctatctatggcattggaggaattggcaagacaaccattgcaaagttgatttactatgatacaaatttcaatagttactctcgagtatgggtctatgtttcaccgaaatttgacttgaagaaagttggaaacactgtaatttcacaactctctagtgaggagagccaaattaatgaaacacaaatgatacatagttgcctgatgaaattactttctggtaaaaaggttctgattgttttagatgacttgtgggaggatagtttatttcaactgaataatttgaaggatatgctaagttatggtgatagcatcaatgtaatagttatagtaaccacacgcagtaaacatgttgcagagaatgttagcactaatgttgagccacacaagatagaacccttgacagatagcatgtgctgggatataatgaaacaaagaagcaactttgaagctaaaaatcacaaagaacatttggcacatataggaatggagatcgctgtaaagtgtggaggtgtggctttggcagctcaatcccttgggttcatgttgaagcccatggaattatgtgatgaatggattgaagtcagagacagtgacatctggaataaatctatttcgaaggatgccaattcaccaaaccatgtgcttgcatccttgatgttaagttgtaccaaaatggatcgatgcttgatattatgctttatctactgtgcaatctttccaaaaggtcatcatatagtcaaagaagaactaatacaacaatggatttctttgggtttcatccagccaacaaaattacactccaatatgcagatatgtgagaagtatattttgcagctcataggattgtctttcattcaagatacaatgtcaccaaagtattctcaagcatacaaaaaaggcctcacattgttcaccatgcacgatctcgtgcatgatttggcaagattactaacggctggtgaaattctggatgcttccaatattgggactatggatgcgaggcatgttgcccgcgagcctgcaactaggtcattatttcatgggtacatgcatgctaagtcaaactttcgtagcttcatacgtaccaattcaaatatatacacataccggcgacggcgagagccagaaggtagcggacagcaatacaaatatgcattgctcactaattgtcacaagcccctagaggtattgacggattcgcccaatatgataagggcactgcattttcgggattgtcatggctcgaaaggactaaaagattatgcatttttgcctgcaaagttgtccctaaaagttctggatttaagtgggtgcaacatagcctacctgccagcttctatcggtgaattggctgtattgaggtatctcaatgctccagagattaaaaatgaaatgctcccagactctctgagcaaactgtcaaaattaatatacctcaacctaagtgggtccaatatttcagcactgcctgattcaattggtgatatcgaaggtctaatgcatcttgatatatcaaattgtgtgcttttgtgtgagctcccagaatcatttgtggacctaaaaaatctggtatatctagatttatcacattgccagatcaaaattacagcaagagtttttagtggtctcaccaatatccagcatttgaatttatcaaaaagtcttattcatggaggtgacgggttggaggggctgcaggaagccgttggtggtctcaccgaacttcggtatttaaatctatcagggtgctttgaaaatctgaggccagatgaggtattaagttttgttgaccgtatttgtaggcttacaaatctggtgcacttggatttgtctttcaatttgggtcttgtcagtgtgcctgaaagtattggcagcctcaggaagctgcacaccctggatctcttgtgctgccgaaacctagtgacgcttccaaaatgtatgttcaacatggatagcatgaagatgttaaatgttacctgctgtcctcatctagatcagtctacgctcccccgatacaggtattttaccttgccgtactttgaggtccatgctgatgatggcgaatctaccagcaatattggtttgcttcggtatgtgaatcctactcatgagttgtacataagtgggcttgataacacaatatctgcagaagaggttgacagtataaacctaagccaaaaacaggggatccagtcgttgagtctttcatggactagagatgctcagagatctgtggaggacatggaagtcctgggaaagctagtgccacctgatactttaaaatgctttgagctaagaggttatgatagtatgagctttccaacatgggttatgggcatcacgctctatcttcctcgccttaccaaggttgtattgtgggagctgcgtaaatgcaatagtctaccaccactgggccagttaccaacactacaaaagctagttataggaggaatggacagcactttgacagttgatgagggtttctgctgcgccggcccgggagcctttcctctattacaggaacttcaactatgccaaatggagaacctggaagtgtggaacacaacatactcctgtggccagagcaatgaggatgtgcaggaattcatgttcccaaaccttagggaactgttaattcgtgattgccccaagttgagactgaaaccatgcccacctaaaactgtgggatggaagatagagaacagcgacaatgtactgtcgtcatgggatgaggagggagagatcgaccttgcagcattgttcccatcaaggaaagagtttaagaaactttgggaagggaaaacaaaagtgccagcagcttgtagcgcacaatttgaaaaatgcagaaaacctggagcttcctacaatgcttgtcctgaacgcgtggaggtgaaatcgagcaagctgcctttgggaaaatggaggctgttccggcacctccttcccacctatgatttaaggatctcgtgctgcacttatgcgacaagcggctcgtcacaagagatcatccaaggcctcgccttcatcgaatcattatgcctagaagacgatgctcagtctgagcttccgaattggttgggtgagctcacttctcttgaaacgttggagatatcgaagtacccagggctagaggcaccactggatggcatgaagcaactcgcccacctccggaagctgtcgctgataaattgtagaagcatgtcagcactaccgcaatggttgggagaactcatctctctcaaagaactgatcatctcagagtggccaaacctgagcgattttccggagagtatgcagctcctcacctccctcaagatgctacgtttggagcggtgtcccagaattactgcccttccaggatggctgggcgacctcgcttctctcaaaatactagtcatcagcaattgcaagggcatcgtgtctctgccagacagcatacagaagatcaccaggcttgtacgagtataaattgggggagcctgaaacatgctatctgctttgcaactcatttacagtagcctggaagtgatgacagacatatatggaggctttcttctactggtgtttgcacagccaagtcagcttatgggggtttcttcattggagccacggtttttggtccttcggatctaatctggaaatcgtgggccccaaagaaatgtcgttttttcccctatggctggttgctcttgacaaatgttggagtgccgaccgtctagccagacggggtttacaggcagcaccctatgtgttgtttgttttgtgaccaagatgaggaaaccatcaaccatcttctggtttcttgctccttctctcggcaattttggttcgtgctgttacaaatggtgggtcttcaacgcctatctccacagccagacacgtccttcttcctagaatggtggtcaggttctgctgcagtggtggatgagcaatttcagcagggtttctactacatcatcctgcttggtgcttggctcctttggaagcaccgtaaccgatgtgtcttcgatgggattgggatcaaacccgatgtgcagcatgtgttgtccttagccacagaggaaatgagactttgggggctagctggtgcgaagggaattaggatgttgacttgttggcgagtaatcctctagcttgatccaggtcatgtttctttgttctggtcgagatttgtgagtgtgttgtttttctattctttttcttttttctttgtaatctgttttggggttctcagttctctatcccttttcatcttcttaatacaaagatacacagttgtcctgcgtgtttgaaaaaaaaatacttttaaacatagttaatgaactagtacatcaacattcaaaatttagttg

SEQ ID NO: 217801 - DNA, 2258 bp, Zea Mays
catcgctttccgcgtccgccgttttaacaatcgcattgtcagatctacttcgatctcacttctggttaactgagggcgttcctcgatcggatctcctgctccggctccggctcctgctccagctgaatggataacatgctaggcgacttgtacaagccagatgacggcgacgacttctacagcaaaaaataccgcgacgagctagagaatgtgtcattccaactattagaagaaattacagatggtttctctgagagtcgagagctcggccgaggatcctttggagtggtttacaggggattgactaaaaatggtgattacgttgctgtgaagaagcttcatgctaatgtcactgatcttaaccataagcagtttcaaaatgagttatataaccttgcaaaacttaagcatgaaaacattgtacggatttatggctattgctatgaaattaagaaaacatttatggagcacgatagaagaaaaattcttgtcgaagagccgcgtatagcgctctgccttgagtatttacacaatggaagccttcaagatcatatttcggatgagttttctggtcttgactgggacacacgctacaggattatggaaggggtctgtcgtggtttatatcatatccataggaatctaaagaaacctctttatcatttggacctaaaacctgccaacatattactaagtaaaaccatgcaaccaaagcttgcagattttgggttatctaggatctttcggaatgaagaactaacacgaacgactaaaagtcctctaggaactctgtaagttgaatgccacagccaccagaatacattgaaagaggtgaagtctcagaaaaattcgacatattcagcttaggtgtcgtaatgatacacctggtttcgggacgtggaggcttcgaaagatatgcatgcatgcatagtgaagaatttatcaatcaggtaaaaacaaactggaggaaaagatttaagcaattacagaggaattccttacgtaaagtcaaagtgtactgccacgaggtagagacatgcactcggatagcactgaattgtgtggagaaagacacacagaaaaggcctgatatagatatggtcatcaataatctaaaggaccgtaagacccatagattcaagagtacttggacaagtagttttcggcaggatggaagaatgtatggaagctatatgccatattcaaacagatatttaaacaaattgatgtcaggctctatttgcaccgaaacaaaattttatcgaagagaaaaattaccgaatgttggagaagaattcattatagggagaaaagaagagaaacagaaaatagtggcatctttactacagagcatgacacaacacatcactatccttcctatctatggcattggaggaattggcaagacaaccattgcaaagttgatttactatgatacaaatttcaatagttactctcgagtatgggtctatgtttcaccgaaatttgacttgaagaaagttggaaacactgtaatttcacaactctctagtgaggagagccaaattaatgaaacacaaatgatacatagttgcctgatgaaattactttctggtaaaaaggttctgattgttttagatgacttgtgggaggatagtttatttcaactgaataatttgaaggatatgctaagttatggtgatagcatcaatgtaatagttatagtaaccacacgcagtaaacatgttgcagagaatgttagcactaatgttgagccacacaagatagaacccttgacagatagcatgtgctgggatataatgaaacaaagaagcaactttgaagctaaaaatcacaaagaacatttggcacatataggaatggagatcgctgtaaagtgtggaggtgtggctttggcagctcaatcccttgggttcatgttgaagcccatggaattatgtgatgaatggattgaagtcagagacagtgacatctggaataaatctatttcgaaggatgccaattcaccaaaccatgtgcttgcatccttgatgttaagttgtaccaaaatggatcgatgcttgatattatgctttatctactgtgcaatctttccaaaaggtcatcatatagtcaaagaagaactaatacaacaatggatttctttgggtttcatccagccaacaaaattacactccaatatgcagatatgtgagaagtatattttgcagctcataggattgtctttcattcaagatacaatgtcaccaaagtcatga

SEQ ID NO: 217802 - DNA, 1987 bp, Zea Mays
atgatggtcctcacctcagttgccaccacctcgttcgccattctacttcttttctctctcccctcatgcctccacctccgcgccaccccattctcggcagagggcgtaggagcatgcgcctcctccccgtattcgttcgacaccagccctgacaccgactcgcgcagtggctattgcacgtccacgaggacgtttcacatcatgcgcgcaccatcgttttcgccgtcgtcggacgtcccgttcgtcttcccggccttcgccacgttcttcctccccaacctgctgcccccacccacggtcgcaaccgcgagccgaccgacgctcgtcgacgcagggaaagtgaaaaatcgctttcgcacaagtcgcggaacagaggcaagcgctgtgccacacagcgggagtcctccccgactccccgagagatttgctgcccagagccttcgaatcgggttcaatcccgtcgatctttctgcccgccgccgccacgggactccagaagttgccttcgattcggccggggccgtggaagcggggatggggctcggagaggcggcggggcggctcctggcggccgtggactgggagcgcgaggcctaccctgcgtacgacgacttcctcgcgctccccgccttcgttctcttcttccctaccgtccgcttcctcctcgaccgcttcgtcttcaagtgggttgcaatgaggcttatacatgggcagggacatcagagagctaataatgacacagaagaggcaaggaagaagataagaaaattcaaggaatcagcttggaaatgtgtttatttcctgtctggagagcttttatctttgtctgtcacatataatgagccttggttcaccaataccagatatttttgggtaggaccaggagaacagattgaaacttaaggctgtatatatgtatgctgctggattctacacatattccatatttgcacttatgttttgggaaacaaggcgttcagactttggagtgtcaatgtcacatcatgttgctactgttgttctgattgttctatcttacgtgttcagatttgctagagttggctctatagtattggcaattcatgatgcaagtgacgttttcctggaagtagggaagatgtccaagtacagccattgtgattggcttgccaatgtttcgtttctgttttttgttatttcatgggttcttctccgtctcacatattttccgttctggattctgagaagtacaagctatgaggtcttgttgactttggacaaaaagaagcacaactttgatggtcctatatactattatgtgttcaattcccttctattttcactacttgttctccacatatattggtgggttttaatatatcggatgcttgtgagacaaatcaagacaagaaatgttggagatgatgttcgatctgattctgaaggagaagacgaccatgaagattgattgggggcatcatcttactttgtgtgttataacggtgcttatacattcttttgctggattccaacagattatgagaggacgagcattgttcctcacgagattcaccgaagccgggctatgggttagttgtgtcttggctgccaatttgtgctgtactaagtatgcattagaaacaacgctgcaatgcattagaaaaaaagctggaactggatgtcgaatataacattcttttcagtgttcacacaaagtgcagcggtaaatgtagcaccaatttaggggccgttcgtctctttcggaatggaggcatggaacaattcctagccggttaagttttgatcagctgaaatgattcctgatctattcctggacaaacgaacaaggccttagcattccggaaacaaaaggaccggttgtaaatcaaagcctttctgccgacataccatgtacattatgtttgccaggatgacaccgcttggagttttgtgaacggtagcgctggccgccggtgaaacgcttctcttgagctcctgttgttccata

SEQ ID NO: 217803 - DNA, 1841 bp, Zea Mays
ccaagagttggattcccttcagcttggtaccacaatcatatttgcagttttctgctggtgggattgtcaaaataccgaagtttgagatgatgatgtctaaaagtgaagcaaacaacaagcctgttctagctgcagatgatgtttacattgtaacagtctatggtaggatttattgcttgcagcttgacagagttagtatgtcattgaatctatatcgcttttaccgtgatgctgttgtacaacagtgtactctgccaacatactcaagcagaattgcagttagtgccgttgacaacataattatggttcaccaaatagatgcaaaagtagtcatgctttacgatgtgtccctggattcttatgccccagtttctgcaccacttccactgctattgagaggactgcccatcaatagtagacaagtatctcagactgcggatagccagtctagtgcatacggtggaaccatctatggagaaggttggaacttcctcattccagacctcatctgtgatgctgagaatgggctcttatggaagctccatttagatctggcggctattgctgctagtagttctgatgctccttcaattttggaattccttcagagacgaaagtctgacccaagcatggttaagactctatgcctagctatagttcggacaatcatcctggaaaggaggtcagtgcccacagttgctaaggcgatggatgttgtccttgattcctacacgcgtttgatgaaaatgggaggggcttttcctggggttaggcgaatacatgagcaaaatcagcagtcaggtagtcagcctattgatggctcccatgtggtttctcaggaatccagtcctggaacaacagttagtcctgctgtgaacccagaccacggaagtgaggctgtggatatatatgtgcagtcaaatccaggagttgagcatacaatagacaggggattactaaatataaacatatcttctgattctgtggacaatacatctgatgctgtcgacaaacgacagcaagctgtaggcgaagctagccgaccattgtcttcaggcacaatgacgcaacatggacaacatgctggaaccgtggcaatttctccaattgagatgttccagtctgtctttacacttgttgaagatgaaatgatgggtgatcctgcatatcttattgctgtcatcatagagtttctacggagtgtctcaaaggctgggcttaaggctcctcacaacctttatgtgatgacggcgacactactagctcgtagcaaccgttacgctgaaatagcattgtttgtgtcaaacaagattcttgagccgtgtaaagaactggcaatgcaacttatggagctgggtctgcagcacccgccaacgaggaagctgggcatggacatgctgagggagcgaggcctgcatcacgactacgtgactgcgatgctgcaagatgggtactacttggaggccctgcgctatgccagaaaatacaaggtgatcaccgtgcagcctgccctatttctggagaaagccctggcgaagaacagcgcccacaacctggctgcagtgctgagcttcttctgcgagttcactccgagcttcaaggccacatcggactttgtcagataccggcatattctgtctgaaatggtttgaacagctttccgttgtgcaaacttgttgtcccgaaatgacttggcacgtcctctgtaacaagcaacgtcacctcggagggtacttttatttaattcttttggtccctcttgcagaaaataatattttattgttgtgaataaaaaaacgttgcaattaccgatgaaaaacaagtctggcttgaggctaaga

SEQ ID NO: 217804 - DNA, 2633 bp, Zea Mays
aggcaaaagattatgggagatgcatagcagcaaaggtccctgagattgaacataatatgtgttccaaggagtttctagcactcagagcatgcatgcagactgtgaacaaggcttgaggctccatatttataggaagtttgatactaatctcttttggtaattgctgcggatttttgatccttttctatttttcagtcatcttaaaaagtagaacctcattttcttggctaaacaatcagtagagcctaagcacgcaagagacaaagaaaatgttgggcaatcagatacaagggggcttgggcacatctggggcactgtctcatgcttatgttcagcatcctccgctgcgatgtgacataccagacactcagggtctgttctatgatgatgcaaataagttccttatagctccaactgctgatcggatattgtactggaaaacaattctacctactccatctggacctccaaactctgatccagttaatgaaggacctgtcttgtcagttcgatattcgctggatcataaagttattgggattcaacgatccagacatgaaattgagtttagaaatagggaaacaggggagacttgtagcaaaaagtgcagagctgattcagaaactgtacttggctttttctggacagattgcccaacatgtgatgttatacttgtaaaaacaagtggtcttgatcttcttgcctacgagcctcagccccatgcttttcacttggtggaatcgaagaagttcaatgtgagctggtatctttacacacatgaaagtaggctgattctacttgcttctggaatgcaatgcacgatgtttactggctatcagttttctgctggtgggattgtcaaaataccgaagtttgagatgatgatgtctaaaagtgaagcaaacaacaagcctgttctagctgcagatgatgtttacattgtaacagtctatggtaggatttattgcttgcagcttgacagagttagtatgtcattgaatctatatcgcttttaccgtgatgctgttgtacaacagtgtactctgccaacatactcaagcagaattgcagttagtgccgttgacaacataattatggttcaccaaatagatgcaaaagtagtcatgctttacgatgtgtccctggattcttatgccccagtttctgcaccacttccactgctattgagaggactgcccatcaatagtagacaagtatctcagactgcggatagccagtctagtgcatacggtggaaccatctatggagaaggttggaacttcctcattccagacctcatctgtgatgctgagaatgggctcttatggaagctccatttagatctggcggctattgctgctagtagttctgatgctccttcaattttggaattccttcagagacgaaagtctgacccaagcatggttaagactctatgcctagctatagttcggacaatcatcctggaaaggaggtcagtgcccacagttgctaaggcgatggatgttgtccttgattcctacacgcgtttgatgaaaatgggaggggcttttcctggggttaggcgaatacatgagcaaaatcagcagtcaggtagtcagcctattgatggctcccatgtggtttctcaggaatccagtcctggaacaacagttagtcctgctgtgaacccagaccacggaagtgaggctgtggatatatatgtgcagtcaaatccaggagttgagcatacaatagacaggggattactaaatataaacatatcttctgattctgtggacaatacatctgatgctgtcgacaaacgacagcaagctgtaggcgaagctagccgaccattgtcttcaggcacaatgacgcaacatggacaacatgctggaaccgtggcaatttctccaattgagatgttccagtctgtctttacacttgttgaagatgaaatgatgggtgatcctgcatatcttattgctgtcatcatagagtttctacggagtgtctcaaaggctgggcttaaggctcctcacaacctttatgtgatgacggcgacactactagctcgtagcaaccgttacgctgaaatagcattgtttgtgtcaaacaagattcttgagccgtgtaaagaactggcaatgcaacttatggagctgggtctgcagcacccgccaacgaggaagctgggcatggacatgctgagggagcgaggcctgcatcacgactacgtgactgcgatgctgcaagatgggtactacttggaggccctgcgctatgccagaaaatacaaggtgatcaccgtgcagcctgccctatttctggagaaagccctggcgaagaacagcgcccacaacctggctgcagtgctgagcttcttctgcgagttcactccgagcttcaaggccacatcggactttgtcagataccggcatattctgtctgaaatggtttgaacagctttccgttgtgcaaacttgttgtcccgaaatgacttggcacgtcctctgtaacaagcaacgtcacctcggagggtacttttatttaattcttttggtccctcttgcagaaaataatattttattgttgtgaataaaaaaacgttgcaattaccgatgaaaaacaagtctggcttgaggctaaga

SEQ ID NO: 217805 - DNA, 2614 bp, Zea Mays
aggcaaaagattatgggagatgcatagcagcaaaggtccctgagattgaacataatatgtgttccaaggagtttctagcactcagagcatgcatgcagactgtgaacaaggcttgaggctccatatttataggaagtttgatactaatctcttttggtaattgctgcggatttttgtcatcttaaaaagtagaacctcattttcttggctaaacaatcagtagagcctaagcacgcaagagacaaagaaaatgttgggcaatcagatacaagggggcttgggcacatctggggcactgtctcatgcttatgttcagcatcctccgctgcgatgtgacataccagacactcagggtctgttctatgatgatgcaaataagttccttatagctccaactgctgatcggatattgtactggaaaacaattctacctactccatctggacctccaaactctgatccagttaatgaaggacctgtcttgtcagttcgatattcgctggatcataaagttattgggattcaacgatccagacatgaaattgagtttagaaatagggaaacaggggagacttgtagcaaaaagtgcagagctgattcagaaactgtacttggctttttctggacagattgcccaacatgtgatgttatacttgtaaaaacaagtggtcttgatcttcttgcctacgagcctcagccccatgcttttcacttggtggaatcgaagaagttcaatgtgagctggtatctttacacacatgaaagtaggctgattctacttgcttctggaatgcaatgcacgatgtttactggctatcagttttctgctggtgggattgtcaaaataccgaagtttgagatgatgatgtctaaaagtgaagcaaacaacaagcctgttctagctgcagatgatgtttacattgtaacagtctatggtaggatttattgcttgcagcttgacagagttagtatgtcattgaatctatatcgcttttaccgtgatgctgttgtacaacagtgtactctgccaacatactcaagcagaattgcagttagtgccgttgacaacataattatggttcaccaaatagatgcaaaagtagtcatgctttacgatgtgtccctggattcttatgccccagtttctgcaccacttccactgctattgagaggactgcccatcaatagtagacaagtatctcagactgcggatagccagtctagtgcatacggtggaaccatctatggagaaggttggaacttcctcattccagacctcatctgtgatgctgagaatgggctcttatggaagctccatttagatctggcggctattgctgctagtagttctgatgctccttcaattttggaattccttcagagacgaaagtctgacccaagcatggttaagactctatgcctagctatagttcggacaatcatcctggaaaggaggtcagtgcccacagttgctaaggcgatggatgttgtccttgattcctacacgcgtttgatgaaaatgggaggggcttttcctggggttaggcgaatacatgagcaaaatcagcagtcaggtagtcagcctattgatggctcccatgtggtttctcaggaatccagtcctggaacaacagttagtcctgctgtgaacccagaccacggaagtgaggctgtggatatatatgtgcagtcaaatccaggagttgagcatacaatagacaggggattactaaatataaacatatcttctgattctgtggacaatacatctgatgctgtcgacaaacgacagcaagctgtaggcgaagctagccgaccattgtcttcaggcacaatgacgcaacatggacaacatgctggaaccgtggcaatttctccaattgagatgttccagtctgtctttacacttgttgaagatgaaatgatgggtgatcctgcatatcttattgctgtcatcatagagtttctacggagtgtctcaaaggctgggcttaaggctcctcacaacctttatgtgatgacggcgacactactagctcgtagcaaccgttacgctgaaatagcattgtttgtgtcaaacaagattcttgagccgtgtaaagaactggcaatgcaacttatggagctgggtctgcagcacccgccaacgaggaagctgggcatggacatgctgagggagcgaggcctgcatcacgactacgtgactgcgatgctgcaagatgggtactacttggaggccctgcgctatgccagaaaatacaaggtgatcaccgtgcagcctgccctatttctggagaaagccctggcgaagaacagcgcccacaacctggctgcagtgctgagcttcttctgcgagttcactccgagcttcaaggccacatcggactttgtcagataccggcatattctgtctgaaatggtttgaacagctttccgttgtgcaaacttgttgtcccgaaatgacttggcacgtcctctgtaacaagcaacgtcacctcggagggtacttttatttaattcttttggtccctcttgcagaaaataatattttattgttgtgaataaaaaaacgttgcaattaccgatgaaaaacaagtctggcttgaggctaaga

SEQ ID NO: 217806 - DNA, 2603 bp, Zea Mays
aggcaaaagattatgggagatgcatagcagcaaaggtccctgagattgaacataatatgtgttccaaggagtttctagcactcagagcatgcatgcagactgtggttaagaacaaggcttgaggctccatatttataggaagtttgatactaatctcttttggtaattgctgcggatttttgtcatcttaaaaagtagaacctcattttcttggctaaacaatcagtagagcctaagcacgcaagagacaaagaaaatgttgggcaatcagatacaagggggcttgggcacatctggggcactgtctcatgcttatgttcagcatcctccgctgcgatgtgacataccagacactcagggtctgttctatgatgatgcaaataagttccttatagctccaactgctgatcggatattgtactggaaaacaattctacctactccatctggacctccaaactctgatccagttaatgaaggacctgtcttgtcagttcgatattcgctggatcataaagttattgggattcaacgatccagacatgaaattgagtttagaaatagggaaacaggggagacttgtagcaaaaagtgcagagctgattcagaaactgtacttggctttttctggacagattgcccaacatgtgatgttatacttgtaaaaacaagtggtcttgatcttcttgcctacgagcctcagccccatgcttttcacttggtggaatcgaagaagttcaatgtgagctggtatctttacacacatgaaagtaggctgattctacttgcttctggaatgcaatgcacgatgtttactggctatcagttttctgctggtgggattgtcaaaataccgaagtttgagatgatgatgtctaaaagtgaagcaaacaacaagcctgttctagctgcagatgatgtttacattgtaacactatggtaggatttattgcttgcagcttgacagagttagtatgtcattgaatctatatcgcttttaccgtgatgctgttgtacaacagtgtactctgccaacatactcaagcagaattgcagttagtgccgttgacaacataattatggttcaccaaatagatgcaaaagtagtcatgctttacgatgtgtccctggattcttatgccccagtttctgcaccacttccactgctattgagaggactgcccatcaatagtagacaagtatctcagactgcggatagccagtctagtgcatacggtggaaccatctatggagaaggttggaacttcctcattccagacctcatctgtgatgctgagaatgggctcttatggaagctccatttagatctggcggctattgctgctagtagttctgatgctccttcaattttggaattccttcagagacgaaagtctgacccaagcatggttaagactctatgcctagctatagttcggacaatcatcctggaaaggaggtcagtgcccacagttgctaaggcgatggatgttgtccttgattcctacacgcgtttgatgaaaatgggaggggcttttcctggggttaggcgaatacatgagcaaaatcagcagtcaggtagtcagcctattgatggctcccatgtggtttctcaggaatccagtcctggaacaacagttagtcctgctgtgaacccagaccacggaagtgaggctgtggatatatatgtgcagtcaaatccaggagttgagcatacaatagacaggggattactaaatataaacatatcttctgattctgtggacaatacatctgatgctgtcgacaaacgacagcaagctgtaggcgaagctagccgaccattgtcttcaggcacaatgacgcaacatggacaacatgctggaaccgtggcaatttctccaattgagatgttccagtctgtctttacacttgttgaagatgaaatgatgggtgatcctgcatatcttattgctgtcatcatagagtttctacggagtgtctcaaaggctgggcttaaggctcctcacaacctttatgtgatgacggcgacactactagctcgtagcaaccgttacgctgaaatagcattgtttgtgtcaaacaagattcttgagccgtgtaaagaactggcaatgcaacttatggagctgggtctgcagcacccgccaacgaggaagctgggcatggacatgctgagggagcgaggcctgcatcacgactacgtgactgcgatgctgcaagatgggtactacttggaggccctgcgctatgccagaaaatacaagcctgccctatttctggagaaagccctggcgaagaacagcgcccacaacctggctgcagtgctgagcttcttctgcgagttcactccgagcttcaaggccacatcggactttgtcagataccggcatattctgtctgaaatggtttgaacagctttccgttgtgcaaacttgttgtcccgaaatgacttggcacgtcctctgtaacaagcaacgtcacctcggagggtacttttatttaattcttttggtccctcttgcagaaaataatattttattgttgtgaataaaaaaacgttgcaattaccgatgaaaaacaagtctggcttgaggctaaga

SEQ ID NO: 217807 - DNA, 2836 bp, Zea Mays
tacaaaagcattctacctgacaagtgtcagttatttacatgcttttaagtattgaatcatgttacatttccctgtttgagtgatagcatacagaaaatttgctacctatggttgtgtgcttttatgaagaatacctgttttcaagaaatctagtgccaccttgcctggtccttgctctacttatggtgcacttgttcttgttttgttatgtactgtaggcaaaagattatgggagatgcatagcagcaaaggtccctgagattgaacataatatgtgttccaaggagtttctagcactcagagcatgcatgcagactgtggttaagaacaaggcttgaggctccatatttataggaagtttgatactaatctcttttggtaattgctgcggatttttgtcatcttaaaaagtagaacctcattttcttggctaaacaatcagtagagcctaagcacgcaagagacaaagaaaatgttgggcaatcagatacaagggggcttgggcacatctggggcactgtctcatgcttatgttcagcatcctccgctgcgatgtgacataccagacactcagggtctgttctatgatgatgcaaataagttccttatagctccaactgctgatcggatattgtactggaaaacaattctacctactccatctggacctccaaactctgatccagttaatgaaggacctgtcttgtcagttcgatattcgctggatcataaagttattgggattcaacgatccagacatgaaattgagtttagaaatagggaaacaggggagacttgtagcaaaaagtgcagagctgattcagaaactgtacttggctttttctggacagattgcccaacatgtgatgttatacttgtaaaaacaagtggtcttgatcttcttgcctacgagcctcagccccatgcttttcacttggtggaatcgaagaagttcaatgtgagctggtatctttacacacatgaaagtaggctgattctacttgcttctggaatgcaatgcacgatgtttactggctatcagttttctgctggtgggattgtcaaaataccgaagtttgagatgatgatgtctaaaagtgaagcaaacaacaagcctgttctagctgcagatgatgtttacattgtaacagtctatggtaggatttattgcttgcagcttgacagagttagtatgtcattgaatctatatcgcttttaccgtgatgctgttgtacaacagtgtactctgccaacatactcaagcagaattgcagttagtgccgttgacaacataattatggttcaccaaatagatgcaaaagtagtcatgctttacgatgtgtccctggattcttatgccccagtttctgcaccacttccactgctattgagaggactgcccatcaatagtagacaagtatctcagactgcggatagccagtctagtgcatacggtggaaccatctatggagaaggttggaacttcctcattccagacctcatctgtgatgctgagaatgggctcttatggaagctccatttagatctggcggctattgctgctagtagttctgatgctccttcaattttggaattccttcagagacgaaagtctgacccaagcatggttaagactctatgcctagctatagttcggacaatcatcctggaaaggaggtcagtgcccacagttgctaaggcgatggatgttgtccttgattcctacacgcgtttgatgaaaatgggaggggcttttcctggggttaggcgaatacatgagcaaaatcagcagtcaggtagtcagcctattgatggctcccatgtggtttctcaggaatccagtcctggaacaacagttagtcctgctgtgaacccagaccacggaagtgaggctgtggatatatatgtgcagtcaaatccaggagttgagcatacaatagacaggggattactaaatataaacatatcttctgattctgtggacaatacatctgatgctgtcgacaaacgacagcaagctgtaggcgaagctagccgaccattgtcttcaggcacaatgacgcaacatggacaacatgctggaaccgtggcaatttctccaattgagatgttccagtctgtctttacacttgttgaagatgaaatgatgggtgatcctgcatatcttattgctgtcatcatagagtttctacggagtgtctcaaaggctgggcttaaggctcctcacaacctttatgtgatgacggcgacactactagctcgtagcaaccgttacgctgaaatagcattgtttgtgtcaaacaagattcttgagccgtgtaaagaactggcaatgcaacttatggagctgggtctgcagcacccgccaacgaggaagctgggcatggacatgctgagggagcgaggcctgcatcacgactacgtgactgcgatgctgcaagatgggtactacttggaggccctgcgctatgccagaaaatacaaggtgatcaccgtgcagcctgccctatttctggagaaagccctggcgaagaacagcgcccacaacctggctgcagtgctgagcttcttctgcgagttcactccgagcttcaaggccacatcggactttgtcagataccggcatattctgtctgaaatggtttgaacagctttccgttgtgcaaacttgttgtcccgaaatgacttggcacgtcctctgtaacaagcaacgtcacctcggagggtacttttatttaattcttttggtccctcttgcagaaaataatattttattgttgtgaataaaaaaacgttgcaattaccgatgaaaaacaagtctggcttgaggctaaga

SEQ ID NO: 217808 - DNA, 2903 bp, Zea Mays
atctgcgatgttaacctatttagtggctcaatctgaaatgtgactaactacaaaagcattctacctgacaagtgtcagttatttacatgcttttaagtattgaatcatgttacatttccctgtttgagtgatagcatacagaaaatttgctacctatggttgtgtgcttttatgaagaatacctgttttcaagaaatctagtgccaccttgcctggtccttgctctacttatggtgcacttgttcttgttttgttatgtactgtaggcaaaagattatgggagatgcatagcagcaaaggtccctgagattgaacataatatgtgttccaaggagtttctagcactcagagcatgcatgcagactgtggttaagaacaaggcttgaggctccatatttataggaagtttgatactaatctcttttggtaattgctgcggatttttgatccttttctatttttcagtcatcttaaaaagtagaacctcattttcttggctaaacaatcagtagagcctaagcacgcaagagacaaagaaaatgttgggcaatcagatacaagggggcttgggcacatctggggcactgtctcatgcttatgttcagcatcctccgctgcgatgtgacataccagacactcagggtctgttctatgatgatgcaaataagttccttatagctccaactgctgatcggatattgtactggaaaacaattctacctactccatctggacctccaaactctgatccagttaatgaaggacctgtcttgtcagttcgatattcgctggatcataaagttattgggattcaacgatccagacatgaaattgagtttagaaatagggaaacaggggagacttgtagcaaaaagtgcagagctgattcagaaactgtacttggctttttctggacagattgcccaacatgtgatgttatacttgtaaaaacaagtggtcttgatcttcttgcctacgagcctcagccccatgcttttcacttggtggaatcgaagaagttcaatgtgagctggtatctttacacacatgaaagtaggctgattctacttgcttctggaatgcaatgcacgatgtttactggctatcagttttctgctggtgggattgtcaaaataccgaagtttgagatgatgatgtctaaaagtgaagcaaacaacaagcctgttctagctgcagatgatgtttacattgtaacagtctatggtaggatttattgcttgcagcttgacagagttagtatgtcattgaatctatatcgcttttaccgtgatgctgttgtacaacagtgtactctgccaacatactcaagcagaattgcagttagtgccgttgacaacataattatggttcaccaaatagatgcaaaagtagtcatgctttacgatgtgtccctggattcttatgccccagtttctgcaccacttccactgctattgagaggactgcccatcaatagtagacaagtatctcagactgcggatagccagtctagtgcatacggtggaaccatctatggagaaggttggaacttcctcattccagacctcatctgtgatgctgagaatgggctcttatggaagctccatttagatctggcggctattgctgctagtagttctgatgctccttcaattttggaattccttcagagacgaaagtctgacccaagcatggttaagactctatgcctagctatagttcggacaatcatcctggaaaggaggtcagtgcccacagttgctaaggcgatggatgttgtccttgattcctacacgcgtttgatgaaaatgggaggggcttttcctggggttaggcgaatacatgagcaaaatcagcagtcaggtagtcagcctattgatggctcccatgtggtttctcaggaatccagtcctggaacaacagttagtcctgctgtgaacccagaccacggaagtgaggctgtggatatatatgtgcagtcaaatccaggagttgagcatacaatagacaggggattactaaatataaacatatcttctgattctgtggacaatacatctgatgctgtcgacaaacgacagcaagctgtaggcgaagctagccgaccattgtcttcaggcacaatgacgcaacatggacaacatgctggaaccgtggcaatttctccaattgagatgttccagtctgtctttacacttgttgaagatgaaatgatgggtgatcctgcatatcttattgctgtcatcatagagtttctacggagtgtctcaaaggctgggcttaaggctcctcacaacctttatgtgatgacggcgacactactagctcgtagcaaccgttacgctgaaatagcattgtttgtgtcaaacaagattcttgagccgtgtaaagaactggcaatgcaacttatggagctgggtctgcagcacccgccaacgaggaagctgggcatggacatgctgagggagcgaggcctgcatcacgactacgtgactgcgatgctgcaagatgggtactacttggaggccctgcgctatgccagaaaatacaaggtgatcaccgtgcagcctgccctatttctggagaaagccctggcgaagaacagcgcccacaacctggctgcagtgctgagcttcttctgcgagttcactccgagcttcaaggccacatcggactttgtcagataccggcatattctgtctgaaatggtttgaacagctttccgttgtgcaaacttgttgtcccgaaatgacttggcacgtcctctgtaacaagcaacgtcacctcggagggtacttttatttaattcttttggtccctcttgcagaaaataatattttattgttgtgaataaaaaaacgttgcaattaccgatgaaaaacaagtctggcttgaggctaaga

SEQ ID NO: 217809 - DNA, 2628 bp, Zea Mays
ctctccctctcgctcgctcgctcctcactccccctataaaagccgccgcggcctcctcctcctccctccgcaagaatccagcgagccaacaaggcaacaacaaacacctccctccttcttcacttccctgccgttgttgcaggaagcaagcgagggcacacaaaccgacaaggccgcccacgcgcgcgtcggccgccgccgttgccgaccagcaggcaggcagcatggtcgtgaacaacaaggtggacagcctgtcgtacgacgtcgaggcgccgccgccctctgccgccggcgccgccgcggggcaagcgccaccgccggcgtcgccagctccggcgccggcaccggcaacccacgcgcccgtgacgcgggaaggcggcgcggcgtcggtgctggagctgcacaaggtgtcgctgccggagcggcggacgacggcgaaggcgctgcggcagcgcctggccgaggtgttcttcccggacgacccgctgcaccagttcaagaaccagtcgtcggcgcggcgcctcgtgctggcgctgcactacttcttccccatcttccagtgggggtccgcctacagcccgcgcctcctgcgctccgacctcgtcgccggcctcaccattgccagcctcgccatcccgcagattccagcttcgtgccgccgctcatctacgcgctgctggggagctcgcgggacctggcggtggggccggtgtccatcgcgtcgctggtgatggggtccatgctccgggacgccgtgtcgccggacgagcagccgctcctctacctgcagctggccttcaccgccaccttcttcgccggcgtcttccaggcgtccctgggattcctcaggctgggcttcatcgtggacttcctgtccaaggcgacgctgacgggcttcatgggcggcgccgccgtcatcgtgtcgctgcagcagctcaagggcctgctcggcatctcccacttcacctcccacatgggattcctcgacgtcatgcgctccgtcgtcaaccgccacgacgagtggaagtggcagacgatcgtcatgggctccgccttcctcgccatcctcctcctcacgcgccaaatcagcgccaggaatccaaagcttttctgggtatcagcaggtgctcccctggcgtcggtgatcatctccaccatcctctccttcatctggaaatcccccagcatcagtgttatcggcatcctccccaggggagtgaaccctccttcggcgaacatgctcagcttcagcggctcctacgtggcgctgacgatcaaaaccgggatcatgacaggcatcctgtccttaacagaagggatcgcagtgggcaggacctttgcgtccatcaacaactaccaggtggacgggaacaaggagatgatggcgatcgggctgatgaacatggcgggctcctgcgcctcctgctacgtgacgacggggtccttctcccggtcggcggtgaactacagcgcgggctgcaggacggcgttgtccaacgtcgtgatggcggcggcggtgctggtgacgctgctgttcctcatgccgctgttccactacaccccgaacgtgatcctggcggcgatcatcatcacggcggtggtggggctggtggacgtgcgcggcgccgccaggctgtggaaggtggacaagctggacttcctggcgtgcgtggcggcgttcctcggcgtgctgctggtgtccgtgcagacgggcctgggcgtcgccgtcggcatctcgctcttcaaggtcctgctgcaggtcacccgccccaacgtcgtggtggagggcctcgtcccggggacgcagagctaccgcagcgtggcgcagtaccgcgaggccgtccgcgtgccgggcttcctcgtcgtcggcgtcgagtccgccgtctacttcgccaactccatgtacctggtggagcgggtcatgcgctacctccgcgacgaggaggagcgcgcgctcaagtccaaccacccctccatccgatgcgtcgtcctcgacatgggcgccgtcgcggcgatcgacaccagcggtctagacgcgctgtccgagctcaagaaagtcctggacaaaagaaacatcgagctggtgcttgccaacccggtggggtcggtggcggagaggatgttcaactcggcggtgggcgagagcttcgggtcgggccgcctcttcttcagcgtagcggaggccgtcgcggcgggggcgtgcaaagcggcgcagccctgacgacgacgacaggctgatccctgaggtgccgcacgggagcatgcataggaataggatgggtcagagacagactaccggtgctgctagtggtagtagggcaggacgacgtacgaataacatggtgatggcctctcttcctccactccgatgcgatgcgagtgtgcgacgcaggggaggggagaagagtttttgaaggatgtgaccagttgctgttgtagttgttgtcaagtacgtagtaatgaaacgagaattgctgcgtggcaattcaggcctgttttttctttttgcatcaaggaaaaataagtgctggtacagatgagattattttaactagaaccaagttacttgccagtaaaataagaagcttccatataaacttgaaacaaaagaaaaaggagacacgattc

SEQ ID NO: 217810 - DNA, 2670 bp, Zea Mays
ctctccctctcgctcgctcgctcctcactccccctataaaagccgccgcggcctcctcctcctccctccgcaagaatccagcgagccaacaaggcaacaacaaacacctccctccttcttcacttccctgccgttgttgcaggaagcaagcgagggcacacaaaccgacaaggccgcccacgcgcgcgtcggccgccgccgttgccgaccagcaggcaggcagcatggtcgtgaacaacaaggtggacagcctgtcgtacgacgtcgaggcgccgccgccctctgccgccggcgccgccgcggggcaagcgccaccgccggcgtcgccagctccggcgccggcaccggcaacccacgcgcccgtgacgcgggaaggcggcgcggcgtcggtgctggagctgcacaaggtgtcgctgccggagcggcggacgacggcgaaggcgctgcggcagcgcctggccgaggtgttcttcccggacgacccgctgcaccagttcaagaaccagtcgtcggcgcggcgcctcgtgctggcgctgcactacttcttccccatcttccagtgggggtccgcctacagcccgcgcctcctgcgctccgacctcgtcgccggcctcaccattgccagcctcgccatcccgcagggaatcagctacgccaagctcgccaacctgccgccaatcgttggcctatcttcgtgccgccgctcatctacgcgctgctggggagctcgcgggacctggcggtggggccggtgtccatcgcgtcgctggtgatggggtccatgctccgggacgccgtgtcgccggacgagcagccgctcctctacctgcagctggccttcaccgccaccttcttcgccggcgtcttccaggcgtccctgggattcctcaggctgggcttcatcgtggacttcctgtccaaggcgacgctgacgggcttcatgggcggcgccgccgtcatcgtgtcgctgcagcagctcaagggcctgctcggcatctcccacttcacctcccacatgggattcctcgacgtcatgcgctccgtcgtcaaccgccacgacgagtggaagtggcagacgatcgtcatgggctccgccttcctcgccatcctcctcctcacgcgccaaatcagcgccaggaatccaaagcttttctgggtatcagcaggtgctcccctggcgtcggtgatcatctccaccatcctctccttcatctggaaatcccccagcatcagtgttatcggcatcctccccaggggagtgaaccctccttcggcgaacatgctcagcttcagcggctcctacgtggcgctgacgatcaaaaccgggatcatgacaggcatcctgtccttaacagaagggatcgcagtgggcaggacctttgcgtccatcaacaactaccaggtggacgggaacaaggagatgatggcgatcgggctgatgaacatggcgggctcctgcgcctcctgctacgtgacgacggggtccttctcccggtcggcggtgaactacagcgcgggctgcaggacggcgttgtccaacgtcgtgatggcggcggcggtgctggtgacgctgctgttcctcatgccgctgttccactacaccccgaacgtgatcctggcggcgatcatcatcacggcggtggtggggctggtggacgtgcgcggcgccgccaggctgtggaaggtggacaagctggacttcctggcgtgcgtggcggcgttcctcggcgtgctgctggtgtccgtgcagacgggcctgggcgtcgccgtcggcatctcgctcttcaaggtcctgctgcaggtcacccgccccaacgtcgtggtggagggcctcgtcccggggacgcagagctaccgcagcgtggcgcagtaccgcgaggccgtccgcgtgccgggcttcctcgtcgtcggcgtcgagtccgccgtctacttcgccaactccatgtacctggtggagcgggtcatgcgctacctccgcgacgaggaggagcgcgcgctcaagtccaaccacccctccatccgatgcgtcgtcctcgacatgggcgccgtcgcggcgatcgacaccagcggtctagacgcgctgtccgagctcaagaaagtcctggacaaaagaaacatcgagctggtgcttgccaacccggtggggtcggtggcggagaggatgttcaactcggcggtgggcgagagcttcgggtcgggccgcctcttcttcagcgtagcggaggccgtcgcggcgggggcgtgcaaagcggcgcagccctgacgacgacgacaggctgatccctgaggtgccgcacgggagcatgcataggaataggatgggtcagagacagactaccggtgctgctagtggtagtagggcaggacgacgtacgaataacatggtgatggcctctcttcctccactccgatgcgatgcgagtgtgcgacgcaggggaggggagaagagtttttgaaggatgtgaccagttgctgttgtagttgttgtcaagtacgtagtaatgaaacgagaattgctgcgtggcaattcaggcctgttttttctttttgcatcaaggaaaaataagtgctggtacagatgagattattttaactagaaccaagttacttgccagtaaaataagaagcttccatataaacttgaaacaaaagaaaaaggagacacgattc

SEQ ID NO: 217811 - DNA, 1597 bp, Zea Mays
cttgaatcgactaaacagttggtgtgcccaggaaagctgtcctcgcccaacagcagagcgccaggaatccaaagcttttctgggtatcagcaggtgctcccctggcgtcggtgatcatctccaccatcctctccttcatctggaaatcccccagcatcagtgttatcggcatcctccccaggggagtgaaccctccttcggcgaacatgctcagcttcagcggctcctacgtggcgctgacgatcaaaaccgggatcatgacaggcatcctgtccttaacagaagggatcgcagtgggcaggacctttgcgtccatcaacaactaccaggtggacgggaacaaggagatgatggcgatcgggctgatgaacatggcgggctcctgcgcctcctgctacgtgacgacggggtccttctcccggtcggcggtgaactacagcgcgggctgcaggacggcgttgtccaacgtcgtgatggcggcggcggtgctggtgacgctgctgttcctcatgccgctgttccactacaccccgaacgtgatcctggcggcgatcatcatcacggcggtggtggggctggtggacgtgcgcggcgccgccaggctgtggaaggtggacaagctggacttcctggcgtgcgtggcggcgttcctcggcgtgctgctggtgtccgtgcagacgggcctgggcgtcgccgtcggcatctcgctcttcaaggtcctgctgcaggtcacccgccccaacgtcgtggtggagggcctcgtcccggggacgcagagctaccgcagcgtggcgcagtaccgcgaggccgtccgcgtgccgggcttcctcgtcgtcggcgtcgagtccgccgtctacttcgccaactccatgtacctggtggagcgggtcatgcgctacctccgcgacgaggaggagcgcgcgctcaagtccaaccacccctccatccgatgcgtcgtcctcgacatgggcgccgtcgcggcgatcgacaccagcggtctagacgcgctgtccgagctcaagaaagtcctggacaaaagaaacatcgagctggtgcttgccaacccggtggggtcggtggcggagaggatgttcaactcggcggtgggcgagagcttcgggtcgggccgcctcttcttcagcgtagcggaggccgtcgcggcgggggcgtgcaaagcggcgcagccctgacgacgacgacaggctgatccctgaggtgccgcacgggagcatgcataggaataggatgggtcagagacagactaccggtgctgctagtggtagtagggcaggacgacgtacgaataacatggtgatggcctctcttcctccactccgatgcgatgcgagtgtgcgacgcaggggaggggagaagagtttttgaaggatgtgaccagttgctgttgtagttgttgtcaagtacgtagtaatgaaacgagaattgctgcgtggcaattcaggcctgttttttctttttgcatcaaggaaaaataagtgctggtacagatgagattattttaactagaaccaagttacttgccagtaaaataagaagcttccatataaacttgaaacaaaagaaaaaggagacacgattc

SEQ ID NO: 217812 - DNA, 1567 bp, Zea Mays
acgccggagaaatcttcagagatcaggacgccaggaatccaaagcttttctgggtatcagcaggtgctcccctggcgtcggtgatcatctccaccatcctctccttcatctggaaatcccccagcatcagtgttatcggcatcctccccaggggagtgaaccctccttcggcgaacatgctcagcttcagcggctcctacgtggcgctgacgatcaaaaccgggatcatgacaggcatcctgtccttaacagaagggatcgcagtgggcaggacctttgcgtccatcaacaactaccaggtggacgggaacaaggagatgatggcgatcgggctgatgaacatggcgggctcctgcgcctcctgctacgtgacgacggggtccttctcccggtcggcggtgaactacagcgcgggctgcaggacggcgttgtccaacgtcgtgatggcggcggcggtgctggtgacgctgctgttcctcatgccgctgttccactacaccccgaacgtgatcctggcggcgatcatcatcacggcggtggtggggctggtggacgtgcgcggcgccgccaggctgtggaaggtggacaagctggacttcctggcgtgcgtggcggcgttcctcggcgtgctgctggtgtccgtgcagacgggcctgggcgtcgccgtcggcatctcgctcttcaaggtcctgctgcaggtcacccgccccaacgtcgtggtggagggcctcgtcccggggacgcagagctaccgcagcgtggcgcagtaccgcgaggccgtccgcgtgccgggcttcctcgtcgtcggcgtcgagtccgccgtctacttcgccaactccatgtacctggtggagcgggtcatgcgctacctccgcgacgaggaggagcgcgcgctcaagtccaaccacccctccatccgatgcgtcgtcctcgacatgggcgccgtcgcggcgatcgacaccagcggtctagacgcgctgtccgagctcaagaaagtcctggacaaaagaaacatcgagctggtgcttgccaacccggtggggtcggtggcggagaggatgttcaactcggcggtgggcgagagcttcgggtcgggccgcctcttcttcagcgtagcggaggccgtcgcggcgggggcgtgcaaagcggcgcagccctgacgacgacgacaggctgatccctgaggtgccgcacgggagcatgcataggaataggatgggtcagagacagactaccggtgctgctagtggtagtagggcaggacgacgtacgaataacatggtgatggcctctcttcctccactccgatgcgatgcgagtgtgcgacgcaggggaggggagaagagtttttgaaggatgtgaccagttgctgttgtagttgttgtcaagtacgtagtaatgaaacgagaattgctgcgtggcaattcaggcctgttttttctttttgcatcaaggaaaaataagtgctggtacagatgagattattttaactagaaccaagttacttgccagtaaaataagaagcttccatataaacttgaaacaaaagaaaaaggagacacgattc

SEQ ID NO: 217813 - DNA, 1577 bp, Zea Mays
cttctgcaaagaaattccgggatctctagtttgacaagcgccaggaatccaaagcttttctgggtatcagcaggtgctcccctggcgtcggtgatcatctccaccatcctctccttcatctggaaatcccccagcatcagtgttatcggcatcctccccaggggagtgaaccctccttcggcgaacatgctcagcttcagcggctcctacgtggcgctgacgatcaaaaccgggatcatgacaggcatcctgtccttaacagaagggatcgcagtgggcaggacctttgcgtccatcaacaactaccaggtggacgggaacaaggagatgatggcgatcgggctgatgaacatggcgggctcctgcgcctcctgctacgtgacgacggggtccttctcccggtcggcggtgaactacagcgcgggctgcaggacggcgttgtccaacgtcgtgatggcggcggcggtgctggtgacgctgctgttcctcatgccgctgttccactacaccccgaacgtgatcctggcggcgatcatcatcacggcggtggtggggctggtggacgtgcgcggcgccgccaggctgtggaaggtggacaagctggacttcctggcgtgcgtggcggcgttcctcggcgtgctgctggtgtccgtgcagacgggcctgggcgtcgccgtcggcatctcgctcttcaaggtcctgctgcaggtcacccgccccaacgtcgtggtggagggcctcgtcccggggacgcagagctaccgcagcgtggcgcagtaccgcgaggccgtccgcgtgccgggcttcctcgtcgtcggcgtcgagtccgccgtctacttcgccaactccatgtacctggtggagcgggtcatgcgctacctccgcgacgaggaggagcgcgcgctcaagtccaaccacccctccatccgatgcgtcgtcctcgacatgggcgccgtcgcggcgatcgacaccagcggtctagacgcgctgtccgagctcaagaaagtcctggacaaaagaaacatcgagctggtgcttgccaacccggtggggtcggtggcggagaggatgttcaactcggcggtgggcgagagcttcgggtcgggccgcctcttcttcagcgtagcggaggccgtcgcggcgggggcgtgcaaagcggcgcagccctgacgacgacgacaggctgatccctgaggtgccgcacgggagcatgcataggaataggatgggtcagagacagactaccggtgctgctagtggtagtagggcaggacgacgtacgaataacatggtgatggcctctcttcctccactccgatgcgatgcgagtgtgcgacgcaggggaggggagaagagtttttgaaggatgtgaccagttgctgttgtagttgttgtcaagtacgtagtaatgaaacgagaattgctgcgtggcaattcaggcctgttttttctttttgcatcaaggaaaaataagtgctggtacagatgagattattttaactagaaccaagttacttgccagtaaaataagaagcttccatataaacttgaaacaaaagaaaaaggagacacgattc

SEQ ID NO: 217814 - DNA, 6458 bp, Zea Mays
agttttagttttatagcagttttattttactttctcgtcgtcaatcgctctccttgctcggcgtcgcctgcttcctcccgcaccgagagtccgagacgccgcttctcctcccacctacctacaccccccctctctccatcctcccagccgcatctaaaccctaaccctaaacccctcccccaccaacccagcaaacgtcgatggcattgggagatctcatggcgtccaggttcggccactcctcgtcctcgccgtcgccgtcattggccccggtgccgccgctaccccatcaccaccacaaccaccaccagaaccacgtcgcggatgacctccccgtcgccagcgggccggagcccaagaacgggttggaggtccccgaggtggagaagccggcgtccgaggcgtacctgccccaggtggtcgtgctgtgcgactatcgccacgaggggatcgacgaagctaccaccgccgcgctctctaccagcggcctcgtctccaactggcgacccaaggaccggacgaagactggatgtggtgcacttgtattatgtttgaacataagtgttgatccacctgatgtaattaaaatttccccttgtgcaagaatggagtgctggatagatcctttctctatggcacctcctaaagcccttgaaagtattggaaaaacattgcattcccagtatgagcgcttgcaacctaaggctcgatacaagcttcagctggatccaacagtggaggaagttaagaagctttctaatacttgccgcaaatatgccagagaagagagagtccttttccattataatggccatggtgtaccaaagcctacatcaaatggtgagatttgggtgtttaacaagagttacacacagtatatcccactttcaattactgatcttgattcatggctgaagacaccttccatttatgtttttgattgctcagctgctggaattattgtgaaagcctttctagagcgcctagactggagttctacctcctcggcatcttcgcagaaggatttcattcttcttgctgcctgtgaagcacatcagacgcttccccagagtgcagaatttcctgctgatgtgtttacggcttgcctcacaacgcccatcaaaatggctttgcactggttttgtaagcgaacatcactccatggtcctctggatcgttctcttattgaccaaattcctggaaggcaaaatgaccgtaaaacacttcttggagagctcaattggatttttactgctataacagatactatcgcatggaatgttcttccacgtgatctgttccaaaggcttttcaggcaggaccttcttgttgccggtctcttccgtaacttcttgcttgctgagagaatcatgcgatctgcaaactgttctccagtttcttatccgttgttacccccaacacatcaacaccatatgtgggatgcatgggacatggctgctgagatttgcctttccaagcttcctcagttaattgctgatccaaacacagagtttcagccaagtcctttttttatggaacaattgatggctttcgaagtttggcttgatcatggctctaaggacaagaaacctcctgaattgttacccatagttcttcaggtcctgcttagtcaaccacacagatctagagtgcttgttctgcttggaagatttcttgatatgggaccatgggcagttgatttggccctgtctgttggaatatttccttgtgtgctcaaactgcttcaatcaagtgctatggatatacgtcaaaatctagtgtttatatggacaaaaattctctcccttgataagtcatgtcaggttgaattggttaaagatggaggacatgcatattttattaagtttcttgacagtttggatgctttcccagaacagcgtgcaatggccgcttttgttatagcagtcattgtggatgggtataggatgggtcaagaggcttgtatgaatgctgggcttatggatgtttgcctgagacatctgcaacctgagaattctcatgcacaaacagaacctttgcttttgcagtggctttgtttatgccttgggaaactatgggaagatttccctgaggctcagttacttggtctgcaaacaaatggaccagaaattgtaatatgcttattgtcggagcctcaacctgaggtcagagctgctgctgtttttgcacttgggaatctccttgatactacatcaaatagtcatgatgatggttccgatgatgatgaaaaggtgaaagctgaaataaatgtagttcgaagccttctgcagatctcttcagatggcagtccccttgttagatctgaggttgctatagcgcttactcgctttgcgttgggtcacaacaaacatctcaaatctgttgcttccgagtattggaaacctcaacccaattcattgctgaaatcactaccatcgttggcaaatataagtaatccaagcaatgtttacagtcccaacaatattctacaaggcaggattggtcctgtgttgagggttgccagtgatagcggtgccgctggtcgtgatggaagaatttctacaagcaacccaattgcaacaagtagtatcatgcatggctctcctgagtcagatgattcttcccaacactcagattcaggcatattactgagggggaatgcaagtaatggtggtttcagctacactagatcgaggcctgttgataatgtcatttattctcaatttatatcaactatgtattctgtttctaaagatcctgacccaacaattgcaactattggtcggagagcactgtcccttattggtgttgaacaagtggttatgaaaaatactaggtttaacagtggcggttcacatcgaggagagacatctgcgtcaaattttggaatggcacgatcttcttcctggcgtgatatgaagtctggaagcatcttgatgaaatttatgacccctcctgttagcccccctcagcatgattatcttccaggattacgccgagtgtgttctatggagtttggacaacatcctataaatccccccaatggcttagctgatcgccttttaagctctgctgcaggtcccagtaatgcagaaccacttccccaatcaacaatttacaactggagttgtgttcaattctctaggccagttttaactgtctctgatgataatgaagaaaccaatgctagaagagaagagagagaacaaatcgcactagattacatcactaagtgtcagcgctcctcttgcaagatgacaagccagattgctagttgggatacaaagtttgagttgggaacaaaagcagctttattgttgccattttctccgattgtcgtcgcagctgatgaaaatgaacaaataagagtgtggaactacgacgatgcactaccagtgaactcttttcaaaaccataagttatctggcagagggctatctaaacttttgcttataaatgagcttgatgagagcttgcttttggctgcctcaagtgatggaaatgtacgtatatggaaaaattttgctcaaaagggtggagagaaacttgtaactgctttgtcatcagttcagggacatcgagctgctggtcgcagtattgtgattgactggcagcagcaatctggttatctgtatgcatctggtgacatgtcttccatcttggtatgggatcttgacaaggaacaacttctcagcaccattcagtcaactgctgatactgccatttcttccctgtctacatctcaggttcgctccggacactttgctgctggttttgctgatggttctgtcaggatatatgatgttcgctctcctgataggttcgtctatgtggccaggccacatgccccaagaacagaaaaggttgtgagcataggatttcaacctgggtttgatccatacaagattgtaagtgcatctcaagctggagacatccagtttcttgatgttagaagggcagcagaaccctacctgactattgaggcacacaggggttcacttacagcattagtggttcatcgttatgccccagttgttgctagtggctcagccaagcaaatgattaaagtgtttagtcttggtggggagcagttgacgataattgggtacctgccatcttttatgggccaaagaataggcagtgtaaattgcctttcttttcacccatacaagtcactcctggctgctggtgctggtgacaatgctctggtctctatctatgctgaggaaaattacaaacatgcagtagctggtctggtgcattattttacagcgacggtgtctagggtgaggaattttctttgggaaatcaaggatcaggtccatattgtcatctctagtccttgcgagaggccctcaccggcggcggcgagtcaccgccttctgaggaagaagccactgtcagacacaggcgagggagtaaggattccccaaccccaaccccaaccccaaccccccaagaagcaccgcacagaaccctctgctcctctcaccctcacgctccaaggcggcggcgccatgcacggcggaggcgcggcctcgcccgatgccgccatatgcatctccccagaagctgggcccatcgtcggggtcgcccccgccgggatcagggtcgaaaactgctacgtgttcaagagccggctgcaggagtatgctcagagggttggcattccaaccccggagtaccacacgctgaaagaaggcccatctcatgaacctgtcttcaagtccacagtgttcgttaataataccaagtatgagtcgctgcctgggttcttcagccggaaggctgcagaacagtctgccgcggaagttgcgctcatggagatagccatgtccgctccggtgaccgaaattaggaacatgccagcagttcaagaaactggcctgtgcaagaatctccttcaggagtatgctcagaagatgaattacgccattccatcttatatttgcactaaacaagcttcgggtgtagctcctttcgtatgcagtgttgagattggtggcatcctatacattggtgctgcagctaggacaaagaaggaggcagagataaaagctgcccgaactgctcttcttgcaatccaaagtcaatcagaaggtggtgcaaatggtgccaaaaagtacattgttgttcctgggcaaaggccagataaggagacgaataaaaatccaactgaaacccccataccacttagagtcaagaagcgtggttccaggaagaaatggaacaagaggaaattcaggaggatggctgaccgaattgttgatgctggaaaggatgcagaggggcttggaacgcttctacatgatgactatgaggaagctagaagaataggatatgagttacctacagatactgctatggttcaatttaacaaggaagttgtaatgacacaacctggtgaaggagataggatagtacaattggagccacccagagatcctgcagaggtccaatataacaaggaagctagaagtgttgaacaggacccacccagagatcctgcagaggtccaacataacaaggaagctagaagtgttgaacaggacccacccagagatcctgcagaggtccaacataacaaggaagctagaactgtcgaacaggacccacccagcaacacagaagtgtggaagcctgacaataaggctacaactacagagcaggagtcggtgagcgctttcatagcattgagatctaatggggattctacagatgtggaggcggcaccaggcgataccttgatgatgcagggccaggagtcggaagccacaatgcaagaagcatctcacgctggtgaacaggcccagcctaactaggaacctgaaagcaaaaaaaacttcctgaacaggaagaccgaaatgtaggtcgaatgcatgcattgctgtaggagaataagtccactggaggtacatgagcctaaaataatttgtggagtggtggttgactccagtggtaagtgccttccagagtgtaccggcatgcccaaaactgaaatttccggtttagatagaattgggggcgcggaagagggtgccatgtgtgtgtttgtgtgtgttgcctgtggatggaggaattgatgggagtatgtgaactgatgtagctagtctatgtttgttaccattgagggcttgttcggttagctctcaatccatgtggattgagcgggattggatgggtttgaatcccaaacagctcaaacttcttcacaattttttccaatcccatccaatccatgtgtattgggaataaccgaacaagccctgatgatgattgtgtttggccatgttttcactgtcatattggttggcgaccgctacttgcatgcacaatgcattcgaggtagccggtccaagcctccatttggtcactggatgattgcttaaatgatgtttgagttctcttgtgttaaattattaatgcacaaggaaaataaaaacaattgcaaactggag

SEQ ID NO: 217815 - DNA, 6435 bp, Zea Mays
agttttagttttatagcagttttattttactttctcgtcgtcaatcgctctccttgctcggcgtcgcctgcttcctcccgcaccgagagtccgagacgccgcttctcctcccacctacctacaccccccctctctccatcctcccagccgcatctaaaccctaaccctaaacccctcccccaccaacccagcaaacgtcgatggcattgggagatctcatggcgtccaggttcggccactcctcgtcctcgccgtcgccgtcattggccccggtgccgccgctaccccatcaccaccacaaccaccaccagaaccacgtcgcggatgacctccccgtcgccagcgggccggagcccaagaacgggttggaggtccccgaggtggagaagccggcgtccgaggcgtacctgccccaggtggtcgtgctgtgcgactatcgccacgaggggatcgacgaagctaccaccgccgcgctctctaccagcggcctcgtctccaactggcgacccaaggaccggacgaagactggatgtggtgcacttgtattatgtttgaacataagtgttgatccacctgatgtaattaaaatttccccttgtgcaagaatggagtgctggatagatcctttctctatggcacctcctaaagcccttgaaagtattggaaaaacattgcattcccagtatgagcgcttgcaacctaaggctcgatacaagcttcagctggatccaacagtggaggaagttaagaagctttctaatacttgccgcaaatatgccagagaagagagagtccttttccattataatggccatggtgtaccaaagcctacatcaaatgagttacacacagtatatcccactttcaattactgatcttgattcatggctgaagacaccttccatttatgtttttgattgctcagctgctggaattattgtgaaagcctttctagagcgcctagactggagttctacctcctcggcatcttcgcagaaggatttcattcttcttgctgcctgtgaagcacatcagacgcttccccagagtgcagaatttcctgctgatgtgtttacggcttgcctcacaacgcccatcaaaatggctttgcactggttttgtaagcgaacatcactccatggtcctctggatcgttctcttattgaccaaattcctggaaggcaaaatgaccgtaaaacacttcttggagagctcaattggatttttactgctataacagatactatcgcatggaatgttcttccacgtgatctgttccaaaggcttttcaggcaggaccttcttgttgccggtctcttccgtaacttcttgcttgctgagagaatcatgcgatctgcaaactgttctccagtttcttatccgttgttacccccaacacatcaacaccatatgtgggatgcatgggacatggctgctgagatttgcctttccaagcttcctcagttaattgctgatccaaacacagagtttcagccaagtcctttttttatggaacaattgatggctttcgaagtttggcttgatcatggctctaaggacaagaaacctcctgaattgttacccatagttcttcaggtcctgcttagtcaaccacacagatctagagtgcttgttctgcttggaagatttcttgatatgggaccatgggcagttgatttggccctgtctgttggaatatttccttgtgtgctcaaactgcttcaatcaagtgctatggatatacgtcaaaatctagtgtttatatggacaaaaattctctcccttgataagtcatgtcaggttgaattggttaaagatggaggacatgcatattttattaagtttcttgacagtttggatgctttcccagaacagcgtgcaatggccgcttttgttatagcagtcattgtggatgggtataggatgggtcaagaggcttgtatgaatgctgggcttatggatgtttgcctgagacatctgcaacctgagaattctcatgcacaaacagaacctttgcttttgcagtggctttgtttatgccttgggaaactatgggaagatttccctgaggctcagttacttggtctgcaaacaaatggaccagaaattgtaatatgcttattgtcggagcctcaacctgaggtcagagctgctgctgtttttgcacttgggaatctccttgatactacatcaaatagtcatgatgatggttccgatgatgatgaaaaggtgaaagctgaaataaatgtagttcgaagccttctgcagatctcttcagatggcagtccccttgttagatctgaggttgctatagcgcttactcgctttgcgttgggtcacaacaaacatctcaaatctgttgcttccgagtattggaaacctcaacccaattcattgctgaaatcactaccatcgttggcaaatataagtaatccaagcaatgtttacagtcccaacaatattctacaaggcaggattggtcctgtgttgagggttgccagtgatagcggtgccgctggtcgtgatggaagaatttctacaagcaacccaattgcaacaagtagtatcatgcatggctctcctgagtcagatgattcttcccaacactcagattcaggcatattactgagggggaatgcaagtaatggtggtttcagctacactagatcgaggcctgttgataatgtcatttattctcaatttatatcaactatgtattctgtttctaaagatcctgacccaacaattgcaactattggtcggagagcactgtcccttattggtgttgaacaagtggttatgaaaaatactaggtttaacagtggcggttcacatcgaggagagacatctgcgtcaaattttggaatggcacgatcttcttcctggcgtgatatgaagtctggaagcatcttgatgaaatttatgacccctcctgttagcccccctcagcatgattatcttccaggattacgccgagtgtgttctatggagtttggacaacatcctataaatccccccaatggcttagctgatcgccttttaagctctgctgcaggtcccagtaatgcagaaccacttccccaatcaacaatttacaactggagttgtgttcaattctctaggccagttttaactgtctctgatgataatgaagaaaccaatgctagaagagaagagagagaacaaatcgcactagattacatcactaagtgtcagcgctcctcttgcaagatgacaagccagattgctagttgggatacaaagtttgagttgggaacaaaagcagctttattgttgccattttctccgattgtcgtcgcagctgatgaaaatgaacaaataagagtgtggaactacgacgatgcactaccagtgaactcttttcaaaaccataagttatctggcagagggctatctaaacttttgcttataaatgagcttgatgagagcttgcttttggctgcctcaagtgatggaaatgtacgtatatggaaaaattttgctcaaaagggtggagagaaacttgtaactgctttgtcatcagttcagggacatcgagctgctggtcgcagtattgtgattgactggcagcagcaatctggttatctgtatgcatctggtgacatgtcttccatcttggtatgggatcttgacaaggaacaacttctcagcaccattcagtcaactgctgatactgccatttcttccctgtctacatctcaggttcgctccggacactttgctgctggttttgctgatggttctgtcaggatatatgatgttcgctctcctgataggttcgtctatgtggccaggccacatgccccaagaacagaaaaggttgtgagcataggatttcaacctgggtttgatccatacaagattgtaagtgcatctcaagctggagacatccagtttcttgatgttagaagggcagcagaaccctacctgactattgaggcacacaggggttcacttacagcattagtggttcatcgttatgccccagttgttgctagtggctcagccaagcaaatgattaaagtgtttagtcttggtggggagcagttgacgataattgggtacctgccatcttttatgggccaaagaataggcagtgtaaattgcctttcttttcacccatacaagtcactcctggctgctggtgctggtgacaatgctctggtctctatctatgctgaggaaaattacaaacatgcagtagctggtctggtgcattattttacagcgacggtgtctagggtgaggaattttctttgggaaatcaaggatcaggtccatattgtcatctctagtccttgcgagaggccctcaccggcggcggcgagtcaccgccttctgaggaagaagccactgtcagacacaggcgagggagtaaggattccccaaccccaaccccaaccccaaccccccaagaagcaccgcacagaaccctctgctcctctcaccctcacgctccaaggcggcggcgccatgcacggcggaggcgcggcctcgcccgatgccgccatatgcatctccccagaagctgggcccatcgtcggggtcgcccccgccgggatcagggtcgaaaactgctacgtgttcaagagccggctgcaggagtatgctcagagggttggcattccaaccccggagtaccacacgctgaaagaaggcccatctcatgaacctgtcttcaagtccacagtgttcgttaataataccaagtatgagtcgctgcctgggttcttcagccggaaggctgcagaacagtctgccgcggaagttgcgctcatggagatagccatgtccgctccggtgaccgaaattaggaacatgccagcagttcaagaaactggcctgtgcaagaatctccttcaggagtatgctcagaagatgaattacgccattccatcttatatttgcactaaacaagcttcgggtgtagctcctttcgtatgcagtgttgagattggtggcatcctatacattggtgctgcagctaggacaaagaaggaggcagagataaaagctgcccgaactgctcttcttgcaatccaaagtcaatcagaaggtggtgcaaatggtgccaaaaagtacattgttgttcctgggcaaaggccagataaggagacgaataaaaatccaactgaaacccccataccacttagagtcaagaagcgtggttccaggaagaaatggaacaagaggaaattcaggaggatggctgaccgaattgttgatgctggaaaggatgcagaggggcttggaacgcttctacatgatgactatgaggaagctagaagaataggatatgagttacctacagatactgctatggttcaatttaacaaggaagttgtaatgacacaacctggtgaaggagataggatagtacaattggagccacccagagatcctgcagaggtccaatataacaaggaagctagaagtgttgaacaggacccacccagagatcctgcagaggtccaacataacaaggaagctagaagtgttgaacaggacccacccagagatcctgcagaggtccaacataacaaggaagctagaactgtcgaacaggacccacccagcaacacagaagtgtggaagcctgacaataaggctacaactacagagcaggagtcggtgagcgctttcatagcattgagatctaatggggattctacagatgtggaggcggcaccaggcgataccttgatgatgcagggccaggagtcggaagccacaatgcaagaagcatctcacgctggtgaacaggcccagcctaactaggaacctgaaagcaaaaaaaacttcctgaacaggaagaccgaaatgtaggtcgaatgcatgcattgctgtaggagaataagtccactggaggtacatgagcctaaaataatttgtggagtggtggttgactccagtggtaagtgccttccagagtgtaccggcatgcccaaaactgaaatttccggtttagatagaattgggggcgcggaagagggtgccatgtgtgtgtttgtgtgtgttgcctgtggatggaggaattgatgggagtatgtgaactgatgtagctagtctatgtttgttaccattgagggcttgttcggttagctctcaatccatgtggattgagcgggattggatgggtttgaatcccaaacagctcaaacttcttcacaattttttccaatcccatccaatccatgtgtattgggaataaccgaacaagccctgatgatgattgtgtttggccatgttttcactgtcatattggttggcgaccgctacttgcatgcacaatgcattcgaggtagccggtccaagcctccatttggtcactggatgattgcttaaatgatgtttgagttctcttgtgttaaattattaatgcacaaggaaaataaaaacaattgcaaactggag

SEQ ID NO: 217816 - DNA, 7258 bp, Zea Mays
agttttagttttatagcagttttattttactttctcgtcgtcaatcgctctccttgctcggcgtcgcctgcttcctcccgcaccgagagtccgagacgccgcttctcctcccacctacctacaccccccctctctccatcctcccagccgcatctaaaccctaaccctaaacccctcccccaccaacccagcaaacgtcgatggcattgggagatctcatggcgtccaggttcggccactcctcgtcctcgccgtcgccgtcattggccccggtgccgccgctaccccatcaccaccacaaccaccaccagaaccacgtcgcggatgacctccccgtcgccagcgggccggagcccaagaacgggttggaggtccccgaggtggagaagccggcgtccgaggcgtacctgccccaggtggtcgtgctgtgcgactatcgccacgaggggatcgacgaagctaccaccgccgcgctctctaccagcggcctcgtctccaactggcgacccaaggaccggacgaagactggatgtggtgcacttgtattatgtttgaacataagtgttgatccacctgatgtaattaaaatttccccttgtgcaagaatggagtgctggatagatcctttctctatggcacctcctaaagcccttgaaagtattggaaaaacattgcattcccagtatgagcgcttgcaacctaaggctcgatacaagcttcagctggatccaacagtggaggaagttaagaagctttctaatacttgccgcaaatatgccagagaagagagagtccttttccattataatggccatggtgtaccaaagcctacatcaaatggtgagatttgggtgtttaacaagagttacacacagtatatcccactttcaattactgatcttgattcatggctgaagacaccttccatttatgtttttgattgctcagctgctggaattattgtgaaagcctttctagagcgcctagactggagttctacctcctcggcatcttcgcagaaggatttcattcttcttgctgcctgtgaagcacatcagacgcttccccagagtgcagaatttcctgctgatgtgtttacggcttgcctcacaacgcccatcaaaatggctttgcactggttttgtaagcgaacatcactccatggtcctctggatcgttctcttattgaccaaattcctggaaggcaaaatgaccgtaaaacacttcttggagagctcaattggatttttactgctataacagatactatcgcatggaatgttcttccacgtgatctgttccaaaggcttttcagtttcttatccgttgttacccccaacacatcaacaccatatgtgggatgcatgggacatggctgctgagatttgcctttccaagcttcctcagttaattgctgatccaaacacagagtttcagccaagtcctttttttatggaacaattgatggctttcgaagtttggcttgatcatggctctaaggacaagaaacctcctgaattgttacccatagttcttcaggtcctgcttagtcaaccacacagatctagagtgcttgttctgcttggaagatttcttgatatgggaccatgggcagttgatttggccctgtctgttggaatatttccttgtgtgctcaaactgcttcaatcaagtgctatggatatacgtcaaaatctagtgtttatatggacaaaaattctctcccttgataagtcatgtcaggttgaattggttaaagatggaggacatgcatattttattaagtttcttgacagtttggatgctttcccagaacagcgtgcaatggccgcttttgttatagcagtcattgtggatgggtataggatgggtcaagaggcttgtatgaatgctgggcttatggatgtttgcctgagacatctgcaacctgagaattctcatgcacaaacagaacctttgcttttgcagtggctttgtttatgccttgggaaactatgggaagatttccctgaggctcagttacttggtctgcaaacaaatggaccagaaattgtaatatgcttattgtcggagcctcaacctgaggtcagagctgctgctgtttttgcacttgggaatctccttgatactacatcaaatagtcatgatgatggttccgatgatgatgaaaaggtgaaagctgaaataaatgtagttcgaagccttctgcagatctcttcagatggcagtccccttgttagatctgaggttgctatagcgcttactcgctttgcgttgggtcacaacaaacatctcaaatctgttgcttccgagtattggaaacctcaacccaattcattgctgaaatcactaccatcgttggcaaatataagtaatccaagcaatgtttacagtcccaacaatattctacaaggcaggattggtcctgtgttgagggttgccagtgatagcggtgccgctggtcgtgatggaagaatttctacaagcaacccaattgcaacaagtagtatcatgcatggctctcctgagtcagatgattcttcccaacactcagattcaggcatattactgagggggaatgcaagtaatggtggtttcagctacactagatcgaggcctgttgataatgtcatttattctcaatttatatcaactatgtattctgtttctaaagatcctgacccaacaattgcaactattggtcggagagcactgtcccttattggtgttgaacaagtggttatgaaaaatactaggtttaacagtggcggttcacatcgaggagagacatctgcgtcaaattttggaatggcacgatcttcttcctggcgtgatatgaagtctggaagcatcttgatgaaatttatgacccctcctgttagcccccctcagcatgattatcttccaggattacgccgagtgtgttctatggagtttggacaacatcctataaatccccccaatggcttagctgatcgccttttaagctctgctgcaggtcccagtaatgcagaaccacttccccaatcaacaatttacaactggagttgtgttcaattctctaggccagttttaactgtctctgatgataatgaagaaaccaatgctagaagagaagagagagaacaaatcgcactagattacatcactaagtgtcagcgctcctcttgcaagatgacaagccagattgctagttgggatacaaagtttgagttgggaacaaaagcagctttattgttgccattttctccgattgtcgtcgcagctgatgaaaatgaacaaataagagtgtggaactacgacgatgcactaccagtgaactcttttcaaaaccataagttatctggcagagggctatctaaacttttgcttataaatgagcttgatgagagcttgcttttggctgcctcaagtgatggaaatgtacgtatatggaaaaattttgctcaaaagggtggagagaaacttgtaactgctttgtcatcagttcagggacatcgagctgctggtcgcagtattgtgattgactggcagcagcaatctggttatctgtatgcatctggtgacatgtcttccatcttggtatgggatcttgacaaggaacaacttctcagcaccattcagtcaactgctgatactgccatttcttccctgtctacatctcaggttcgctccggacactttgctgctggttttgctgatggttctgtcaggatatatgatgttcgctctcctgataggttcgtctatgtggccaggccacatgccccaagaacagaaaaggttgtgagcataggatttcaacctgggtttgatccatacaagattgtaagtgcatctcaagctggagacatccagtttcttgatgttagaagggcagcagaaccctacctgactattgaggcacacaggggttcacttacagcattagtggttcatcgttatgccccagttgttgctagtggctcagccaagcaaatgattaaagtgtttagtcttggtggggagcagttgacgataattgggtacctgccatcttttatgggccaaagaataggcagtgtaaattgcctttcttttcacccatacaagtcactcctggctgctggtgctggtgacaatgctctggtctctatctatgctgaggaaaattacaagtaagatgaggccttatatctcatgacaatgcagccacagtgcaatcggtaggccttacattttttcggccaagtgatgctccacagcatggttcagcttcaagatccaagatgacggtaagccttgtcacggagatgtcgacggtaccgtggctctcggtgcatattggctgttggacggcgtgtgcggtttgtaagatacagtcaagattcattagcctccttgcagaaggtttgtgaaccctaacctgatcctgtcattgaactcggaggctccccccagcccacccaaataattagccatacctaggctataaccaaaatgtaaatagccagcgcattcgggttgtactttgccagcattcaagtgtaaaaaggtctgaagatggttgatgtgataaacagggcttggtaggggctgctgcctgggcaagtggggttgtgcatatgggcccaggtagtagaatggttgcagaagtctgcccacagatgttgaagagaaaagtgtatttgtccagctaaaatatggcgttagatgggggtagtattggcctgcatgaatgaatgaatgaatgttgagtcatttgcattgtaattgtaacccttggatagatgactgcccgcttgtatatatgagtcgtgtttgtacagttgtctgctttctgtccccaagttgtaatccgtccaatgatgtgttttatgctggtgcattccggtagagatgaaccggaggtgctggaacatataggtggtcttgtggtctgtaactgtaatggatatgtgaatcttaatatgagtaattgattaccgccgcgtcctggacatggacaatacctgcatgcaaatgatcagtagctgatttacggcatactgtatgcagacatgcagtagctggtctggtgcattattttacagcgacggtgtctagggtgaggaattttctttgggaaatcaaggatcaggtccatattgtcatctctagtccttgcgagaggccctcaccggcggcggcgagtcaccgccttctgaggaagaagccactgtcagacacaggcgagggagtaaggattccccaaccccaaccccaaccccaaccccccaagaagcaccgcacagaaccctctgctcctctcaccctcacgctccaaggcggcggcgccatgcacggcggaggcgcggcctcgcccgatgccgccatatgcatctccccagaagctgggcccatcgtcggggtcgcccccgccgggatcagggtcgaaaactgctacgtgttcaagagccggctgcaggagtatgctcagagggttggcattccaaccccggagtaccacacgctgaaagaaggcccatctcatgaacctgtcttcaagtccacagtgttcgttaataataccaagtatgagtcgctgcctgggttcttcagccggaaggctgcagaacagtctgccgcggaagttgcgctcatggagatagccatgtccgctccggtgaccgaaattaggaacatgccagcagttcaagaaactggcctgtgcaagaatctccttcaggagtatgctcagaagatgaattacgccattccatcttatatttgcactaaacaagcttcgggtgtagctcctttcgtatgcagtgttgagattggtggcatcctatacattggtgctgcagctaggacaaagaaggaggcagagataaaagctgcccgaactgctcttcttgcaatccaaagtcaatcagaaggtggtgcaaatggtgccaaaaagtacattgttgttcctgggcaaaggccagataaggagacgaataaaaatccaactgaaacccccataccacttagagtcaagaagcgtggttccaggaagaaatggaacaagaggaaattcaggaggatggctgaccgaattgttgatgctggaaaggatgcagaggggcttggaacgcttctacatgatgactatgaggaagctagaagaataggatatgagttacctacagatactgctatggttcaatttaacaaggaagttgtaatgacacaacctggtgaaggagataggatagtacaattggagccacccagagatcctgcagaggtccaatataacaaggaagctagaagtgttgaacaggacccacccagagatcctgcagaggtccaacataacaaggaagctagaagtgttgaacaggacccacccagagatcctgcagaggtccaacataacaaggaagctagaactgtcgaacaggacccacccagcaacacagaagtgtggaagcctgacaataaggctacaactacagagcaggagtcggtgagcgctttcatagcattgagatctaatggggattctacagatgtggaggcggcaccaggcgataccttgatgatgcagggccaggagtcggaagccacaatgcaagaagcatctcacgctggtgaacaggcccagcctaactaggaacctgaaagcaaaaaaaacttcctgaacaggaagaccgaaatgtaggtcgaatgcatgcattgctgtaggagaataagtccactggaggtacatgagcctaaaataatttgtggagtggtggttgactccagtggtaagtgccttccagagtgtaccggcatgcccaaaactgaaatttccggtttagatagaattgggggcgcggaagagggtgccatgtgtgtgtttgtgtgtgttgcctgtggatggaggaattgatgggagtatgtgaactgatgtagctagtctatgtttgttaccattgagggcttgttcggttagctctcaatccatgtggattgagcgggattggatgggtttgaatcccaaacagctcaaacttcttcacaattttttccaatcccatccaatccatgtgtattgggaataaccgaacaagccctgatgatgattgtgtttggccatgttttcactgtcatattggttggcgaccgctacttgcatgcacaatgcattcgaggtagccggtccaagcctccatttggtcactggatgattgcttaaatgatgtttgagttctcttgtgttaaattattaatgcacaaggaaaataaaaacaattgcaaactggag

SEQ ID NO: 217817 - DNA, 822 bp, Zea Mays
ccgtcgtgtaccaaagccaaataccaagtacatcggtgcagagtggcgcgtatagtattgggcatgaactggatccagcaatacagtccgatgaaggtggattgggcgaacaagtgggcagtcattccatataatggatcgccagcatacttgcaaggtgtgcaggtgacattaccagccggcgctgtcaccgaacttttgctcttgtcagtggaatcacaggctacacccgctggacaatcggtcgatccaaaagtccaagcagttctggatcagttcgtggaggtatttgaggatccagtcggcttaccaccaagcagaacatgcgaccacactataccattggttccagggacaaatgtgtgtgtactaccactgtccagtaagctgtcgcagtgccagaccatgctgaagatgacaacaccatcaggggctgctctataggttcgggcacaacttcagactcgtcatctgttccctgactgaacatctcacggaaaagctcttccggattgtgagtactagagcagatgaaaatgaagtgagcagagtggaatatgtaataaaaaatagattgcagccacaaccagtttgccctcggttgcttgatgcatatgtgtgaccagaccaatctgatatccaaaaacttcttgccataataaatgaggctatcctagaaaaaagacaacaaacctttatcctgcacaacgctctaaacattagacctggtgaacataaatggccaatcaaccattctgtatttatcttgtaacacatcgaaccttactgacaggaaaccacgttgtgtttgttcagagacgg

SEQ ID NO: 217818 - DNA, 1363 bp, Zea Mays
tttctaaactcagtctggaacatgttattgtcgagtcggcaagaaaggaatagataccagagaaattcctggcgtgaaccacgggtgttgttcacatttggtaccagagccaatactggatcctccacacgggtactggacgagatcgcaatcgaagttgggcggcatggcgccagcgaagacggacgatcctttgtcccagcttctggcgaagatcgaggagggaaacaaggagactcaccgacgcatggaggcgattcagggggcggtgggaaatatggaggcggcggtcaaggtggtgatgacggagcagggagatcttcagaagtggaaaccggaggtggaagcgaaagtgacggagatttctgatgctctaaaggcgatccagatccagatgggaaagatggagaagaagccgctcggtttcgggtcgagacaggaagaagaaggagaagacggatttctgaagccgccaccatctgattcttcgaatttggagtttcgtcgtgaagaagggcggacccaattctcgcatggagtattgggcatgaactggatccagcaatacagtccgatgaaggtggattgggcgaacaagtgggcagtcattccatataatggatcgccagcatacttgcaaggtgtgcaggtgacattaccagccggcgctgtcaccgaacttttgctcttgtcagtggaatcacaggctacacccgctggacaatcggtcgatccaaaagtccaagcagttctggatcagttcgtggaggtatttgaggatccagtcggcttaccaccaagcagaacatgcgaccacactataccattggttccagggacaaatgtgtgtgtactaccactgtccagtaaggccgagtagtcagaatatcttgatgctgaatttgatcttgtaaatgccatgtggtagctgtcgcagtgccagaccatgctgaagatgacaacaccatcaggggctgctctataggttcgggcacaacttcagactcgtcatctgttccctgactgaacatctcacggaaaagctcttccggattgtgagtactagagcagatgaaaatgaagtgagcagagtggaatatgtaataaaaaatagattgcagccacaaccagtttgccctcggttgcttgatgcatatgtgtgaccagaccaatctgatatccaaaaacttcttgccataataaatgaggctatcctagaaaaaagacaacaaacctttatcctgcacaacgctctaaacattagacctggtgaacataaatggccaatcaaccattctgtatttatcttgtaacacatcgaaccttactgacaggaaaccacgttgtgtttgttcagagacgg

SEQ ID NO: 217819 - DNA, 1714 bp, Zea Mays
agtctggaacatgttattgtcgagtcggcaagaaaggaatagataccagagaaattcctggcgtgaaccacgggtgttgttcacatttggtaccagagccaatactggatcctccacacgggtactggacgagatcgcaatcgaagttgggcggcatggcgccagcgaagacggacgatcctttgtcccagcttctggcgaagatcgaggagggaaacaaggagactcaccgacgcatggaggcgattcagggggcggtgggaaatatggaggcggcggtcaaggtggtgatgacggagcagggagatcttcagaagtggaaaccggaggtggaagcgaaagtgacggagatttctgatgctctaaaggcgatccagatccagatgggaaagatggagaagaagccgctcggtttcgggtcgagacaggaagaagaaggagaagacggatttctgaagccgccaccatctgattcttcgaatttggagtttcgtcgtgaagaagggcggacccaattctcgcatggagatatctttactgggttgcaggtgccggaggaagttctggagtccaggcttcttcgtaaagggggtaaggtgatttcgcagttgctcattaagtggtccaattggccggtgtcactgtcaacctgggaggatgaagaggccattaagcagaaatttccacaagcaccagcttggggtcaagctgtcgttaaagaagggggaaatgtcagcagagcagatcacatggaccatgcagaggagcggactcaagcagtgcaacagaaggcacagacagagggagtcaaggaagacaatcagagcccgcgcagccgtcgtgtaccaaagccaaataccaagtacatcggtgcagagtggcgcgtatagtattgggcatgaactggatccagcaatacagtccgatgaaggtggattgggcgaacaagtgggcagtcattccatataatggatcgccagcatacttgcaaggtgtgcaggtgacattaccagccggcgctgtcaccgaacttttgctcttgtcagtggaatcacaggctacacccgctggacaatcggtcgatccaaaagtccaagcagttctggatcagttcgtggaggtatttgaggatccagtcggcttaccaccaagcagaacatgcgaccacactataccattggttccagggacaaatgtgtgtgtactaccactgtccagtaaggccgagtagtcagaatatcttgatgctgaatttgatcttgtaaatgccatgtggtagctgtcgcagtgccagaccatgctgaagatgacaacaccatcaggggctgctctataggttcgggcacaacttcagactcgtcatctgttccctgactgaacatctcacggaaaagctcttccggattgtgagtactagagcagatgaaaatgaagtgagcagagtggaatatgtaataaaaaatagattgcagccacaaccagtttgccctcggttgcttgatgcatatgtgtgaccagaccaatctgatatccaaaaacttcttgccataataaatgaggctatcctagaaaaaagacaacaaacctttatcctgcacaacgctctaaacattagacctggtgaacataaatggccaatcaaccattctgtatttatcttgtaacacatcgaaccttactgacaggaaaccacgttgtgtttgttcagagacgg

SEQ ID NO: 217820 - DNA, 1016 bp, Zea Mays
ttgctggtcgcatgcagcaacacgacatcctcatattagttgactcagggtcttctcacacttttgtcagtgaccgcttacggccacagttgtctggtgttcaagagttgcctagaaccatatctgtgcaagtagccaacagtcaagtgcttccatgccgttatcatctcccagcagctgagtggagtatgtctgattgccaatttgtcactaacatgaaattttttcctcttacggtgttttatgtagtattgggcatgaactggatccagcaatacagtccgatgaaggtggattgggcgaacaagtgggcagtcattccatataatggatcgccagcatacttgcaaggtgtgcaggtgacattaccagccggcgctgtcaccgaacttttgctcttgtcagtggaatcacaggctacacccgctggacaatcggtcgatccaaaagtccaagcagttctggatcagttcgtggaggtatttgaggatccagtcggcttaccaccaagcagaacatgcgaccacactataccattggttccagggacaaatgtgtgtgtactaccactgtccagtaagctgtcgcagtgccagaccatgctgaagatgacaacaccatcaggggctgctctataggttcgggcacaacttcagactcgtcatctgttccctgactgaacatctcacggaaaagctcttccggattgtgagtactagagcagatgaaaatgaagtgagcagagtggaatatgtaataaaaaatagattgcagccacaaccagtttgccctcggttgcttgatgcatatgtgtgaccagaccaatctgatatccaaaaacttcttgccataataaatgaggctatcctagaaaaaagacaacaaacctttatcctgcacaacgctctaaacattagacctggtgaacataaatggccaatcaaccattctgtatttatcttgtaacacatcgaaccttactgacaggaaaccacgttgtgtttgttcagagacgg

SEQ ID NO: 217821 - DNA, 1050 bp, Zea Mays
gttctatactcgatccgcccctgtagtggtctcttactggtggcggcgtagaggtgacgaaaaaaccttgacaatgagcagcataggcacaggttatgatctgtctgtcaccaccttctctcccgatggccgcgtcttccaggtcgagtatgccacgaaggctgtcgacaacagcgggaccgttgttgggatcaagtgcaaagatggcattgttctgggtgtcgagaagctggtaacctcaaagatgatgctggagggatcaaaccgtaggatccattcagtgcacaggcactcgggcttggccgttgctggtttggcagcagatggcaggcaaattgtttcaaggaccaaatcagaagctgccagttatgaaaaggtctatggagaacccatttctgtgaaggaattggcagatcgtgtggcaagttatgttcatctttgcacgctgtactggtggctcagaccttttggttgtggtgttattcttggaggttatgatagggatggaccacagctttacatgatagagccctcaggagtttcgtataaatacttcggtgctgcattggggaagggaaggcaggctgcaaagactgagatagaaaagttgaaactttcagagcttacctgccgagaaggcattgttgaagttgcaaagataatttatgcagtgcatgatgaagctaaggacaaagcttttgagttggagttgagctggatctgtgaggaatcgaagcgccagcatcagaaggttccaaatgagctgttggagcagggcaaggccgctgctcaggcagctcttgaggacatggatgctgaaagaaacaccattgctaggcccgaacttgttccatcatctttcgttgcttttgaaatctttggtccctttgggctgccgggctgggctggacgtggcaaagaattgtcagattttactttcagttcgatgtaaaatctcatagatgtacctaacgaaactaggctccgttcatcggttcatggaagtttgaatctagacaggagatatcagggccgtgttgaaacagcggc

SEQ ID NO: 217822 - DNA, 1727 bp, Zea Mays
cctgcctctccctcccgccgccacagcgcgaagctctgtcggacaccgaccccgacgctgctctaccgctcgttgcgtcatccctccactggctcacacgtacaccttctcgaccgcgcgtcgtcactccactaccatatcccgaagattgcctcctccctgagactgccccctccacctcgcgtgcctcgcagacgggcgacctcgcatcgcgggctcggtgctcaaccgtggcccgaatttcgcttcgacgtcatcccgaacagctcgagaacaccatcctccatctcatcacagtataatacacatttgttcataagttatcgtggtattatatgattccgttgcaacgcacgggcactgacctagtcaaaatagaaaacagaaacaaaaatcatgagagtgagagttcatcttcttctccaagctgatttctgcttgttagctactcacgtcaacagaaaatctcgcgttcacctcctctccagtctctccgcctcccgcttacttctctgactctgtcctctttggtttctttcctgtcggcgacggctggggtgctgcgccgctctcaccttcaccgccgacgagcattcacaagtagtggtctcttactggtggcggcgtagaggtgacgaaaaaaccttgacaatgagcagcataggcacaggttatgatctgtctgtcaccaccttctctcccgatggccgcgtcttccaggtcgagtatgccacgaaggctgtcgacaacagcgggaccgttgttgggatcaagtgcaaagatggcattgttctgggtgtcgagaagctggtaacctcaaagatgatgctggagggatcaaaccgtaggatccattcagtgcacaggcactcgggcttggccgttgctggtttggcagcagatggcaggcaaattgtttcaaggaccaaatcagaagctgccagttatgaaaagaattggcagatcgtgtggcaagttatgttcatctttgcacgctgtactggtggctcagaccttttggttgtggtgttattcttggaggttatgatagggatggaccacagctttacatgatagagccctcaggagtttcgtataaatacttcggtgctgcattggggaagggaaggcaggctgcaaagactgagatagaaaagttgaaactttcagagcttacctgccgagaaggcattgttgaagttgcaaagataatttatgcagtgcatgatgaagctaaggacaaagcttttgagttggagttgagctggatctgtgaggaatcgaagcgccagcatcagaaggtcccaaatgacctgttggagcatgccaaagctgctgctcagacagctcttgaggagatggatgctgactaagaaacaagatgatatgcccaaacttcatgttttggcgctgttgaaatctctgatccctttggggtgacagactggatatggcaaatttgtcggattttattttgatgtcatgtaaaactcaattgatgtaagtttggatctgaattgattgatgtcatagctgtggctatttacattcaccgcagttgcgtcctttagaacttgctgttgttagactttataggaccttgcacacgaaccattgctactagacggcgattgttttgcgtgtcggacctctttctgtttttgtaggctatgtgaaagaggacggcagccataaggttgttgcgctctcgattagggtgcgagagg

SEQ ID NO: 217823 - DNA, 2197 bp, Zea Mays
tccagtcgaatttccaggctgggcgtcggtcttgtcatgaccaatcggggtatggcgtcgcttaggtgcgatttggtgctgtttaaggcctgaatgacctgagatggacgttgcatgagcttgcgcatgggcaggaccagtaaaggagttgcgcgcgaaaaagttgacgcgggagtggatgcatgggatttgcatgccaaggagactgtcggggaattgggcgcctacaggtcctgcaagtcacagggcaggcacataagcatctcttcctctccttttggcttccctcctcttgggtttgcactgcccctgctcttgacttggatgtgcactgcctctactcgacttggatatgctctgcagttcgcatctcctctgcagctctgtttccctcctcttctgctgtttctttccctgtctttcctctgcttgtgctttgttatattgatgctgaccggaagtgctcgagttctttgtttttacagctgatagcacaatggtatattatactccactcggaattccaatatgttggtgcagtggttagacgggggttcccaggtcaaaatctggttggtagtattgcaaattctgctttctgttaggacgttggaatgtctacatctatttggaagttgtgctgctaggtaactgcagatgcagacttggatgggattttaggttgaacttggatgattcaggttatgccaagaaacatgttaaccaactgaggaatacagtttactgtttgggttacaaaagctacacctttttcctgtcaagtcaactcatgaaatgtgaaatcttttgcgcaatacaaattaaatagtgtctttgccagatgtaataagtacggaagaattcggtattttgtgttcattttgctgcctgccctatctggagtttgcttctaaaattgactgttgatttctttgcaagaccagtaaactaatcatgttttgatgcttaacaaacaggagggttttgcattttcccattgtaccacctgcaaggctccatattatttgagggttcattcccacactgacaggaaatggcgaacactgaagtttcgtttctttgttactagagatatactattcatctttgctctagtccagactgtcatctctgcattggcatacttggtacattttcttgatgggtaccagcaatattggttgaggacagcctggggttttgataaccaagttagtttttattacatatgtggtgcattattattttttgctctattgggactatcaggttgcttcataacctgttatgaccgaagagtacgaaatgatttggctcagccttgtcgagaattatgtctttgttgctgtcaaccagggatgtgtgcagattgccatctacctggcacgttatgcatgtggactgactgcaccacctgcttcgaaggttgtgctaccacagctggcgagtgtggtggttgcttgggaggtgctggggaagctgggctacctctgcttctcatcatgggggttattgtgcttgggcttttcacggtcatcggcatattctacagtgtcctggtcgcgacaatggttggccagcggatctggcagcggcattatcacattcttgcaaaacgaatgctaaccaaggagtatgtcgtagaggatgtcgatggcgagcgcacagactggtgtccgccgccgctccctgcagagcacatcagccagctgaggtctctggggcttctataatagctagggtactcggcgtggcattaccctacccagctgtacaggaggcgatacaaaagcaggaagtcaggcatactgcgttgaaatgtggcaatattgatatcttctttttttgtacattgtaatggcaacagtttcttcctgacaaccaaaaagttttataccaagtgaaatcacgtactttacgaagtctgcgtggcttctcacctctccaagtgactttgtcatgtttaaattcgcgtatcagcctatcggcctatcctccctcattcagaataacaattgacaacggggattcatcgaattctatactccaaaaatattgacgttcaaatattaaaattttaaaatagctgtttttcaatataccttttcttttcttttctttttttctaatatatttctatgttttgtctaccatatatctttactgtgctaaagtcaacaaatattatgggctcgag

SEQ ID NO: 217824 - DNA, 2184 bp, Zea Mays
gaccagtaaaggagttgcgcgcgaaaaagttgacgcgggagtggatgcatgggatttgcatgccaaggagactgtcggggaattgggcgcctacaggtcctgcaaggagggttttgcattttcccattgtaccacctgcaaggctccatattatttgagggttcattcccacactgacaggaaatggcgaacactgaagtttcgtttctttgttactagagatatactattcatctttgctctagtccagactgtcatctctgcattggcatacttggtacattttcttgatgggtaccagcaatattggttgaggacagcctggggttttgataaccaagttagtttttattacatatgtggtgcattattattttttgctctattgggactatcaggttgcttcataacctgttatgaccgaagagtacgaaatgatttggctcagccttgtcgagaattatgtctttgttgctgtcaaccagggtatgcattagttagctcattcttcaactcatcaaagtatggccttatactaaagctatgtcttaaccctgaaaaacattggtcgacacagttgttgtggcataggaaaaatttacacgaagtaacgtgaagagattatatattttttctctaattatatgaatggatatagatagtttgttgcactcggattgataaagcatgttcagcaaggttacattaggcctaggcgctctctaggcgctgacccatactttgatgactaacatgtgttcctaggcattttggaccttattctaccttttcttaatataatgaagcgtagctctactgtgttttcgagaaaaaaaaggttggacagagacccaccttggcaccttgcccactccaaccttatccattcacctcttctcagttccagccacactcgcatttgctcgcttgtgtctcctgtggcctctgccttctcccagacacgcttgttgcccaccccctctgccttgtccttgttatgctcgtcactgacgcccgtgccttctcctggctgcacccatcacccgccgccattctcctcctggacgccgcccgccactaacctccttttggtagcgcttgtggcctgtggcctgccctccttctgggccgtggccgtctgtactcgcttcctcggccgccagtccgccacctgccgtccctcaggcagcacggctctggatctgggggcatgctgcctatccactgctgctcccttgtggaacactgatgtttacttgtacacaactacaagtacacatgcatgtacaccgtgctcgtcatatattctcacaggtggttgtaccaacatttgttcaatttcaggatgtgtgcagattgccatctacctggcacgttatgcatgtggactgactgcaccacctgcttcgaaggttgtgctaccacagctggcgagtgtggtggttgcttgggaggtgctggggaagctgggctacctctgcttctcatcatgggggttattgtgcttgggcttttcacggtcatcggcatattctacagtgtcctggtcgcgacaatggttggccagcggatctggcagcggcattatcacattcttgcaaaacgaatgctaaccaaggagtatgtcgtagaggatgtcgatggcgagcgcacagactggtgtccgccgccgctccctgcagagcacatcagccagctgaggtctctggggcttctataatagctagggtactcggcgtggcattaccctacccagctgtacaggaggcgatacaaaagcaggaagtcaggcatactgcgttgaaatgtggcaatattgatatcttctttttttgtacattgtaatggcaacagtttcttcctgacaaccaaaaagttttataccaagtgaaatcacgtactttacgaagtctgcgtggcttctcacctctccaagtgactttgtcatgtttaaattcgcgtatcagcctatcggcctatcctccctcattcagaataacaattgacaacggggattcatcgaattctatactccaaaaatattgacgttcaaatattaaaattttaaaatagctgtttttcaatataccttttcttttcttttctttttttctaatatatttctatgttttgtctaccatatatctttactgtgctaaagtcaacaaatattatgggctcgag

SEQ ID NO: 217825 - DNA, 2499 bp, Zea Mays
tagcccctccattcctgttttcccaaacatgtccataacatattaagtaacgtaaaataaactctaacttaattagaacacaacttcaacaatatccagttgggattgaacaaaaagttgtcatgcttccgaccgtgtcagttggttggccgccaagccagtgcaaccgttacgttccaaacttccaactcaaaggcgtcaatctcgtggtcatgctcttgtgcaagtgcagcaaagcacgggtcaccggatcctttccagctctcggccgcgggccgcccgcttgaaatagagcgcaggccacctgccgccggtggcccgtgcactgcacccgggagtacctgctctaccgcgccggcgcgccttgctccgccctaggcaagcaacacgcacgccggtcgctggcgtggcggcggcacttaaaaaaaatcctgcgagcccgttcggcgcgagccgagttttcgcatttgtctcgacgcggccgcgcgatctctggcgctgcatcacgggccggggccgcgagccacacacggagcaagcagccaagcgagcgaagcgaacaaaaagctcacgggggccagctaagcgcacggaccgacgcccgacgatggccgctctgccgcggcggaggctcctcctctttctcgcgctgctccgtgttctaatctgcggagcggcgccgttccgggcgagggacctgctgccgctgctgccgcggcggatggcgtggcagctcatgggcgccacggcccacagcgccgtcgacctgctcccgtcgttcgtcggcgccgtggcgccgggcgggcccgcggccgcctggcgcggcgcgtgcttcgacgaaaaccaggccgtgctcgacctcacccccggccgcaacgggaccgccgggggcctcggtggcgccgtcctccgcctcaagactgcttcgcctcagagctggacatgcatggacctgtacgtgttcgcaacgccctacagggtagcctgggactactacatgaggtcgaacgagaaccacaccttcgagatcaaagcgtgggaggacgcggcagagatggaatacgtaaagcagcacgggatcgccgtcttcctgatgccatctgggatgcttgggacgctgctgtccttggccgacgtggcgcctttgttctccaacaccggctggggccaggacgccaacttggcgttccttgggaagcacatgggggcgtcgttcgagaggcgtcgttccgcgaacacaattataaggagggaggacgtgcggtcgggcgacttcttggcgctctccaagatccggggccggtggggcgggttccagacgctggagaagtgggtcaccggcgccttcgccggccacaccgcggttgtcctcaaagatggtgacgccaacctctgggtcgcagaatcaggctacgaaaataacaagggtgacgagatcattagcatgactccgtgggacgagtggtgggggatggcgctcaaggacgagtccaaccctcagatagcgcttctgccgctgcaccccgatgtacgggcaaggttcgacgaaagcgccgcgtgggaattcgcccggagcatgtgcgggaaaccctacggctaccacaacatgatatttagctggatcgatacggcgtcagacaattacccgcctcctcttgacgccaacctggtaatggccattatgtccatgtggaccagactgcagccgcgctatgcttccaacatgtggaacgaagcacttaacaagcgacttgggactgagaaactggacctccatgggatcattagggagaccgagagacggggcctgtccttcaaccagctgctcaccgtacctgagcgagacgactgggagtacagcgacggcaagtccacgacgtgcgtcgccttcatcctgtccatgtacaaggcggccggagtcttcgctccctacacggagtccatccaggtcaccgagttcaccatccgggacgcgtacatgctcaagatcttcgaggacaaccagacgcggctgcccagctggtgcaacgcggcggcggacggcctccccttctgccagatcctcggggagtacaagatgggcctgccggagtacaacaccatcgagccctacgccaacatgaacgagaactgcccctcggcgccgcccacctacagccgcccgtcgcgctgctagctcggcgttgcctggggtaagtcgtcgtcgacgtcgtacgtgcagagtatatgttgttgttgttgttgttcgctcgtatgcttaattcagccattaattcagctacggcctagctaccggcacaagttaatttgcttagcctttagccttcgctgctgtaaagtgactgctcgtggaaatgattactacaaaattagtgtaaagcggccgcacatctggccttcagtatgttgtctgttttgtgtaatgcaagagccttatcaacatgaaacatcagaacgactgctccagtagcgtgttctggaaaatatacttgctcaacg

SEQ ID NO: 217826 - DNA, 4113 bp, Zea Mays
atggcgagcgggggaggggggattcgggcgacgacttcggggaggatgaagtcgcgagggtggggagattcaagcgacgactttgggacaccggctattgcgctgaggcgtgggggcgactgtagtggcacggcgagttcagactccagcgccgtcttcttcgcggtcgccttttgcgctccatcccctgggctttccgtcacggcggccgcagccatggtggagatgcggcagcggaggaagccgctggtgctcgcctccacgcaggcgctcctcgactcgcttccgggggatcgcccgccgccaccgccgcagaagccggtgcgccttaaggccggcgtcctccgattcccctccggaggtggtggcgccgagttcggggagctcgcgtctttcgtcggcatccctgcccctgctctccgacggctcgcggtcgtcacgggtactcctgtgcttgtcaagaatactgacaataatgttgggaggattgtcaaagcagtattgtttggtaacccgtcccttgacaagtcctgctcagaacatactgaccaagtggtctctgcctctctctctggtcatgcaatgggcttcttaccttgtcgcacgttccctgctattggttttacatccatggatgaagatgttggttatgttagcccacttttggcattcaacttgggattgcatgtttcttgccttaaacttcttattcaaagagaagggcagcctttcaagttctgttctcgagctgaagagattgatgcaactgccagttctggaagtgatctttctcttcacttagaccttcttccatgccctcaagtgcctaaatatgcattgcatttacgagtttctgttgtgaggattcctgattgtggtgtgcttgcttctttaaagatatattcatcctttggaggaagtgagtaccaagacatggtagatcaagctttgaacgagtactttaagtttgataggttcctagcaagaggagatgtttttggtatacaaaacagttggaagtgtggctcaagctgctgcctggcatgcaataagcaggataataaactgaatccccgtaatatgatctactttaaggtgactggcatggaaccatcagatgaacctatacttcgtgttaattgcaatgaaacagcccttgtacttggtggagctgcttctgctgcaatccccccttattccttttttgcttcttctggtaattcagtaccattgcacagtgaagtagtggagcatttagcatctgtcattgcaccagcattgtgcccttcggatattttaccaaaaataaagttttccacttttttatatggcccgccaggatgtggaaagcgcacagtggttaggcatgttgctaaccatcttggtctgcatgtggtcgagtgtagctgtcatgatctgatgacatcatcagaaagtggggcacctgctgcacttgcaactgcctttaaagaagctcagaagtattctccttgtataatacttcttcgccactttgatgcaattgggaatgcatcctcaaacgaaggtccacagtctgagcaatctgggattgcatcgaacattgaatctgtcattaagcagtacattggacaacgttgggttgctaaggattcactgccaggaaaagatgtaaatgggagctcatacctcgtggagcctgaatgtgtaagctctcttcaaatcatactagttgcaactgcggacagttctgaaggaatgcaacagtcaattagaagatgcttccgctatgagatcgacatgaagactatgaatgaagaacagagaaacgaactgatatctgagacacttcaaggcattcctaaagttgctgatgagagtatttgtgacaagttcataaaagatttagcagcgcaaacgtcaggtttcatgcccagggacatacttgcattggtcgcagatgctggtgtgtcttttgcgcataaaattgcagcagggaaagatagcaaagcaatcagtaagcatacggaggtccttccagaaagctcttctgccactcaaaatgaggaacaccatttcagcaaagaagatattatgtcttccttggaacgagccaagaaacggaatcgtgctgcactgggcacacccaaagttcctaatgtcaaatgggaagatgttggtgggctagaggatgtgaaaaaggttattctagatactattcagttgcctctgatgtacaagcacctgttttcttctaaattgcgcaagcgatcaggtgtcctgctatatggacctccaggaacagggaagactttactcgcgaaagcagtagcaactgaatgctcattgaactttcttagcgtcaaaggtccagaactgataaacatgtatgttggagaatcagagaaaaatgttcgggatatttttgagaaggctaggtctgcacgcccatgtgtcattttctttgatgagcttgattcccttgctcctgcacgaggatcctcagcagattctggcggtgtcatggacagggttgtttcccagttacttgtggagatcgatgggttgagtgacaacagccaggaccttttcattattggggctaccaataggcctgaccttcttgattctgcccttcttcgccctggtcggttcgacaagcttctttatgtcggtgtaaatactgaggcatcatacagggaaaggatccttaaagcacagacacgcaagtataagctgcacaagaacgtttctctcttgtcagttgcgcagcgttgtccaccaaacttcactggtgctgatatttacgcgctgtgtgcggatgcatggtttcatgcagcaaagcgatcagttgaaacattcgaaatcgatccttcaagaagtaatgaagccagtgccgaagaagtcatcgtcgagatcgacgattttatcacggtgttaggagatatcgcaccgtcgctctctctggacgagctacaaaactacgaacagttgaggcagaagatcgaaggaccttctagatgaagttgggtttccactccctgctgacattcttaaactgctaacacaccaaaacattccctgtcttacattttcgttcgtacacaagttttcctccctgaaaacttgggcacttctatatccattcctgatttatacaatcacatccttgtagcagcatctgtattgacatcagaatgacattttctctgaagagaaacatcctgtcattctttgttagcagctccgcaactattctgaatgagcccgtgaagtcaagcactcaaagccttacctgggaaacaaaatgctattcctgacctgaaggaagcatccaccaatacagctagtttggtgccagcagcgatgcctccttgttggtgctcggcaagtcggctggtgtgagcaaaatccgtacgtcgtcgtctccagtggtgtcattctaaactggatctgctgctctcgagaccgaacaactgcaacaaactcaggcagggactcagcatctacacatcctgttctacggtgattgtgacacaaatcggctgcatgggaaccatactagctgccaagaaagatgaaagtgttttctccgacccaacctacaatgtgtctgttctttttgggaagagagatgagccactcctactagcttgcgcacgtcaacttattgagcacataagtggctcagcccggtcattggtgatttctctgggtctgaaagatcattctcagggaacgctgaaggatattactgtagctgtgatgattgaatagctgatgagctgggcatggggttggctcgatggttggcatattcagccccatcgataaagatactgtttagcattgcgcaagaggagccatcgtttataccatgcactaaattctggtagttttgtagttggaccttctatctacttggattaacaaaaggtggttttaagctggtgtcaaaatttgagtgtcaactttcacgctaaacaaaaggcactgtacactggtaaagcacttctgaggcgaatcatgcttttcgaggacaatttcggctatccgtgctggggctgccactgtggagctctgtgcgtactcctttgccgtctaggactagctaggagagctactgtactcgcc

SEQ ID NO: 217827 - DNA, 3790 bp, Zea Mays
atggcgagcgggggaggggggattcgggcgacgacttcggggaggatgaagtcgcgagggtggggagattcaagcgacgactttgggacaccggctattgcgctgaggcgtgggggcgactgtagtggcacggcgagttcagactccagcgccgtcttcttcgcggtcgccttttgcgctccatcccctgggctttccgtcacggcggccgcagccatggtggagatgcggcagcggaggaagccgctggtgctcgcctccacgcaggcgctcctcgactcgcttccgggggatcgcccgccgccaccgccgcagaagccggtgcgccttaaggccggcgtcctccgattcccctccggaggtggtggcgccgagttcggggagctcgcgtctttcgtcggcatccctgcccctgctctccgacggctcgcggtcgtcacgggtactcctgtgcttgtcaagaatactgacaataatgttgggaggattgtcaaagcagtattgtttggtaacccgtcccttgacaagtcctgctcagaacatactgaccaagtggtctctgcctctctctctggtcatgcaatgggcttcttaccttgtcgcacgttccctgctattggttttacatccatggatgaagatgttggttatgttagcccacttttggcattcaacttgggattgcatgtttcttgccttaaacttcttattcaaagagaagggcagcctttcaagttctgttctcgagctgaagagattgatgcaactgccagttctggaagtgatctttctcttcacttagaccttcttccatgccctcaagtgcctaaatatgcattgcatttacgagtttctgttgtgaggattcctgattgtggtgtgcttgcttctttaaagatatattcatcctttggaggaagtgagtaccaagacatggtagatcaagctttgaacgagtactttaagtttgataggttcctagcaagaggagatgtttttggtatacaaaacagttggaagtgtggctcaagctgctgcctggcatgcaataagcaggataataaactgaatccccgtaatatgatctactttaaggtgactggcatggaaccatcagatgaacctatacttcgtgttaattgcaatgaaacagcccttgtacttggtggagctgcttctgctgcaatccccccttattccttttttgcttcttctggtaattcagtaccattgcacagtgaagtagtggagcatttagcatctgtcattgcaccagcattgtgcccttcggatattttaccaaaaataaagttttccacttttttatatggcccgccaggatgtggaaagcgcacagtggttaggcatgttgctaaccatcttggtctgcatgtggtcgagtgtagctgtcatgatctgatgacatcatcagaaagtggggcacctgctgcacttgcaactgcctttaaagaagctcagaagtattctccttgtataatacttcttcgccactttgatgcaattgggaatgcatcctcaaacgaaggtccacagtctgagcaatctgggattgcatcgaacattgaatctgtcattaagcagtacattggacaacgttgggttgctaaggattcactgccaggaaaagatgtaaatgggagctcatacctcgtggagcctgaatgtgtaagctctcttcaaatcatactagttgcaactgcggacagttctgaaggaatgcaacagtcaattagaagatgcttccgctatgagatcgacatgaagactatgaatgaagaacagagaaacgaactgatatctgagacacttcaaggcattcctaaagttgctgatgagagtatttgtgacaagttcataaaagatttagcagcgcaaacgtcaggtttcatgcccagggacatacttgcattggtcgcagatgctggtgtgtcttttgcgcataaaattgcagcagggaaagatagcaaagcaatcagtaagcatacggaggtccttccagaaagctcttctgccactcaaaatgaggaacaccatttcagcaaagaagatattatgtcttccttggaacgagccaagaaacggaatcgtgctgcactgggcacacccaaagttcctaatgtcaaatgggaagatgttggtgggctagaggatgtgaaaaaggttattctagatactattcagttgcctctgatgtacaagcacctgttttcttctaaattgcgcaagcgatcaggtgtcctgctatatggacctccaggaacagggaagactttactcgcgaaagcagtagcaactgaatgctcattgaactttcttagcgtcaaaggtccagaactgataaacatgtatgttggagaatcagagaaaaatgttcgggatatttttgagaagggttgtttcccaggtatcattagcttcgtccctgaggcggtgtcacaacttctcacaagtcttctgttaaattactgggccagtgtcttctcacttccccccttttcgtgtctactagttacttgtggagatcgatgggttgagtgacaacagccaggaccttttcattattggggctaccaataggcctgaccttcttgattctgcccttcttcgccctggtcggttcgacaagcttctttatgtcggtgtaaatactgaggcatcatacagggaaaggatccttaaagcacagacacgcaagtataagctgcacaagaacgtttctctcttgtcagttgcgcagcgttgtccaccaaacttcactggtgctgatatttacgcgctgtgtgcggatgcatggtttcatgcagcaaagcgatcagttgaaacattcgaaatcgatccttcaagaagtaatgaagccagtgccgaagaagtcatcgtcgagatcgacgattttatcacggtgttaggagatatcgcaccgtcgctctctctggacgagctacaaaactacgaacagttgaggcagaagatcgaaggaccttctagatgaatgccagcagcgatgcctccttgttggtgctcggcaagtcggctggtgtgagcaaaatccgtacgtcgtcgtctccagtggtgtcattctaaactggatctgctgctctcgagaccgaacaactgcaacaaactcaggcagggactcagcatctacacatcctgttctacggtgattgtgacacaaatcggctgcatgggaaccatactagctgccaagaaagatgaaagtgttttctccgacccaacctacaatgtgtctgttctttttgggaagagagatgagccactcctactagcttgcgcacgtcaacttattgagcacataagtggctcagcccggtcattggtgatttctctgggtctgaaagatcattctcagggaacgctgaaggatattactgtagctgtgatgattgaatagctgatgagctgggcatggggttggctcgatggttggcatattcagccccatcgataaagatactgtttagcattgcgcaagaggagccatcgtttataccatgcactaaattctggtagttttgtagttggaccttctatctacttggattaacaaaaggtggttttaagctggtgtcaaaatttgagtgtcaactttcacgctaaacaaaaggcactgtacactggtaaagcacttctgaggcgaatcatgcttttcgaggacaatttcggctatccgtgctggggctgccactgtggagctctgtgcgtactcctttgccgtctaggactagctaggagagctactgtactcgcc

SEQ ID NO: 217828 - DNA, 4322 bp, Zea Mays
atggcgagcgggggaggggggattcgggcgacgacttcggggaggatgaagtcgcgagggtggggagattcaagcgacgactttgggacaccggctattgcgctgaggcgtgggggcgactgtagtggcacggcgagttcagactccagcgccgtcttcttcgcggtcgccttttgcgctccatcccctgggctttccgtcacggcggccgcagccatggtggagatgcggcagcggaggaagccgctggtgctcgcctccacgcaggcgctcctcgactcgcttccgggggatcgcccgccgccaccgccgcagaagccggtgcgccttaaggccggcgtcctccgattcccctccggaggtggtggcgccgagttcggggagctcgcgtctttcgtcggcatccctgcccctgctctccgacggctcgcggtcgtcacgggtactcctgtgcttgtcaagaatactgacaataatgttgggaggattgtcaaagcagtattgtttggtaacccgtcccttgacaagtcctgctcagaacatactgaccaagtggtctctgcctctctctctggtcatgcaatgggcttcttaccttgtcgcacgttccctgctattggttttacatccatggatgaagatgttggttatgttagcccacttttggcattcaacttgggattgcatgtttcttgccttaaacttcttattcaaagagaagggcagcctttcaagttctgttctcgagctgaagagattgatgcaactgccagttctggaagtgatctttctcttcacttagaccttcttccatgccctcaagtgcctaaatatgcattgcatttacgagtttctgttgtgaggattcctgattgtggtgtgcttgcttctttaaagatatattcatcctttggaggaagtgagtaccaagacatggtagatcaagctttgaacgagtactttaagtttgataggttcctagcaagaggagatgtttttggtatacaaaacagttggaagtgtggctcaagctgctgcctggcatgcaataagcaggataataaactgaatccccgtaatatgatctactttaaggtgactggcatggaaccatcagatgaacctatacttcgtgttaattgcaatgaaacagcccttgtacttggtggagctgcttctgctgcaatccccccttattccttttttgcttcttctggtaattcagtaccattgcacagtgaagtagtggagcatttagcatctgtcattgcaccagcattgtgcccttcggatattttaccaaaaataaagttttccacttttttatatggcccgccaggatgtggaaagcgcacagtggttaggcatgttgctaaccatcttggtctgcatgtggtcgagtgtagctgtcatgatctgatgacatcatcagaaagtggggcacctgctgcacttgcaactgcctttaaagaagctcagaagtattctccttgtataatacttcttcgccactttgatgcaattgggaatgcatcctcaaacgaaggtccacagtctgagcaatctgggattgcatcgaacattgaatctgtcattaagcagtacattggacaacgttgggttgctaaggattcactgccaggaaaagatgtaaatgggagctcatacctcgtggagcctgaatgtgtaagctctcttcaaatcatactagttgcaactgcggacagttctgaaggaatgcaacagtcaattagaagatgcttccgctatgagatcgacatgaagactatgaatgaagaacagagaaacgaactgatatctgagacacttcaaggcattcctaaagttgctgatgagagtatttgtgacaagttcataaaagatttagcagcgcaaacgtcaggtttcatgcccagggacatacttgcattggtcgcagatgctggtgtgtcttttgcgcataaaattgcagcagggaaagatagcaaagcaatcagtaagcatacggaggtccttccagaaagctcttctgccactcaaaatgaggaacaccatttcagcaaagaagatattatgtcttccttggaacgagccaagaaacggaatcgtgctgcactgggcacacccaaagttcctaatgtcaaatgggaagatgttggtgggctagaggatgtgaaaaaggttattctagatactattcagttgcctctgatgtacaagcacctgttttcttctaaattgcgcaagcgatcaggtgtcctgctatatggacctccaggaacagggaagactttactcgcgaaagcagtagcaactgaatgctcattgaactttcttagcgtcaaaggtccagaactgataaacatgtatgttggagaatcagagaaaaatgttcgggatatttttgagaaggctaggtctgcacgcccatgtgtcattttctttgatgagcttgattcccttgctcctgcacgaggatcctcagcagattctggcggtgtcatggacagggttgtttcccagttacttgtggagatcgatgggttgagtgacaacagccaggaccttttcattattggggctaccaataggcctgaccttcttgattctgcccttcttcgccctggtcggttcgacaagcttctttatgtcggtgtaaatactgaggcatcatacagggaaaggatccttaaagcacagacacgcaagtataagctgcacaagaacgtttctctcttgtcagttgcgcagcgttgtccaccaaacttcactggtgctgatatttacgcgctgtgtgcggatgcatggtttcatgcagcaaagcgatcagttgaaacattcgaaatcgatccttcaagaagtaatgaagccagtgccgaagaagtcatcgtcgagatcgacgattttatcacggtgttaggagatatcgcaccgtcgctctctctggacgagctacaaaactacgaacagttgaggcagaagatcgaaggaccttctagatgaagttgggtttccactccctgctgacattcttaaactgctaacacaccaaaacattccctgtcttacattttcgttcgtacacaagttttcctccctgaaaacttgggcacttctatatccattcctgatttatacaatcacatccttgtagcagcatctgtattgacatcagaatgacattttctctgaagagaaacatcctgtcattctttgttagcagctccgcaactattctgaatgagcccgtgaagtcaagcactcaaagccttacctgggaaacaaaatgctattcctgacctgaaggaagcatccaccaatacagctagtttgggtacacacgctgaaccagctagttcgcctgggagaggcctctgtctcgtttagatgccatcgtctagaagttgtatcggaaaaattataagcgaatgttgcaatgaacagagttccttgtactgctgtgatttgtcattggtcaaagagaactaactgcagcgtttgtctacctacaatacttgtttttttgttgttgctatcttgtagtgccagcagcgatgcctccttgttggtgctcggcaagtcggctggtgtgagcaaaatccgtacgtcgtcgtctccagtggtgtcattctaaactggatctgctgctctcgagaccgaacaactgcaacaaactcaggcagggactcagcatctacacatcctgttctacggtgattgtgacacaaatcggctgcatgggaaccatactagctgccaagaaagatgaaagtgttttctccgacccaacctacaatgtgtctgttctttttgggaagagagatgagccactcctactagcttgcgcacgtcaacttattgagcacataagtggctcagcccggtcattggtgatttctctgggtctgaaagatcattctcagggaacgctgaaggatattactgtagctgtgatgattgaatagctgatgagctgggcatggggttggctcgatggttggcatattcagccccatcgataaagatactgtttagcattgcgcaagaggagccatcgtttataccatgcactaaattctggtagttttgtagttggaccttctatctacttggattaacaaaaggtggttttaagctggtgtcaaaatttgagtgtcaactttcacgctaaacaaaaggcactgtacactggtaaagcacttctgaggcgaatcatgcttttcgaggacaatttcggctatccgtgctggggctgccactgtggagctctgtgcgtactcctttgccgtctaggactagctaggagagctactgtactcgcc

SEQ ID NO: 217829 - DNA, 4327 bp, Zea Mays
atggcgagcgggggaggggggattcgggcgacgacttcggggaggatgaagtcgcgagggtggggagattcaagcgacgactttgggacaccggctattgcgctgaggcgtgggggcgactgtagtggcacggcgagttcagactccagcgccgtcttcttcgcggtcgccttttgcgctccatcccctgggctttccgtcacggcggccgcagccatggtggagatgcggcagcggaggaagccgctggtgctcgcctccacgcaggcgctcctcgactcgcttccgggggatcgcccgccgccaccgccgcagaagccggtgcgccttaaggccggcgtcctccgattcccctccggaggtggtggcgccgagttcggggagctcgcgtctttcgtcggcatccctgcccctgctctccgacggctcgcggtcgtcacgggtactcctgtgcttgtcaagaatactgacaataatgttgggaggattgtcaaagcagtattgtttggtaacccgtcccttgacaagtcctgctcagaacatactgaccaagtggtctctgcctctctctctggtcatgcaatgggcttcttaccttgtcgcacgttccctgctattggttttacatccatggatgaagatgttggttatgttagcccacttttggcattcaacttgggattgcatgtttcttgccttaaacttcttattcaaagagaagggcagcctttcaagttctgttctcgagctgaagagattgatgcaactgccagttctggaagtgatctttctcttcacttagaccttcttccatgccctcaagtgcctaaatatgcattgcatttacgagtttctgttgtgaggattcctgattgtggtgtgcttgcttctttaaagatatattcatcctttggaggaagtgagtaccaagacatggtagatcaagctttgaacgagtactttaagtttgataggttcctagcaagaggagatgtttttggtatacaaaacagttggaagtgtggctcaagctgctgcctggcatgcaataagcaggataataaactgaatccccgtaatatgatctactttaaggtgactggcatggaaccatcagatgaacctatacttcgtgttaattgcaatgaaacagcccttgtacttggtggagctgcttctgctgcaatccccccttattccttttttgcttcttctggtaattcagtaccattgcacagtgaagtagtggagcatttagcatctgtcattgcaccagcattgtgcccttcggatattttaccaaaaataaagttttccacttttttatatggcccgccaggatgtggaaagcgcacagtggttaggcatgttgctaaccatcttggtctgcatgtggtcgagtgtagctgtcatgatctgatgacatcatcagaaagtggggcacctgctgcacttgcaactgcctttaaagaagctcagaagtattctccttgtataatacttcttcgccactttgatgcaattgggaatgcatcctcaaacgaaggtccacagtctgagcaatctgggattgcatcgaacattgaatctgtcattaagcagtacattggacaacgttgggttgctaaggattcactgccaggaaaagatgtaaatgggagctcatacctcgtggagcctgaatgtgtaagctctcttcaaatcatactagttgcaactgcggacagttctgaaggaatgcaacagtcaattagaagatgcttccgctatgagatcgacatgaagactatgaatgaagaacagagaaacgaactgatatctgagacacttcaaggcattcctaaagttgctgatgagagtatttgtgacaagttcataaaagatttagcagcgcaaacgtcaggtttcatgcccagggacatacttgcattggtcgcagatgctggtgtgtcttttgcgcataaaattgcagcagggaaagatagcaaagcaatcagtaagcatacggaggtccttccagaaagctcttctgccactcaaaatgaggaacaccatttcagcaaagaagatattatgtcttccttggaacgagccaagaaacggaatcgtgctgcactgggcacacccaaagttcctaatgtcaaatgggaagatgttggtgggctagaggatgtgaaaaaggttattctagatactattcagttgcctctgatgtacaagcacctgttttcttctaaattgcgcaagcgatcaggtgtcctgctatatggacctccaggaacagggaagactttactcgcgaaagcagtagcaactgaatgctcattgaactttcttagcgtcaaaggtccagaactgataaacatgtatgttggagaatcagagaaaaatgttcgggatatttttgagaaggctaggtctgcacgcccatgtgtcattttctttgatgagcttgattcccttgctcctgcacgaggatcctcagcagattctggcggtgtcatggacagggttgtttcccagttacttgtggagatcgatgggttgagtgacaacagccaggaccttttcattattggggctaccaataggcctgaccttcttgattctgcccttcttcgccctggtcggttcgacaagcttctttatgtcggtgtaaatactgaggcatcatacagggaaaggatccttaaagcacagacacgcaagtataagctgcacaagaacgtttctctcttgtcagttgcgcagcgttgtccaccaaacttcactggtgctgatatttacgcgctgtgtgcggatgcatggtttcatgcagcaaagcgatcagttgaaacattcgaaatcgatccttcaagaagtaatgaagccagtgccgaagaagtcatcgtcgagatcgacgattttatcacggtgttaggagatatcgcaccgtcgctctctctggacgagctacaaaactacgaacagttgaggcagaagatcgaaggaccttctagatgaagttgggtttccactccctgctgacattcttaaactgctaacacaccaaaacattccctgtcttacattttcgttcgtacacaagttttcctccctgaaaacttgggcacttctatatccattcctgatttatacaatcacatccttgtagcagcatctgtattgacatcagaatgacattttctctgaagagaaacatcctgtcattctttgttagcagctccgcaactattctgaatgagcccgtgaagtcaagcactcaaagccttacctgggaaacaaaatgctattcctgacctgaaggaagcatccaccaatacagctagtttgggtacacacgctgaaccagctagttcgcctgggagaggcctctgtctcgtttagatgccatcgtctagaagttgtatcggaaaaattataagcgaatgttgcaatgaacagagttccttgtactgctgtgatttgtcattggtcaaagagaactaactgcagcgtttgtctacctacaatacttgtttttttgttgttgctatcttgtagtgccagcagcgatgcctccttgttggtgctcggcaagtcggctggtgtgagcaaaatccgtacgtcgtcgtctccagtggtgtcattctaaactggatctgctgctctcgagaccgaacaactgcaacaaactcaggcagggactcagcatctacacatcctgttctacggtacggtgattgtgacacaaatcggctgcatgggaaccatactagctgccaagaaagatgaaagtgttttctccgacccaacctacaatgtgtctgttctttttgggaagagagatgagccactcctactagcttgcgcacgtcaacttattgagcacataagtggctcagcccggtcattggtgatttctctgggtctgaaagatcattctcagggaacgctgaaggatattactgtagctgtgatgattgaatagctgatgagctgggcatggggttggctcgatggttggcatattcagccccatcgataaagatactgtttagcattgcgcaagaggagccatcgtttataccatgcactaaattctggtagttttgtagttggaccttctatctacttggattaacaaaaggtggttttaagctggtgtcaaaatttgagtgtcaactttcacgctaaacaaaaggcactgtacactggtaaagcacttctgaggcgaatcatgcttttcgaggacaatttcggctatccgtgctggggctgccactgtggagctctgtgcgtactcctttgccgtctaggactagctaggagagctactgtactcgcc

SEQ ID NO: 217830 - DNA, 3788 bp, Zea Mays
atggcgagcgggggaggggggattcgggcgacgacttcggggaggatgaagtcgcgagggtggggagattcaagcgacgactttgggacaccggctattgcgctgaggcgtgggggcgactgtagtggcacggcgagttcagactccagcgccgtcttcttcgcggtcgccttttgcgctccatcccctgggctttccgtcacggcggccgcagccatggtggagatgcggcagcggaggaagccgctggtgctcgcctccacgcaggcgctcctcgactcgcttccgggggatcgcccgccgccaccgccgcagaagccggtgcgccttaaggccggcgtcctccgattcccctccggaggtggtggcgccgagttcggggagctcgcgtctttcgtcggcatccctgcccctgctctccgacggctcgcggtcgtcacgggtactcctgtgcttgtcaagaatactgacaataatgttgggaggattgtcaaagcagtattgtttggtaacccgtcccttgacaagtcctgctcagaacatactgaccaagtggtctctgcctctctctctggtcatgcaatgggcttcttaccttgtcgcacgttccctgctattggttttacatccatggatgaagatgttggttatgttagcccacttttggcattcaacttgggattgcatgtttcttgccttaaacttcttattcaaagagaagggcagcctttcaagttctgttctcgagctgaagagattgatgcaactgccagttctggaagtgatctttctcttcacttagaccttcttccatgccctcaagtgcctaaatatgcattgcatttacgagtttctgttgtgaggattcctgattgtggtgtgcttgcttctttaaagatatattcatcctttggaggaagtgagtaccaagacatggtagatcaagctttgaacgagtactttaagtttgataggttcctagcaagaggagatgtttttggtatacaaaacagttggaagtgtggctcaagctgctgcctggcatgcaataagcaggataataaactgaatccccgtaatatgatctactttaaggtgactggcatggaaccatcagatgaacctatacttcgtgttaattgcaatgaaacagcccttgtacttggtggagctgcttctgctgcaatccccccttattccttttttgcttcttctggtaattcagtaccattgcacagtgaagtagtggagcatttagcatctgtcattgcaccagcattgtgcccttcggatattttaccaaaaataaagttttccacttttttatatggcccgccaggatgtggaaagcgcacagtggttaggcatgttgctaaccatcttggtctgcatgtggtcgagtgtagctgtcatgatctgatgacatcatcagaaagtggggcacctgctgcacttgcaactgcctttaaagaagctcagaagtattctccttgtataatacttcttcgccactttgatgcaattgggaatgcatcctcaaacgaaggtccacagtctgagcaatctgggattgcatcgaacattgaatctgtcattaagcagtacattggacaacgttgggttgctaaggattcactgccaggaaaagatgtaaatgggagctcatacctcgtggagcctgaatgtgtaagctctcttcaaatcatactagttgcaactgcggacagttctgaaggaatgcaacagtcaattagaagatgcttccgctatgagatcgacatgaagactatgaatgaagaacagagaaacgaactgatatctgagacacttcaaggcattcctaaagttgctgatgagagtatttgtgacaagttcataaaagatttagcagcgcaaacgtcaggtttcatgcccagggacatacttgcattggtcgcagatgctggtgtgtcttttgcgcataaaattgcagcagggaaagatagcaaagcaatcagtaagcatacggaggtccttccagaaagctcttctgccactcaaaatgaggaacaccatttcagcaaagaagatattatgtcttccttggaacgagccaagaaacggaatcgtgctgcactgggcacacccaaagttcctaatgtcaaatgggaagatgttggtgggctagaggatgtgaaaaaggttattctagatactattcagttgcctctgatgtacaagcacctgttttcttctaaattgcgcaagcgatcaggtgtcctgctatatggacctccaggaacagggaagactttactcgcgaaagcagtagcaactgaatgctcattgaactttcttagcgtcaaaggtccagaactgataaacatgtatgttggagaatcagagaaaaatgttcgggatatttttgagaaggctaggtctgcacgcccatgtgtcattttctttgatgagcttgattcccttgctcctgcacgaggatcctcagcagattctggcggtgtcatggacagggttgtttcccagttacttgtggagatcgatgggttgagtgacaacagccaggaccttttcattattggggctaccaataggcctgaccttcttgattctgcccttcttcgccctggtcggttcgacaagcttctttatgtcggtgtaaatactgaggcatcatacagggaaaggatccttaaagcacagacacgcaagtataagctgcacaagaacgtttctctcttgtcagttgcgcagcgttgtccaccaaacttcactggtgctgatatttacgcgctgtgtgcggatgcatggtttcatgcagcaaagcgatcagttgaaacattcgaaatcgatccttcaagaagtaatgaagccagtgccgaagaagtcatcgtcgagatcgacgattttatcacggtgttaggagatatcgcaccgtcgctctctctggacgagctacaaaactacgaacagttgaggcagaagatcgaaggaccttctagatgaatgccagcagcgatgcctccttgttggtgctcggcaagtcggctggtgtgagcaaaatccgtacgtcgtcgtctccagtggtgtcattctaaactggatctgctgctctcgagaccgaacaactgcaacaaactcaggcagggactcagcatctacacatcctgttctacggtacggtgattgtgacacaaatcggctgcatgggaaccatactagctgccaagaaagatgaaagtgttttctccgacccaacctacaatgtgtctgttctttttgggaagagagatgagccactcctactagcttgcgcacgtcaacttattgagcacataagtggctcagcccggtcattggtgatttctctgggtctgaaagatcattctcagggaacgctgaaggatattactgtagctgtgatgattgaatagctgatgagctgggcatggggttggctcgatggttggcatattcagccccatcgataaagatactgtttagcattgcgcaagaggagccatcgtttataccatgcactaaattctggtagttttgtagttggaccttctatctacttggattaacaaaaggtggttttaagctggtgtcaaaatttgagtgtcaactttcacgctaaacaaaaggcactgtacactggtaaagcacttctgaggcgaatcatgcttttcgaggacaatttcggctatccgtgctggggctgccactgtggagctctgtgcgtactcctttgccgtctaggactagctaggagagctactgtactcgcc

SEQ ID NO: 217831 - DNA, 3783 bp, Zea Mays
atggcgagcgggggaggggggattcgggcgacgacttcggggaggatgaagtcgcgagggtggggagattcaagcgacgactttgggacaccggctattgcgctgaggcgtgggggcgactgtagtggcacggcgagttcagactccagcgccgtcttcttcgcggtcgccttttgcgctccatcccctgggctttccgtcacggcggccgcagccatggtggagatgcggcagcggaggaagccgctggtgctcgcctccacgcaggcgctcctcgactcgcttccgggggatcgcccgccgccaccgccgcagaagccggtgcgccttaaggccggcgtcctccgattcccctccggaggtggtggcgccgagttcggggagctcgcgtctttcgtcggcatccctgcccctgctctccgacggctcgcggtcgtcacgggtactcctgtgcttgtcaagaatactgacaataatgttgggaggattgtcaaagcagtattgtttggtaacccgtcccttgacaagtcctgctcagaacatactgaccaagtggtctctgcctctctctctggtcatgcaatgggcttcttaccttgtcgcacgttccctgctattggttttacatccatggatgaagatgttggttatgttagcccacttttggcattcaacttgggattgcatgtttcttgccttaaacttcttattcaaagagaagggcagcctttcaagttctgttctcgagctgaagagattgatgcaactgccagttctggaagtgatctttctcttcacttagaccttcttccatgccctcaagtgcctaaatatgcattgcatttacgagtttctgttgtgaggattcctgattgtggtgtgcttgcttctttaaagatatattcatcctttggaggaagtgagtaccaagacatggtagatcaagctttgaacgagtactttaagtttgataggttcctagcaagaggagatgtttttggtatacaaaacagttggaagtgtggctcaagctgctgcctggcatgcaataagcaggataataaactgaatccccgtaatatgatctactttaaggtgactggcatggaaccatcagatgaacctatacttcgtgttaattgcaatgaaacagcccttgtacttggtggagctgcttctgctgcaatccccccttattccttttttgcttcttctggtaattcagtaccattgcacagtgaagtagtggagcatttagcatctgtcattgcaccagcattgtgcccttcggatattttaccaaaaataaagttttccacttttttatatggcccgccaggatgtggaaagcgcacagtggttaggcatgttgctaaccatcttggtctgcatgtggtcgagtgtagctgtcatgatctgatgacatcatcagaaagtggggcacctgctgcacttgcaactgcctttaaagaagctcagaagtattctccttgtataatacttcttcgccactttgatgcaattgggaatgcatcctcaaacgaaggtccacagtctgagcaatctgggattgcatcgaacattgaatctgtcattaagcagtacattggacaacgttgggttgctaaggattcactgccaggaaaagatgtaaatgggagctcatacctcgtggagcctgaatgtgtaagctctcttcaaatcatactagttgcaactgcggacagttctgaaggaatgcaacagtcaattagaagatgcttccgctatgagatcgacatgaagactatgaatgaagaacagagaaacgaactgatatctgagacacttcaaggcattcctaaagttgctgatgagagtatttgtgacaagttcataaaagatttagcagcgcaaacgtcaggtttcatgcccagggacatacttgcattggtcgcagatgctggtgtgtcttttgcgcataaaattgcagcagggaaagatagcaaagcaatcagtaagcatacggaggtccttccagaaagctcttctgccactcaaaatgaggaacaccatttcagcaaagaagatattatgtcttccttggaacgagccaagaaacggaatcgtgctgcactgggcacacccaaagttcctaatgtcaaatgggaagatgttggtgggctagaggatgtgaaaaaggttattctagatactattcagttgcctctgatgtacaagcacctgttttcttctaaattgcgcaagcgatcaggtgtcctgctatatggacctccaggaacagggaagactttactcgcgaaagcagtagcaactgaatgctcattgaactttcttagcgtcaaaggtccagaactgataaacatgtatgttggagaatcagagaaaaatgttcgggatatttttgagaaggctaggtctgcacgcccatgtgtcattttctttgatgagcttgattcccttgctcctgcacgaggatcctcagcagattctggcggtgtcatggacagggttgtttcccagttacttgtggagatcgatgggttgagtgacaacagccaggaccttttcattattggggctaccaataggcctgaccttcttgattctgcccttcttcgccctggtcggttcgacaagcttctttatgtcggtgtaaatactgaggcatcatacagggaaaggatccttaaagcacagacacgcaagtataagctgcacaagaacgtttctctcttgtcagttgcgcagcgttgtccaccaaacttcactggtgctgatatttacgcgctgtgtgcggatgcatggtttcatgcagcaaagcgatcagttgaaacattcgaaatcgatccttcaagaagtaatgaagccagtgccgaagaagtcatcgtcgagatcgacgattttatcacggtgttaggagatatcgcaccgtcgctctctctggacgagctacaaaactacgaacagttgaggcagaagatcgaaggaccttctagatgaatgccagcagcgatgcctccttgttggtgctcggcaagtcggctggtgtgagcaaaatccgtacgtcgtcgtctccagtggtgtcattctaaactggatctgctgctctcgagaccgaacaactgcaacaaactcaggcagggactcagcatctacacatcctgttctacggtgattgtgacacaaatcggctgcatgggaaccatactagctgccaagaaagatgaaagtgttttctccgacccaacctacaatgtgtctgttctttttgggaagagagatgagccactcctactagcttgcgcacgtcaacttattgagcacataagtggctcagcccggtcattggtgatttctctgggtctgaaagatcattctcagggaacgctgaaggatattactgtagctgtgatgattgaatagctgatgagctgggcatggggttggctcgatggttggcatattcagccccatcgataaagatactgtttagcattgcgcaagaggagccatcgtttataccatgcactaaattctggtagttttgtagttggaccttctatctacttggattaacaaaaggtggttttaagctggtgtcaaaatttgagtgtcaactttcacgctaaacaaaaggcactgtacactggtaaagcacttctgaggcgaatcatgcttttcgaggacaatttcggctatccgtgctggggctgccactgtggagctctgtgcgtactcctttgccgtctaggactagctaggagagctactgtactcgcc

SEQ ID NO: 217832 - DNA, 4370 bp, Zea Mays
atggcgagcgggggaggggggattcgggcgacgacttcggggaggatgaagtcgcgagggtggggagattcaagcgacgactttgggacaccggctattgcgctgaggcgtgggggcgactgtagtggcacggcgagttcagactccagcgccgtcttcttcgcggtcgccttttgcgctccatcccctgggctttccgtcacggcggccgcagccatggtggagatgcggcagcggaggaagccgctggtgctcgcctccacgcaggcgctcctcgactcgcttccgggggatcgcccgccgccaccgccgcagaagccggtgcgccttaaggccggcgtcctccgattcccctccggaggtggtggcgccgagttcggggagctcgcgtctttcgtcggcatccctgcccctgctctccgacggctcgcggtcgtcacgggtactcctgtgcttgtcaagaatactgacaataatgttgggaggattgtcaaagcagtattgtttggtaacccgtcccttgacaagtcctgctcagaacatactgaccaagtggtctctgcctctctctctggtcatgcaatgggcttcttaccttgtcgcacgttccctgctattggttttacatccatggatgaagatgttggttatgttagcccacttttggcattcaacttgggattgcatgtttcttgccttaaacttcttattcaaagagaagggcagcctttcaagttctgttctcgagctgaagagattgatgcaactgccagttctggaagtgatctttctcttcacttagaccttcttccatgccctcaagtgcctaaatatgcattgcatttacgagtttctgttgtgaggattcctgattgtggtgtgcttgcttctttaaagatatattcatcctttggaggaagtgagtaccaagacatggtagatcaagctttgaacgagtactttaagtttgataggttcctagcaagaggagatgtttttggtatacaaaacagttggaagtgtggctcaagctgctgcctggcatgcaataagcaggataataaactgaatccccgtaatatgatctactttaaggtgactggcatggaaccatcagatgaacctatacttcgtgttaattgcaatgaaacagcccttgtacttggtggagctgcttctgctgcaatccccccttattccttttttgcttcttctggtaattcagtaccattgcacagtgaagtagtggagcatttagcatctgtcattgcaccagcattgtgcccttcggatattttaccaaaaataaagttttccacttttttatatggcccgccaggatgtggaaagcgcacagtggttaggcatgttgctaaccatcttggtctgcatgtggtcgagtgtagctgtcatgatctgatgacatcatcagaaagtggggcacctgctgcacttgcaactgcctttaaagaagctcagaagtattctccttgtataatacttcttcgccactttgatgcaattgggaatgcatcctcaaacgaaggtccacagtctgagcaatctgggattgcatcgaacattgaatctgtcattaagcagtacattggacaacgttgggttgctaaggattcactgccaggaaaagatgtaaatgggagctcatacctcgtggagcctgaatgtgtaagctctcttcaaatcatactagttgcaactgcggacagttctgaaggaatgcaacagtcaattagaagatgcttccgctatgagatcgacatgaagactatgaatgaagaacagagaaacgaactgatatctgagacacttcaaggcattcctaaagttgctgatgagagtatttgtgacaagttcataaaagatttagcagcgcaaacgtcaggtttcatgcccagggacatacttgcattggtcgcagatgctggtgtgtcttttgcgcataaaattgcagcagggaaagatagcaaagcaatcagtaagcatacggaggtccttccagaaagctcttctgccactcaaaatgaggaacaccatttcagcaaagaagatattatgtcttccttggaacgagccaagaaacggaatcgtgctgcactgggcacacccaaagttcctaatgtcaaatgggaagatgttggtgggctagaggatgtgaaaaaggttattctagatactattcagttgcctctgatgtacaagcacctgttttcttctaaattgcgcaagcgatcaggtgtcctgctatatggacctccaggaacagggaagactttactcgcgaaagcagtagcaactgaatgctcattgaactttcttagcgtcaaaggtccagaactgataaacatgtatgttggagaatcagagaaaaatgttcgggatatttttgagaaggctaggtctgcacgcccatgtgtcattttctttgatgagcttgattcccttgctcctgcacgaggatcctcagcagattctggcggtgtcatggacagggttgtttcccagttacttgtggagatcgatgggttgagtgacaacagccaggaccttttcattattggggctaccaataggcctgaccttcttgattctgcccttcttcgccctggtcggttcgacaagcttctttatgtcggtgtaaatactgaggcatcatacagggaaaggatccttaaagcacagacacgcaagtataagctgcacaagaacgtttctctcttgtcagttgcgcagcgttgtccaccaaacttcactggtgctgatatttacgcgctgtgtgcggatgcatggtttcatgcagcaaagcgatcagttgaaacattcgaaatcgatccttcaagaagtaatgaagccagtgccgaagaagtcatcgtcgagatcgacgattttatcacggtgttaggagatatcgcaccgtcgctctctctggacgagctacaaaactacgaacagttgaggcagaagatcgaaggaccttctagatgaagttgggtttccactccctgctgacattcttaaactgctaacacaccaaaacattccctgtcttacattttcgttcgtacacaagttttcctccctgaaaacttgggcacttctatatccattcctgatttatacaatcacatccttgtagcagcatctgtattgacatcagaatgacattttctctgaagagaaacatcctgtcattctttgttagcagctccgcaactattctgaatgagcccgtgaagtcaagcactcaaagccttacctgggaaacaaaatgctattcctgacctgaaggaagcatccaccaatacagctagtttgggtacacacgctgaaccagctagttcgcctgggagaggcctctgtctcgtttagatgccatcgtctagaagttgtatcggaaaaattataagcgaatgttgcaatgaacagagttccttgtactgctgtgatttgtcattggtcaaagagaactaactgcagcgtttgtctacctacaatacttgtttttttgttgttgctatcttgtagtgccagcagcgatgcctccttgttggtgctcggcaagtcggctggtgtgagcaaaatccgtacgtcgtcgtctccagtggtgtcattctaaactggatctgctgctctcgagaccgaacaactgcaacaaactcaggcagggactcagcatctacacatcctgttctacggtacggtacgaactgaactaaactacccccatgcatatgatgatacctttctggtgattgtgacacaaatcggctgcatgggaaccatactagctgccaaatgaaagtgttttctccgacccaacctacaatgtgtctgttctttttgggaagagagatgagccactcctactagcttgcgcacgtcaacttattgagcacataagtggctcagcccggtcattggtgatttctctgggtctgaaagatcattctcagggaacgctgaaggatattactgtagctgtgatgattgaatagctgatgagctgggcatggggttggctcgatggttggcatattcagccccatcgataaagatactgtttagcattgcgcaagaggagccatcgtttataccatgcactaaattctggtagttttgtagttggaccttctatctacttggattaacaaaaggtggttttaagctggtgtcaaaatttgagtgtcaactttcacgctaaacaaaaggcactgtacactggtaaagcacttctgaggcgaatcatgcttttcgaggacaatttcggctatccgtgctggggctgccactgtggagctctgtgcgtactcctttgccgtctaggactagctaggagagctactgtactcgcc

SEQ ID NO: 217833 - DNA, 4322 bp, Zea Mays
atggcgagcgggggaggggggattcgggcgacgacttcggggaggatgaagtcgcgagggtggggagattcaagcgacgactttgggacaccggctattgcgctgaggcgtgggggcgactgtagtggcacggcgagttcagactccagcgccgtcttcttcgcggtcgccttttgcgctccatcccctgggctttccgtcacggcggccgcagccatggtggagatgcggcagcggaggaagccgctggtgctcgcctccacgcaggcgctcctcgactcgcttccgggggatcgcccgccgccaccgccgcagaagccggtgcgccttaaggccggcgtcctccgattcccctccggaggtggtggcgccgagttcggggagctcgcgtctttcgtcggcatccctgcccctgctctccgacggctcgcggtcgtcacgggtactcctgtgcttgtcaagaatactgacaataatgttgggaggattgtcaaagcagtattgtttggtaacccgtcccttgacaagtcctgctcagaacatactgaccaagtggtctctgcctctctctctggtcatgcaatgggcttcttaccttgtcgcacgttccctgctattggttttacatccatggatgaagatgttggttatgttagcccacttttggcattcaacttgggattgcatgtttcttgccttaaacttcttattcaaagagaagggcagcctttcaagttctgttctcgagctgaagagattgatgcaactgccagttctggaagtgatctttctcttcacttagaccttcttccatgccctcaagtgcctaaatatgcattgcatttacgagtttctgttgtgaggattcctgattgtggtgtgcttgcttctttaaagatatattcatcctttggaggaagtgagtaccaagacatggtagatcaagctttgaacgagtactttaagtttgataggttcctagcaagaggagatgtttttggtatacaaaacagttggaagtgtggctcaagctgctgcctggcatgcaataagcaggataataaactgaatccccgtaatatgatctactttaaggtgactggcatggaaccatcagatgaacctatacttcgtgttaattgcaatgaaacagcccttgtacttggtggagctgcttctgctgcaatccccccttattccttttttgcttcttctggtaattcagtaccattgcacagtgaagtagtggagcatttagcatctgtcattgcaccagcattgtgcccttcggatattttaccaaaaataaagttttccacttttttatatggcccgccaggatgtggaaagcgcacagtggttaggcatgttgctaaccatcttggtctgcatgtggtcgagtgtagctgtcatgatctgatgacatcatcagaaagtggggcacctgctgcacttgcaactgcctttaaagaagctcagaagtattctccttgtataatacttcttcgccactttgatgcaattgggaatgcatcctcaaacgaaggtccacagtctgagcaatctgggattgcatcgaacattgaatctgtcattaagcagtacattggacaacgttgggttgctaaggattcactgccaggaaaagatgtaaatgggagctcatacctcgtggagcctgaatgtgtaagctctcttcaaatcatactagttgcaactgcggacagttctgaaggaatgcaacagtcaattagaagatgcttccgctatgagatcgacatgaagactatgaatgaagaacagagaaacgaactgatatctgagacacttcaaggcattcctaaagttgctgatgagagtatttgtgacaagttcataaaagatttagcagcgcaaacgtcaggtttcatgcccagggacatacttgcattggtcgcagatgctggtgtgtcttttgcgcataaaattgcagcagggaaagatagcaaagcaatcagtaagcatacggaggtccttccagaaagctcttctgccactcaaaatgaggaacaccatttcagcaaagaagatattatgtcttccttggaacgagccaagaaacggaatcgtgctgcactgggcacacccaaagttcctaatgtcaaatgggaagatgttggtgggctagaggatgtgaaaaaggttattctagatactattcagttgcctctgatgtacaagcacctgttttcttctaaattgcgcaagcgatcaggtgtcctgctatatggacctccaggaacagggaagactttactcgcgaaagcagtagcaactgaatgctcattgaactttcttagcgtcaaaggtccagaactgataaacatgtatgttggagaatcagagaaaaatgttcgggatatttttgagaaggctaggtctgcacgcccatgtgtcattttctttgatgagcttgattcccttgctcctgcacgaggatcctcagcagattctggcggtgtcatggacagggttgtttcccagttacttgtggagatcgatgggttgagtgacaacagccaggaccttttcattattggggctaccaataggcctgaccttcttgattctgcccttcttcgccctggtcggttcgacaagcttctttatgtcggtgtaaatactgaggcatcatacagggaaaggatccttaaagcacagacacgcaagtataagctgcacaagaacgtttctctcttgtcagttgcgcagcgttgtccaccaaacttcactggtgctgatatttacgcgctgtgtgcggatgcatggtttcatgcagcaaagcgatcagttgaaacattcgaaatcgatccttcaagaagtaatgaagccagtgccgaagaagtcatcgtcgagatcgacgattttatcacggtgttaggagatatcgcaccgtcgctctctctggacgagctacaaaactacgaacagttgaggcagaagatcgaaggaccttctagatgaagttgggtttccactccctgctgacattcttaaactgctaacacaccaaaacattccctgtcttacattttcgttcgtacacaagttttcctccctgaaaacttgggcacttctatatccattcctgatttatacaatcacatccttgtagcagcatctgtattgacatcagaatgacattttctctgaagagaaacatcctgtcattctttgttagcagctccgcaactattctgaatgagcccgtgaagtcaagcactcaaagccttacctgggaaacaaaatgctattcctgacctgaaggaagcatccaccaatacagctagtttgggtacacacgctgaaccagctagttcgcctgggagaggcctctgtctcgtttagatgccatcgtctagaagttgtatcggaaaaattataagcgaatgttgcaatgaacagagttccttgtactgctgtgatttgtcattggtcaaagagaactaactgcagcgtttgtctacctacaatacttgtttttttgttgttgctatcttgtagtgccagcagcgatgcctccttgttggtgctcggcaagtcggctggtgtgagcaaaatccgtacgtcgtcgtctccagtggtgtcattctaaactggatctgctgctctcgagaccgaacaactgcaacaaactcaggcagggactcagcatctacacatcctgttctacggtacggtgattgtgacacaaatcggctgcatgggaaccatactagctgccaaatgaaagtgttttctccgacccaacctacaatgtgtctgttctttttgggaagagagatgagccactcctactagcttgcgcacgtcaacttattgagcacataagtggctcagcccggtcattggtgatttctctgggtctgaaagatcattctcagggaacgctgaaggatattactgtagctgtgatgattgaatagctgatgagctgggcatggggttggctcgatggttggcatattcagccccatcgataaagatactgtttagcattgcgcaagaggagccatcgtttataccatgcactaaattctggtagttttgtagttggaccttctatctacttggattaacaaaaggtggttttaagctggtgtcaaaatttgagtgtcaactttcacgctaaacaaaaggcactgtacactggtaaagcacttctgaggcgaatcatgcttttcgaggacaatttcggctatccgtgctggggctgccactgtggagctctgtgcgtactcctttgccgtctaggactagctaggagagctactgtactcgcc

SEQ ID NO: 217834 - DNA, 3850 bp, Zea Mays
atggcgagcgggggaggggggattcgggcgacgacttcggggaggatgaagtcgcgagggtggggagattcaagcgacgactttgggacaccggctattgcgctgaggcgtgggggcgactgtagtggcacggcgagttcagactccagcgccgtcttcttcgcggtcgccttttgcgctccatcccctgggctttccgtcacggcggccgcagccatggtggagatgcggcagcggaggaagccgctggtgctcgcctccacgcaggcgctcctcgactcgcttccgggggatcgcccgccgccaccgccgcagaagccggtgcgccttaaggccggcgtcctccgattcccctccggaggtggtggcgccgagttcggggagctcgcgtctttcgtcggcatccctgcccctgctctccgacggctcgcggtcgtcacgggtactcctgtgcttgtcaagaatactgacaataatgttgggaggattgtcaaagcagtattgtttggtaacccgtcccttgacaagtcctgctcagaacatactgaccaagtggtctctgcctctctctctggtcatgcaatgggcttcttaccttgtcgcacgttccctgctattggttttacatccatggatgaagatgttggttatgttagcccacttttggcattcaacttgggattgcatgtttcttgccttaaacttcttattcaaagagaagggcagcctttcaagttctgttctcgagctgaagagattgatgcaactgccagttctggaagtgatctttctcttcacttagaccttcttccatgccctcaagtgcctaaatatgcattgcatttacgagtttctgttgtgaggattcctgattgtggtgtgcttgcttctttaaagatatattcatcctttggaggaagtgagtaccaagacatggtagatcaagctttgaacgagtactttaagtttgataggttcctagcaagaggagatgtttttggtatacaaaacagttggaagtgtggctcaagctgctgcctggcatgcaataagcaggataataaactgaatccccgtaatatgatctactttaaggtgactggcatggaaccatcagatgaacctatacttcgtgttaattgcaatgaaacagcccttgtacttggtggagctgcttctgctgcaatccccccttattccttttttgcttcttctggtaattcagtaccattgcacagtgaagtagtggagcatttagcatctgtcattgcaccagcattgtgcccttcggatattttaccaaaaataaagttttccacttttttatatggcccgccaggatgtggaaagcgcacagtggttaggcatgttgctaaccatcttggtctgcatgtggtcgagtgtagctgtcatgatctgatgacatcatcagaaagtggggcacctgctgcacttgcaactgcctttaaagaagctcagaagtattctccttgtataatacttcttcgccactttgatgcaattgggaatgcatcctcaaacgaaggtccacagtctgagcaatctgggattgcatcgaacattgaatctgtcattaagcagtacattggacaacgttgggttgctaaggattcactgccaggaaaagatgtaaatgggagctcatacctcgtggagcctgaatgtgtaagctctcttcaaatcatactagttgcaactgcggacagttctgaaggaatgcaacagtcaattagaagatgcttccgctatgagatcgacatgaagactatgaatgaagaacagagaaacgaactgatatctgagacacttcaaggcattcctaaagttgctgatgagagtatttgtgacaagttcataaaagatttagcagcgcaaacgtcaggtttcatgcccagggacatacttgcattggtcgcagatgctggtgtgtcttttgcgcataaaattgcagcagggaaagatagcaaagcaatcagtaagcatacggaggtccttccagaaagctcttctgccactcaaaatgaggaacaccatttcagcaaagaagatattatgtcttccttggaacgagccaagaaacggaatcgtgctgcactgggcacacccaaagttcctaatgtcaaatgggaagatgttggtgggctagaggatgtgaaaaaggttattctagatactattcagttgcctctgatgtacaagcacctgttttcttctaaattgcgcaagcgatcaggtgtcctgctatatggacctccaggaacagggaagactttactcgcgaaagcagtagcaactgaatgctcattgaactttcttagcgtcaaaggtccagaactgataaacatgtatgttggagaatcagagaaaaatgttcgggatatttttgagaaggctaggtctgcacgcccatgtgtcattttctttgatgagcttgattcccttgctcctgcacgaggatcctcagcagattctggcggtgtcatggacagggttgtttcccagttacttgtggagatcgatgggttgagtgacaacagccaggaccttttcattattggggctaccaataggcctgaccttcttgattctgcccttcttcgccctggtcggttcgacaagcttctttatgtcggtgtaaatactgaggcatcatacagggaaaggatccttaaagcacagacacgcaagtataagctgcacaagaacgtttctctcttgtcagttgcgcagcgttgtccaccaaacttcactggtgctgatatttacgcgctgtgtgcggatgcatggtttcatgcagcaaagcgatcagttgaaacattcgaaatcgatccttcaagaagtaatgaagccagtgccgaagaagtcatcgtcgagatcgacgattttatcacggtgttaggagatatcgcaccgtcgctctctctggacgagctacaaaactacgaacagttgaggcagaagatcgaaggaccttctagatgaagttgggtttccactccctgctgacattcttaaactgctaacacaccaaaacattccctgtcttacattttcgttcgtacacaagttttcctccctgaaaacttgggcacttctatatccattcctgatttatacaatcacatccttgtagcagcatctgtattgacatcagaatgacattttctctgaagagaaacatcctgtcattctttgttagcagctccgcaactattctgaatgagcccgtgaagtcaagcactcaaagccttacctgggaaacaaaatgctattcctgacctgaaggaagcatccaccaatacagctagtttgggtacacacgctgaaccagctagttcgcctgggagaggcctctgtctcgtttagatgccatcgtctagaagttgtatcggaaaaattataagcgaatgttgcaatgaacagagttccttgtactgctgtgatttgtcattggtcaaagagaactaactgcagcgtttgtctacctacaatacttgtttttttgttgttgctatcttgtagtgccagcagcgatgcctccttgttggtgctcggcaagtcggctggtgtgagcaaaatccgtacgtcgtcgtctccagtggtgtcattctaaactggatctgctgctctcgagaccgaacaactgcaacaaactcaggcagggactcagcatctacacatcctgttctacggtacgatgttcatttttattaaatctgcaggtgattgtgacacaaatcggctgcatgggaaccatactagctgccaaatgaaagtgttttctccgacccaacctacaatgtgtctgttctttttgggaagagagatg

SEQ ID NO: 217835 - DNA, 3773 bp, Zea Mays
atggcgagcgggggaggggggattcgggcgacgacttcggggaggatgaagtcgcgagggtggggagattcaagcgacgactttgggacaccggctattgcgctgaggcgtgggggcgactgtagtggcacggcgagttcagactccagcgccgtcttcttcgcggtcgccttttgcgctccatcccctgggctttccgtcacggcggccgcagccatggtggagatgcggcagcggaggaagccgctggtgctcgcctccacgcaggcgctcctcgactcgcttccgggggatcgcccgccgccaccgccgcagaagccggtgcgccttaaggccggcgtcctccgattcccctccggaggtggtggcgccgagttcggggagctcgcgtctttcgtcggcatccctgcccctgctctccgacggctcgcggtcgtcacgggtactcctgtgcttgtcaagaatactgacaataatgttgggaggattgtcaaagcagtattgtttggtaacccgtcccttgacaagtcctgctcagaacatactgaccaagtggtctctgcctctctctctggtcatgcaatgggcttcttaccttgtcgcacgttccctgctattggttttacatccatggatgaagatgttggttatgttagcccacttttggcattcaacttgggattgcatgtttcttgccttaaacttcttattcaaagagaagggcagcctttcaagttctgttctcgagctgaagagattgatgcaactgccagttctggaagtgatctttctcttcacttagaccttcttccatgccctcaagtgcctaaatatgcattgcatttacgagtttctgttgtgaggattcctgattgtggtgtgcttgcttctttaaagatatattcatcctttggaggaagtgagtaccaagacatggtagatcaagctttgaacgagtactttaagtttgataggttcctagcaagaggagatgtttttggtatacaaaacagttggaagtgtggctcaagctgctgcctggcatgcaataagcaggataataaactgaatccccgtaatatgatctactttaaggtgactggcatggaaccatcagatgaacctatacttcgtgttaattgcaatgaaacagcccttgtacttggtggagctgcttctgctgcaatccccccttattccttttttgcttcttctggtaattcagtaccattgcacagtgaagtagtggagcatttagcatctgtcattgcaccagcattgtgcccttcggatattttaccaaaaataaagttttccacttttttatatggcccgccaggatgtggaaagcgcacagtggttaggcatgttgctaaccatcttggtctgcatgtggtcgagtgtagctgtcatgatctgatgacatcatcagaaagtggggcacctgctgcacttgcaactgcctttaaagaagctcagaagtattctccttgtataatacttcttcgccactttgatgcaattgggaatgcatcctcaaacgaaggtccacagtctgagcaatctgggattgcatcgaacattgaatctgtcattaagcagtacattggacaacgttgggttgctaaggattcactgccaggaaaagatgtaaatgggagctcatacctcgtggagcctgaatgtgtaagctctcttcaaatcatactagttgcaactgcggacagttctgaaggaatgcaacagtcaattagaagatgcttccgctatgagatcgacatgaagactatgaatgaagaacagagaaacgaactgatatctgagacacttcaaggcattcctaaagttgctgatgagagtatttgtgacaagttcataaaagatttagcagcgcaaacgtcaggtttcatgcccagggacatacttgcattggtcgcagatgctggtgtgtcttttgcgcataaaattgcagcagggaaagatagcaaagcaatcagtaagcatacggaggtccttccagaaagctcttctgccactcaaaatgaggaacaccatttcagcaaagaagatattatgtcttccttggaacgagccaagaaacggaatcgtgctgcactgggcacacccaaagttcctaatgtcaaatgggaagatgttggtgggctagaggatgtgaaaaaggttattctagatactattcagtatttcagttgcctctgatgtacaagcacctgttttcttctaaattgcgcaagcgatcaggtgtcctgctatatggacctccaggaacagggaagactttactcgcgaaagcagtagcaactgaatgctcattgaactttcttagcgtcaaaggtccagaactgataaacatgtatgttggagaatcagagaaaaatgttcgggatatttttgagaaggctaggtctgcacgcccatgtgtcattttctttgatgagcttgattcccttgctcctgcacgaggatcctcagcagattctggcggtgtcatggacagggttgtttcccagttacttgtggagatcgatgggttgagtgacaacagccaggaccttttcattattggggctaccaataggcctgaccttcttgattctgcccttcttcgccctggtcggttcgacaagcttctttatgtcggtgtaaatactgaggcatcatacagggaaaggatccttaaagcacagacacgcaagtataagctgcacaagaacgtttctctcttgtcagttgcgcagcgttgtccaccaaacttcactggtgctgatatttacgcgctgtgtgcggatgcatggtttcatgcagcaaagcgatcagttgaaacattcgaaatcgatccttcaagaagtaatgaagccagtgccgaagaagtcatcgtcgagatcgacgattttatcacggtgttaggagatatcgcaccgtcgctctctctggacgagctacaaaactacgaacagttgaggcagaagatcgaaggaccttctagatgaagttgggtttccactccctgctgacattcttaaactgctaacacaccaaaacattccctgtcttacattttcgttcgtacacaagttttcctccctgaaaacttgggcacttctatatccattcctgatttatacaatcacatccttgtagcagcatctgtattgacatcagaatgacattttctctgaagagaaacatcctgtcattctttgttagcagctccgcaactattctgaatgagcccgtgaagtcaagcactcaaagccttacctgggaaacaaaatgctattcctgacctgaaggaagcatccaccaatacagctagtttgggtacacacgctgaaccagctagttcgcctgggagaggcctctgtctcgtttagatgccatcgtctagaagttgtatcggaaaaattataagcgaatgttgcaatgaacagagttccttgtactgctgtgatttgtcattggtcaaagagaactaactgcagcgtttgtctacctacaatacttgtttttttgttgttgctatcttgtagtgccagcagcgatgcctccttgttggtgctcggcaagtcggctggtgtgagcaaaatccgtacgtcgtcgtctccagtggtgtcattctaaactggatctgctgctctcgagaccgaacaactgcaacaaactcaggcagggactcagcatctacacatcctgttctacggtgattgtgacacaaatcggctgcatgggaaccatactagctgccaagaaag

SEQ ID NO: 217836 - DNA, 3339 bp, Zea Mays
atggcgagcgggggaggggggattcgggcgacgacttcggggaggatgaagtcgcgagggtggggagattcaagcgacgactttgggacaccggctattgcgctgaggcgtgggggcgactgtagtggcacggcgagttcagactccagcgccgtcttcttcgcggtcgccttttgcgctccatcccctgggctttccgtcacggcggccgcagccatggtggagatgcggcagcggaggaagccgctggtgctcgcctccacgcaggcgctcctcgactcgcttccgggggatcgcccgccgccaccgccgcagaagccggtgcgccttaaggccggcgtcctccgattcccctccggaggtggtggcgccgagttcggggagctcgcgtctttcgtcggcatccctgcccctgctctccgacggctcgcggtcgtcacgggtactcctaatactgacaataatgttgggaggattgtcaaagcagtattgtttggtaacccgtcccttgacaagtcctgctcagaacatactgaccaagtggtctctgcctctctctctggtcatgcaatgggcttcttaccttgtcgcacgttccctgctattggttttacatccatggatgaagatgttggttatgttagcccacttttggcattcaacttgggattgcatgtttcttgccttaaacttcttattcaaagagaagggcagcctttcaagttctgttctcgagctgaagagattgatgcaactgccagttctggaagtgatctttctcttcacttagaccttcttccatgccctcaagtgcctaaatatgcattgcatttacgagtttctgttgtgaggattcctgattgtggtgtgcttgcttctttaaagatatattcatcctttggaggaagtgagtaccaagacatggtagatcaagctttgaacgagtactttaagtttttggtatacaaaacagttggaagtgtggctcaagctgctgcctggcatgcaataagcaggataataaactgaatccccgtaatatgatctactttaaggtattctccttgtataatacttcttcgccactttgatgcaattgggaatgcatcctcaaacgaaggtccacagtctgagcaatctgggattgcatcgaacattgaatctgtcattaagcagtacattggacaacgttgggttgctaaggattcactgccaggaaaagatgtaaatgggagctcatacctcgtggagcctgaatgtgtaagctctcttcaaatcatactagttgcaactgcggacagttctgaaggaatgcaacagtcaattagaagatgcttccgctatgagatcgacatgaagactatgaatgaagaacagagaaacgaactgatatctgagacacttcaaggcattcctaaagttgctgatgagagtatttgtgacaagttcataaaagatttagcagcgcaaacgtcaggtttcatgcccagggacatacttgcattggtcgcagatgctggtgtgtcttttgcgcataaaattgcagcagggaaagatagcaaagcaatcagtaagcatacggaggtccttccagaaagctcttctgccactcaaaatgaggaacaccatttcagcaaagaagatattatgtcttccttggaacgagccaagaaacggaatcgtgctgcactgggcacacccaaagttcctaatgtcaaatgggaagatgttggtgggctagaggatgtgaaaaaggttattctagatactattcagttgcctctgatgtacaagcacctgttttcttctaaattgcgcaagcgatcaggtgtcctgctatatggacctccaggaacagggaagactttactcgcgaaagcagtagcaactgaatgctcattgaactttcttagcgtcaaaggtccagaactgataaacatgtatgttggagaatcagagaaaaatgttcgggatatttttgagaaggctaggtctgcacgcccatgtgtcattttctttgatgagcttgattcccttgctcctgcacgaggatcctcagcagattctggcggtgtcatggacagggttgtttcccagttacttgtggagatcgatgggttgagtgacaacagccaggaccttttcattattggggctaccaataggcctgaccttcttgattctgcccttcttcgccctggtcggttcgacaagcttctttatgtcggtgtaaatactgaggcatcatacagggaaaggatccttaaagcacagacacgcaagtataagctgcacaagaacgtttctctcttgtcagttgcgcagcgttgtccaccaaacttcactggtgctgatatttacgcgctgtgtgcggatgcatggtttcatgcagcaaagcgatcagttgaaacattcgaaatcgatccttcaagaagtaatgaagccagtgccgaagaagtcatcgtcgagatcgacgattttatcacggtgttaggagatatcgcaccgtcgctctctctggacgagctacaaaactacgaacagttgaggcagaagatcgaaggaccttctagatgaagttgggtttccactccctgctgacattcttaaactgctaacacaccaaaacattccctgtcttacattttcgttcgtacacaagttttcctccctgaaaacttgggcacttctatatccattcctgatttatacaatcacatccttgtagcagcatctgtattgacatcagaatgacattttctctgaagagaaacatcctgtcattctttgttagcagctccgcaactattctgaatgagcccgtgaagtcaagcactcaaagccttacctgggaaacaaaatgctattcctgacctgaaggaagcatccaccaatacagctagtttgggtacacacgctgaaccagctagttcgcctgggagaggcctctgtctcgtttagatgccatcgtctagaagttgtatcggaaaaattataagcgaatgttgcaatgaacagagttccttgtactgctgtgatttgtcattggtcaaagagaactaactgcagcgtttgtctacctacaatacttgtttttttgttgttgctatcttgtagtgccagcagcgatgcctccttgttggtgctcggcaagtcggctggtgtgagcaaaatccgtacgtcgtcgtctccagtggtgtcattctaaactggatctgctgctctcgagaccgaacaactgcaacaaactcaggcagggactcagcatctacacatcctgttctacggtgattgtgacacaaatcggctgcatgggaaccatactagctgccaagaaag

SEQ ID NO: 217837 - DNA, 3897 bp, Zea Mays
atggcgagcgggggaggggggattcgggcgacgacttcggggaggatgaagtcgcgagggtggggagattcaagcgacgactttgggacaccggctattgcgctgaggcgtgggggcgactgtagtggcacggcgagttcagactccagcgccgtcttcttcgcggtcgccttttgcgctccatcccctgggctttccgtcacggcggccgcagccatggtggagatgcggcagcggaggaagccgctggtgctcgcctccacgcaggcgctcctcgactcgcttccgggggatcgcccgccgccaccgccgcagaagccggtgcgccttaaggccggcgtcctccgattcccctccggaggtggtggcgccgagttcggggagctcgcgtctttcgtcggcatccctgcccctgctctccgacggctcgcggtcgtcacgggtactcctgtgcttgtcaagaatactgacaataatgttgggaggattgtcaaagcagtattgtttggtaacccgtcccttgacaagtcctgctcagaacatactgaccaagtggtctctgcctctctctctggtcatgcaatgggcttcttaccttgtcgcacgttccctgctattggttttacatccatggatgaagatgttggttatgttagcccacttttggcattcaacttgggattgcatgtttcttgccttaaacttcttattcaaagagaagggcagcctttcaagttctgttctcgagctgaagagattgatgcaactgccagttctggaagtgatctttctcttcacttagaccttcttccatgccctcaagtgcctaaatatgcattgcatttacgagtttctgttgtgaggattcctgattgtggtgtgcttgcttctttaaagatatattcatcctttggaggaagtgagtaccaagacatggtagatcaagctttgaacgagtactttaagtttgataggttcctagcaagaggagatgtttttggtatacaaaacagttggaagtgtggctcaagctgctgcctggcatgcaataagcaggataataaactgaatccccgtaatatgatctactttaaggtgactggcatggaaccatcagatgaacctatacttcgtgttaattgcaatgaaacagcccttgtacttggtggagctgcttctgctgcaatccccccttattccttttttgcttcttctggtaattcagtaccattgcacagtgaagtagtggagcatttagcatctgtcattgcaccagcattgtgcccttcggatattttaccaaaaataaagttttccacttttttatatggcccgccaggatgtggaaagcgcacagtggttaggcatgttgctaaccatcttggtctgcatgtggtcgagtgtagctgtcatgatctgatgacatcatcagaaagtggggcacctgctgcacttgcaactgcctttaaagaagctcagaagtattctccttgtataatacttcttcgccactttgatgcaattgggaatgcatcctcaaacgaaggtccacagtctgagcaatctgggattgcatcgaacattgaatctgtcattaagcagtacattggacaacgttgggttgctaaggattcactgccaggaaaagatgtaaatgggagctcatacctcgtggagcctgaatgtgtaagctctcttcaaatcatactagttgcaactgcggacagttctgaaggaatgcaacagtcaattagaagatgcttccgctatgagatcgacatgaagactatgaatgaagaacagagaaacgaactgatatctgagacacttcaaggcattcctaaagttgctgatgagagtatttgtgacaagttcataaaagatttagcagcgcaaacgtcaggtttcatgcccagggacatacttgcattggtcgcagatgctggtgtgtcttttgcgcataaaattgcagcagggaaagatagcaaagcaatcagtaagcatacggaggtccttccagaaagctcttctgccactcaaaatgaggaacaccatttcagcaaagaagatattatgtcttccttggaacgagccaagaaacggaatcgtgctgcactgggcacacccaaagttcctaatgtcaaatgggaagatgttggtgggctagaggatgtgaaaaaggttattctagatactattcagttgcctctgatgtacaagcacctgttttcttctaaattgcgcaagcgatcaggtgtcctgctatatggacctccaggaacagggaagactttactcgcgaaagcagtagcaactgaatgctcattgaactttcttagcgtcaaaggtccagaactgataaacatgtatgttggagaatcagagaaaaatgttcgggatatttttgagaaggctaggtctgcacgcccatgtgtcattttctttgatgagcttgattcccttgctcctgcacgaggatcctcagcagattctggcggtgtcatggacagggttgtttcccaggtatcattagcttcgtccctgaggcggtgtcacaacttctcacaagtcttctgttaaattactgggccagtgtcttctcacttccccccttttcgtgtctactagttacttgtggagatcgatgggttgagtgacaacagccaggaccttttcattattggggctaccaataggcctgaccttcttgattctgcccttcttcgccctggtcggttcgacaagcttctttatgtcggtgtaaatactgaggcatcatacagggaaaggatccttaaagcacagacacgcaagtataagctgcacaagaacgtttctctcttgtcagttgcgcagcgttgtccaccaaacttcactggtgctgatatttacgcgctgtgtgcggatgcatggtttcatgcagcaaagcgatcagttgaaacattcgaaatcgatccttcaagaagtaatgaagccagtgccgaagaagtcatcgtcgagatcgacgattttatcacggtgttaggagatatcgcaccgtcgctctctctggacgagctacaaaactacgaacagttgaggcagaagatcgaaggaccttctagatgaagttgggtttccactccctgctgacattcttaaactgctaacacaccaaaacattccctgtcttacattttcgttcgtacacaagttttcctccctgaaaacttgggcacttctatatccattcctgatttatacaatcacatccttgtagcagcatctgtattgacatcagaatgacattttctctgaagagaaacatcctgtcattctttgttagcagctccgcaactattctgaatgagcccgtgaagtcaagcactcaaagccttacctgggaaacaaaatgctattcctgacctgaaggaagcatccaccaatacagctagtttgggtacacacgctgaaccagctagttcgcctgggagaggcctctgtctcgtttagatgccatcgtctagaagttgtatcggaaaaattataagcgaatgttgcaatgaacagagttccttgtactgctgtgatttgtcattggtcaaagagaactaactgcagcgtttgtctacctacaatacttgtttttttgttgttgctatcttgtagtgccagcagcgatgcctccttgttggtgctcggcaagtcggctggtgtgagcaaaatccgtacgtcgtcgtctccagtggtgtcattctaaactggatctgctgctctcgagaccgaacaactgcaacaaactcaggcagggactcagcatctacacatcctgttctacggtgattgtgacacaaatcggctgcatgggaaccatactagctgccaagtctctctggtgattctagcttaagaatgctg

SEQ ID NO: 217838 - DNA, 3800 bp, Zea Mays
atggcgagcgggggaggggggattcgggcgacgacttcggggaggatgaagtcgcgagggtggggagattcaagcgacgactttgggacaccggctattgcgctgaggcgtgggggcgactgtagtggcacggcgagttcagactccagcgccgtcttcttcgcggtcgccttttgcgctccatcccctgggctttccgtcacggcggccgcagccatggtggagatgcggcagcggaggaagccgctggtgctcgcctccacgcaggcgctcctcgactcgcttccgggggatcgcccgccgccaccgccgcagaagccggtgcgccttaaggccggcgtcctccgattcccctccggaggtggtggcgccgagttcggggagctcgcgtctttcgtcggcatccctgcccctgctctccgacggctcgcggtcgtcacgggtactcctgtgcttgtcaagaatactgacaataatgttgggaggattgtcaaagcagtattgtttggtaacccgtcccttgacaagtcctgctcagaacatactgaccaagtggtctctgcctctctctctggtcatgcaatgggcttcttaccttgtcgcacgttccctgctattggttttacatccatggatgaagatgttggttatgttagcccacttttggcattcaacttgggattgcatgtttcttgccttaaacttcttattcaaagagaagggcagcctttcaagttctgttctcgagctgaagagattgatgcaactgccagttctggaagtgatctttctcttcacttagaccttcttccatgccctcaagtgcctaaatatgcattgcatttacgagtttctgttgtgaggattcctgattgtggtgtgcttgcttctttaaagatatattcatcctttggaggaagtgagtaccaagacatggtagatcaagctttgaacgagtactttaagtttgataggttcctagcaagaggagatgtttttggtatacaaaacagttggaagtgtggctcaagctgctgcctggcatgcaataagcaggataataaactgaatccccgtaatatgatctactttaaggtgactggcatggaaccatcagatgaacctatacttcgtgttaattgcaatgaaacagcccttgtacttggtggagctgcttctgctgcaatccccccttattccttttttgcttcttctggtaattcagtaccattgcacagtgaagtagtggagcatttagcatctgtcattgcaccagcattgtgcccttcggatattttaccaaaaataaagttttccacttttttatatggcccgccaggatgtggaaagcgcacagtggttaggcatgttgctaaccatcttggtctgcatgtggtcgagtgtagctgtcatgatctgatgacatcatcagaaagtggggcacctgctgcacttgcaactgcctttaaagaagctcagaagtattctccttgtataatacttcttcgccactttgatgcaattgggaatgcatcctcaaacgaaggtccacagtctgagcaatctgggattgcatcgaacattgaatctgtcattaagcagtacattggacaacgttgggttgctaaggattcactgccaggaaaagatgtaaatgggagctcatacctcgtggagcctgaatgtgtaagctctcttcaaatcatactagttgcaactgcggacagttctgaaggaatgcaacagtcaattagaagatgcttccgctatgagatcgacatgaagactatgaatgaagaacagagaaacgaactgatatctgagacacttcaaggcattcctaaagttgctgatgagagtatttgtgacaagttcataaaagatttagcagcgcaaacgtcaggtttcatgcccagggacatacttgcattggtcgcagatgctggtgtgtcttttgcgcataaaattgcagcagggaaagatagcaaagcaatcagtaagcatacggaggtccttccagaaagctcttctgccactcaaaatgaggaacaccatttcagcaaagaagatattatgtcttccttggaacgagccaagaaacggaatcgtgctgcactgggcacacccaaagttcctaatgtcaaatgggaagatgttggtgggctagaggatgtgaaaaaggttattctagatactattcagcagttgcctctgatgtacaagcacctgttttcttctaaattgcgcaagcgatcaggtgtcctgctatatggacctccaggaacagggaagactttactcgcgaaagcagtagcaactgaatgctcattgaactttcttagcgtcaaaggtccagaactgataaacatgtatgttggagaatcagagaaaaatgttcgggatatttttgagaaggctaggtctgcacgcccatgtgtcattttctttgatgagcttgattcccttgctcctgcacgaggatcctcagcagattctggcggtgtcatggacagggttgtttcccagttacttgtggagatcgatgggttgagtgacaacagccaggaccttttcattattggggctaccaataggcctgaccttcttgattctgcccttcttcgccctggtcggttcgacaagcttctttatgtcggtgtaaatactgaggcatcatacagggaaaggatccttaaagcacagacacgcaagtataagctgcacaagaacgtttctctcttgtcagttgcgcagcgttgtccaccaaacttcactggtgctgatatttacgcgctgtgtgcggatgcatggtttcatgcagcaaagcgatcagttgaaacattcgaaatcgatccttcaagaagtaatgaagccagtgccgaagaagtcatcgtcgagatcgacgattttatcacggtgttaggagatatcgcaccgtcgctctctctggacgagctacaaaactacgaacagttgaggcagaagatcgaaggaccttctagatgaagttgggtttccactccctgctgacattcttaaactgctaacacaccaaaacattccctgtcttacattttcgttcgtacacaagttttcctccctgaaaacttgggcacttctatatccattcctgatttatacaatcacatccttgtagcagcatctgtattgacatcagaatgacattttctctgaagagaaacatcctgtcattctttgttagcagctccgcaactattctgaatgagcccgtgaagtcaagcactcaaagccttacctgggaaacaaaatgctattcctgacctgaaggaagcatccaccaatacagctagtttgggtacacacgctgaaccagctagttcgcctgggagaggcctctgtctcgtttagatgccatcgtctagaagttgtatcggaaaaattataagcgaatgttgcaatgaacagagttccttgtactgctgtgatttgtcattggtcaaagagaactaactgcagcgtttgtctacctacaatacttgtttttttgttgttgctatcttgtagtgccagcagcgatgcctccttgttggtgctcggcaagtcggctggtgtgagcaaaatccgtacgtcgtcgtctccagtggtgtcattctaaactggatctgctgctctcgagaccgaacaactgcaacaaactcaggcagggactcagcatctacacatcctgttctacggtacggtgattgtgacacaaatcggctgcatgggaaccatactagctgccaagtctctctggtgattctagcttaagaatgctg

SEQ ID NO: 217839 - DNA, 3708 bp, Zea Mays
atggcgagcgggggaggggggattcgggcgacgacttcggggaggatgaagtcgcgagggtggggagattcaagcgacgactttgggacaccggctattgcgctgaggcgtgggggcgactgtagtggcacggcgagttcagactccagcgccgtcttcttcgcggtcgccttttgcgctccatcccctgggctttccgtcacggcggccgcagccatggtggagatgcggcagcggaggaagccgctggtgctcgcctccacgcaggcgctcctcgactcgcttccgggggatcgcccgccgccaccgccgcagaagccggtgcgccttaaggccggcgtcctccgattcccctccggaggtggtggcgccgagttcggggagctcgcgtctttcgtcggcatccctgcccctgctctccgacggctcgcggtcgtcacgggtactcctgtgcttgtcaagaatactgacaataatgttgggaggattgtcaaagcagtattgtttggtaacccgtcccttgacaagtcctgctcagaacatactgaccaagtggtctctgcctctctctctggtcatgcaatgggcttcttaccttgtcgcacgttccctgctattggttttacatccatggatgaagatgttggttatgttagcccacttttggcattcaacttgggattgcatgtttcttgccttaaacttcttattcaaagagaagggcagcctttcaagttctgttctcgagctgaagagattgatgcaactgccagttctggaagtgatctttctcttcacttagaccttcttccatgccctcaagtgcctaaatatgcattgcatttacgagtttctgttgtgaggattcctgattgtggtgtgcttgcttctttaaagatatattcatcctttggaggaagtgagtaccaagacatggtagatcaagctttgaacgagtactttaagtttgataggttcctagcaagaggagatgtttttggtatacaaaacagttggaagtgtggctcaagctgctgcctggcatgcaataagcaggataataaactgaatccccgtaatatgatctactttaaggtgactggcatggaaccatcagatgaacctatacttcgtgttaattgcaatgaaacagcccttgtacttggtggagctgcttctgctgcaatccccccttattccttttttgcttcttctggtaattcagtaccattgcacagtgaagtagtggagcatttagcatctgtcattgcaccagcattgtgcccttcggatattttaccaaaaataaagttttccacttttttatatggcccgccaggatgtggaaagcgcacagtggttaggcatgttgctaaccatcttggtctgcatgtggtcgagtgtagctgtcatgatctgatgacatcatcagaaagtggggcacctgctgcacttgcaactgcctttaaagaagctcagaagtattctccttgtataatacttcttcgccactttgatgcaattgggaatgcatcctcaaacgaaggtccacagtctgagcaatctgggattgcatcgaacattgaatctgtcattaagcagtacattggacaacgttgggttgctaaggattcactgccaggaaaagatgtaaatgggagctcatacctcgtggagcctgaatgtgtaagctctcttcaaatcatactagttgcaactgcggacagttctgaaggaatgcaacagtcaattagaagatgcttccgctatgagatcgacatgaagactatgaatgaagaacagagaaacgaactgatatctgagacacttcaaggcattcctaaagttgctgatgagagtatttgtgacaagttcataaaagatttagcagcgcaaacgtcaggtttcatgcccagggacatacttgcattggtcgcagatgctggtgtgtcttttgcgcataaaattgcagcagggaaagatagcaaagcaatcagtaagcatacggaggtccttccagaaagctcttctgccactcaaaatgaggaacaccatttcagcaaagaagatattatgtcttccttggaacgagccaagaaacggaatcgtgctgcactgggcacacccaaagttcctaatgtcaaatgggaagatgttggtgggctagaggatgtgaaaaaggttattctagatactattcagttgcctctgatgtacaagcacctgttttcttctaaattgcgcaagcgatcaggtgtcctgctatatggacctccaggaacagggaagcgtcaaaggtccagaactgataaacatgtatgttggagaatcagagaaaaatgttcgggatatttttgagaaggctaggtctgcacgcccatgtgtcattttctttgatgagcttgattcccttgctcctgcacgaggatcctcagcagattctggcggtgtcatggacagggttgtttcccagttacttgtggagatcgatgggttgagtgacaacagccaggaccttttcattattggggctaccaataggcctgaccttcttgattctgcccttcttcgccctggtcggttcgacaagcttctttatgtcggtgtaaatactgaggcatcatacagggaaaggatccttaaagcacagacacgcaagtataagctgcacaagaacgtttctctcttgtcagttgcgcagcgttgtccaccaaacttcactggtgctgatatttacgcgctgtgtgcggatgcatggtttcatgcagcaaagcgatcagttgaaacattcgaaatcgatccttcaagaagtaatgaagccagtgccgaagaagtcatcgtcgagatcgacgattttatcacggtgttaggagatatcgcaccgtcgctctctctggacgagctacaaaactacgaacagttgaggcagaagatcgaaggaccttctagatgaagttgggtttccactccctgctgacattcttaaactgctaacacaccaaaacattccctgtcttacattttcgttcgtacacaagttttcctccctgaaaacttgggcacttctatatccattcctgatttatacaatcacatccttgtagcagcatctgtattgacatcagaatgacattttctctgaagagaaacatcctgtcattctttgttagcagctccgcaactattctgaatgagcccgtgaagtcaagcactcaaagccttacctgggaaacaaaatgctattcctgacctgaaggaagcatccaccaatacagctagtttgggtacacacgctgaaccagctagttcgcctgggagaggcctctgtctcgtttagatgccatcgtctagaagttgtatcggaaaaattataagcgaatgttgcaatgaacagagttccttgtactgctgtgatttgtcattggtcaaagagaactaactgcagcgtttgtctacctacaatacttgtttttttgttgttgctatcttgtagtgccagcagcgatgcctccttgttggtgctcggcaagtcggctggtgtgagcaaaatccgtacgtcgtcgtctccagtggtgtcattctaaactggatctgctgctctcgagaccgaacaactgcaacaaactcaggcagggactcagcatctacacatcctgttctacggtgattgtgacacaaatcggctgcatgggaaccatactagctgcc

SEQ ID NO: 217840 - DNA, 3190 bp, Zea Mays
atggcgagcgggggaggggggattcgggcgacgacttcggggaggatgaagtcgcgagggtggggagattcaagcgacgactttgggacaccggctattgcgctgaggcgtgggggcgactgtagtggcacggcgagttcagactccagcgccgtcttcttcgcggtcgccttttgcgctccatcccctgggctttccgtcacggcggccgcagccatggtggagatgcggcagcggaggaagccgctggtgctcgcctccacgcaggcgctcctcgactcgcttccgggggatcgcccgccgccaccgccgcagaagccggtgcgccttaaggccggcgtcctccgattcccctccggaggtggtggcgccgagttcggggagctcgcgtctttcgtcggcatccctgcccctgctctccgacggctcgcggtcgtcacgggtactcctgtgcttgtcaagaatactgacaataatgttgggaggattgtcaaagcagtattgtttggtaacccgtcccttgacaagtcctgctcagaacatactgaccaagtggtctctgcctctctctctggtcatgcaatgggcttcttaccttgtcgcacgttccctgctattggttttacatccatggatgaagatgttggttatgttagcccacttttggcattcaacttgggattgcatgtttcttgccttaaacttcttattcaaagagaagggcagcctttcaagttctgttctcgagctgaagagattgatgcaactgccagttctggaagtgatctttctcttcacttagaccttcttccatgccctcaagtgcctaaatatgcattgcatttacgagtttctgttgtgaggattcctgattgtggtgtgcttgcttctttaaagatatattcatcctttggaggaagtgagtaccaagacatggtagatcaagctttgaacgagtactttaagtttgataggttcctagcaagaggagatgtttttggtatacaaaacagttggaagtgtggctcaagctgctgcctggcatgcaataagcaggataataaactgaatccccgtaatatgatctactttaaggtgactggcatggaaccatcagatgaacctatacttcgtgttaattgcaatgaaacagcccttgtacttggtggagctgcttctgctgcaatccccccttattccttttttgcttcttctggtaattcagtaccattgcacagtgaagtagtggagcatttagcatctgtcattgcaccagcattgtgcccttcggatattttaccaaaaataaagttttccacttttttatatggcccgccaggatgtggaaagcgcacagtggttaggcatgttgctaaccatcttggtctgcatgtggtcgagtgtagctgtcatgatctgatgacatcatcagaaagtggggcacctgctgcacttgcaactgcctttaaagaagctcagaagtattctccttgtataatacttcttcgccactttgatgcaattgggaatgcatcctcaaacgaaggtccacagtctgagcaatctgggattgcatcgaacattgaatctgtcattaagcagtacattggacaacgttgggttgctaaggattcactgccaggaaaagatgtaaatgggagctcatacctcgtggagcctgaatgtgtaagctctcttcaaatcatactagttgcaactgcggacagttctgaaggaatgcaacagtcaattagaagatgcttccgctatgagatcgacatgaagactatgaatgaagaacagagaaacgaactgatatctgagacacttcaaggcattcctaaagttgctgatgagagtatttgtgacaagttcataaaagatttagcagcgcaaacgtcaggtttcatgcccagggacatacttgcattggtcgcagatgctggtgtgtcttttgcgcataaaattgcagcagggaaagatagcaaagcaatcagtaagcatacggaggtccttccagaaagctcttctgccactcaaaatgaggaacaccatttcagcaaagaagatattatgtcttccttggaacgagccaagaaacggaatcgtgctgcactgggcacacccaaagttcctaatgtcaaatgggaagatgttggtgggctagaggatgtgaaaaaggttattctagatactattcagttgcctctgatgtacaagcacctgttttcttctaaattgcgcaagcgatcaggtgtcctgctatatggacctccaggaacagggaagactttactcgcgaaagcagtagcaactgaatgctcattgaactttcttagcgtcaaaggtccagaactgataaacatgtatgttggagaatcagagaaaaatgttcgggatatttttgagaaggctaggtctgcacgcccatgtgtcattttctttgatgagcttgattcccttgctcctgcacgaggatcctcagcagattctggcggtgtcatggacagggttgtttcccagttacttgtggagatcgatgggttgagtgacaacagccaggcctgaccttcttgattctgcccttcttcgccctggtcggttcgacaagcttctttatgtcggtgtaaatactgaggcatcatacagggaaaggatccttaaagcacagacacgcaagtataagctgcacaagaacgtttctctcttgtcagttgcgcagcgttgtccaccaaacttcactggtgctgatatttacgcgctgtgtgcggatgcatggtttcatgcagcaaagcgatcagttgaaacattcgaaatcgatccttcaagaagtaatgaagccagtgccgaagaagtcatcgtcgagatcgacgattttatcacggtgttaggagatatcgcaccgtcgctctctctggacgagctacaaaactacgaacagttgaggcagaagatcgaaggaccttctagatgaatgccagcagcgatgcctccttgttggtgctcggcaagtcggctggtgtgagcaaaatccgtacgtcgtcgtctccagtggtgtcattctaaactggatctgctgctctcgagaccgaacaactgcaacaaactcaggcagggactcagcatctacacatcctgttctacggtgattgtgacacaaatcggctgcatgggaaccatactagctgcc

SEQ ID NO: 217841 - DNA, 3633 bp, Zea Mays
atggcgagcgggggaggggggattcgggcgacgacttcggggaggatgaagtcgcgagggtggggagattcaagcgacgactttgggacaccggctattgcgctgaggcgtgggggcgactgtagtggcacggcgagttcagactccagcgccgtcttcttcgcggtcgccttttgcgctccatcccctgggctttccgtcacggcggccgcagccatggtggagatgcggcagcggaggaagccgctggtgctcgcctccacgcaggcgctcctcgactcgcttccgggggatcgcccgccgccaccgccgcagaagccggtgcgccttaaggccggcgtcctccgattcccctccggaggtggtggcgccgagttcggggagctcgcgtctttcgtcggcatccctgcccctgctctccgacggctcgcggtcgtcacgggtactcctgtgcttgtcaagaatactgacaataatgttgggaggattgtcaaagcagtattgtttggtaacccgtcccttgacaagtcctgctcagaacatactgaccaagtggtctctgcctctctctctggtcatgcaatgggcttcttaccttgtcgcacgttccctgctattggttttacatccatggatgaagatgttggttatgttagcccacttttggcattcaacttgggattgcatgtttcttgccttaaacttcttattcaaagagaagggcagcctttcaagttctgttctcgagctgaagagattgatgcaactgccagttctggaagtgatctttctcttcacttagaccttcttccatgccctcaagtgcctaaatatgcattgcatttacgagtttctgttgtgaggattcctgattgtggtgtgcttgcttctttaaagatatattcatcctttggaggaagtgagtaccaagacatggtagatcaagctttgaacgagtactttaagtttgataggttcctagcaagaggagatgtttttggtatacaaaacagttggaagtgtggctcaagctgctgcctggcatgcaataagcaggataataaactgaatccccgtaatatgatctactttaagtaccattgcacagtgaagtagtggagcatttagcatctgtcattgcaccagcattgtgcccttcggatattttaccaaaaataaagttttccacttttttatatggcccgccaggatgtggaaagcgcacagtggttaggcatgttgctaaccatcttggtctgcatgtggtcgagtgtagctgtcatgatctgatgacatcatcagaaagtggggcacctgctgcacttgcaactgcctttaaagaagctcagaagtattctccttgtataatacttcttcgccactttgatgcaattgggaatgcatcctcaaacgaaggtccacagtctgagcaatctgggattgcatcgaacattgaatctgtcattaagcagtacattggacaacgttgggttgctaaggattcactgccaggaaaagatgtaaatgggagctcatacctcgtggagcctgaatgtgtaagctctcttcaaatcatactagttgcaactgcggacagttctgaaggaatgcaacagtcaattagaagatgcttccgctatgagatcgacatgaagactatgaatgaagaacagagaaacgaactgatatctgagacacttcaaggcattcctaaagttgctgatgagagtatttgtgacaagttcataaaagatttagcagcgcaaacgtcaggtttcatgcccagggacatacttgcattggtcgcagatgctggtgtgtcttttgcgcataaaattgcagcagggaaagatagcaaagcaatcagtaagcatacggaggtccttccagaaagctcttctgccactcaaaatgaggaacaccatttcagcaaagaagatattatgtcttccttggaacgagccaagaaacggaatcgtgctgcactgggcacacccaaagttcctaatgtcaaatgggaagatgttggtgggctagaggatgtgaaaaaggttattctagatactattcagttgcctctgatgtacaagcacctgttttcttctaaattgcgcaagcgatcaggtgtcctgctatatggacctccaggaacagggaagactttactcgcgaaagcagtagcaactgaatgctcattgaactttcttagcgtcaaaggtccagaactgataaacatgtatgttggagaatcagagaaaaatgttcgggatatttttgagaaggctaggtctgcacgcccatgtgtcattttctttgatgagcttgattcccttgctcctgcacgaggatcctcagcagattctggcggtgtcatggacagggttgtttcccagttacttgtggagatcgatgggttgagtgacaacagccaggaccttttcattattggggctaccaataggcctgaccttcttgattctgcccttcttcgccctggtcggttcgacaagcttctttatgtcggtgtaaatactgaggcatcatacagggaaaggatccttaaagcacagacacgcaagtataagctgcacaagaacgtttctctcttgtcagttgcgcagcgttgtccaccaaacttcactggtgctgatatttacgcgctgtgtgcggatgcatggtttcatgcagcaaagcgatcagttgaaacattcgaaatcgatccttcaagaagtaatgaagccagtgccgaagaagtcatcgtcgagatcgacgattttatcacggtgttaggagatatcgcaccgtcgctctctctggacgagctacaaaactacgaacagttgaggcagaagatcgaaggaccttctagatgaagttgggtttccactccctgctgacattcttaaactgctaacacaccaaaacattccctgtcttacattttcgttcgtacacaagttttcctccctgaaaacttgggcacttctatatccattcctgatttatacaatcacatccttgtagcagcatctgtattgacatcagaatgacattttctctgaagagaaacatcctgtcattctttgttagcagctccgcaactattctgaatgagcccgtgaagtcaagcactcaaagccttacctgggaaacaaaatgctattcctgacctgaaggaagcatccaccaatacagctagtttgggtacacacgctgaaccagctagttcgcctgggagaggcctctgtctcgtttagatgccatcgtctagaagttgtatcggaaaaattataagcgaatgttgcaatgaacagagttccttgtactgctgtgatttgtcattggtcaaagagaactaactgcagcgtttgtctacctacaatacttgtttttttgttgttgctatcttgtagtgccagcagcgatgcctccttgttggtgctcggcaagtcggctggtgtgagcaaaatccgtacgtcgtcgtctccagtggtgtcattctaaactggatctgctgctctcgagaccgaacaactgcaacaaactcaggcagggactcagcatctacacatcctgttctacggtacggtgattgtgacacaaatcggctgcatgggaaccatactagctgcc

SEQ ID NO: 217842 - DNA, 3751 bp, Zea Mays
atggcgagcgggggaggggggattcgggcgacgacttcggggaggatgaagtcgcgagggtggggagattcaagcgacgactttgggacaccggctattgcgctgaggcgtgggggcgactgtagtggcacggcgagttcagactccagcgccgtcttcttcgcggtcgccttttgcgctccatcccctgggctttccgtcacggcggccgcagccatggtggagatgcggcagcggaggaagccgctggtgctcgcctccacgcaggcgctcctcgactcgcttccgggggatcgcccgccgccaccgccgcagaagccggtgcgccttaaggccggcgtcctccgattcccctccggaggtggtggcgccgagttcggggagctcgcgtctttcgtcggcatccctgcccctgctctccgacggctcgcggtcgtcacgggtactcctaatactgacaataatgttgggaggattgtcaaagcagtattgtttggtaacccgtcccttgacaagtcctgctcagaacatactgaccaagtggtctctgcctctctctctggtcatgcaatgggcttcttaccttgtcgcacgttccctgctattggttttacatccatggatgaagatgttggttatgttagcccacttttggcattcaacttgggattgcatgtttcttgccttaaacttcttattcaaagagaagggcagcctttcaagttctgttctcgagctgaagagattgatgcaactgccagttctggaagtgatctttctcttcacttagaccttcttccatgccctcaagtgcctaaatatgcattgcatttacgagtttctgttgtgaggattcctgattgtggtgtgcttgcttctttaaagatatattcatcctttggaggaagtgagtaccaagacatggtagatcaagctttgaacgagtactttaagtttgataggttcctagcaagaggagatgtttttggtatacaaaacagttggaagtgtggctcaagctgctgcctggcatgcaataagcaggataataaactgaatccccgtaatatgatctactttaaggtgactggcatggaaccatcagatgaacctatacttcgtgttaattgcaatgaaacagcccttgtacttggtggagctgcttctgctgcaatccccccttattccttttttgcttcttctggtaattcagtaccattgcacagtgaagtagtggagcatttagcatctgtcattgcaccagcattgtgcccttcggatattttaccaaaaataaagttttccacttttttatatggcccgccaggatgtggaaagcgcacagtggttaggcatgttgctaaccatcttggtctgcatgtggtcgagtgtagctgtcatgatctgatgacatcatcagaaagtggggcacctgctgcacttgcaactgcctttaaagaagctcagaagtattctccttgtataatacttcttcgccactttgatgcaattgggaatgcatcctcaaacgaaggtccacagtctgagcaatctgggattgcatcgaacattgaatctgtcattaagcagtacattggacaacgttgggttgctaaggattcactgccaggaaaagatgtaaatgggagctcatacctcgtggagcctgaatgtgtaagctctcttcaaatcatactagttgcaactgcggacagttctgaaggaatgcaacagtcaattagaagatgcttccgctatgagatcgacatgaagactatgaatgaagaacagagaaacgaactgatatctgagacacttcaaggcattcctaaagttgctgatgagagtatttgtgacaagttcataaaagatttagcagcgcaaacgtcaggtttcatgcccagggacatacttgcattggtcgcagatgctggtgtgtcttttgcgcataaaattgcagcagggaaagatagcaaagcaatcagtaagcatacggaggtccttccagaaagctcttctgccactcaaaatgaggaacaccatttcagcaaagaagatattatgtcttccttggaacgagccaagaaacggaatcgtgctgcactgggcacacccaaagttcctaatgtcaaatgggaagatgttggtgggctagaggatgtgaaaaaggttattctagatactattcagttgcctctgatgtacaagcacctgttttcttctaaattgcgcaagcgatcaggtgtcctgctatatggacctccaggaacagggaagactttactcgcgaaagcagtagcaactgaatgctcattgaactttcttagcgtcaaaggtccagaactgataaacatgtatgttggagaatcagagaaaaatgttcgggatatttttgagaaggctaggtctgcacgcccatgtgtcattttctttgatgagcttgattcccttgctcctgcacgaggatcctcagcagattctggcggtgtcatggacagggttgtttcccagttacttgtggagatcgatgggttgagtgacaacagccaggaccttttcattattggggctaccaataggcctgaccttcttgattctgcccttcttcgccctggtcggttcgacaagcttctttatgtcggtgtaaatactgaggcatcatacagggaaaggatccttaaagcacagacacgcaagtataagctgcacaagaacgtttctctcttgtcagttgcgcagcgttgtccaccaaacttcactggtgctgatatttacgcgctgtgtgcggatgcatggtttcatgcagcaaagcgatcagttgaaacattcgaaatcgatccttcaagaagtaatgaagccagtgccgaagaagtcatcgtcgagatcgacgattttatcacggtgttaggagatatcgcaccgtcgctctctctggacgagctacaaaactacgaacagttgaggcagaagatcgaaggaccttctagatgaagttgggtttccactccctgctgacattcttaaactgctaacacaccaaaacattccctgtcttacattttcgttcgtacacaagttttcctccctgaaaacttgggcacttctatatccattcctgatttatacaatcacatccttgtagcagcatctgtattgacatcagaatgacattttctctgaagagaaacatcctgtcattctttgttagcagctccgcaactattctgaatgagcccgtgaagtcaagcactcaaagccttacctgggaaacaaaatgctattcctgacctgaaggaagcatccaccaatacagctagtttgggtacacacgctgaaccagctagttcgcctgggagaggcctctgtctcgtttagatgccatcgtctagaagttgtatcggaaaaattataagcgaatgttgcaatgaacagagttccttgtactgctgtgatttgtcattggtcaaagagaactaactgcagcgtttgtctacctacaatacttgtttttttgttgttgctatcttgtagtgccagcagcgatgcctccttgttggtgctcggcaagtcggctggtgtgagcaaaatccgtacgtcgtcgtctccagtggtgtcattctaaactggatctgctgctctcgagaccgaacaactgcaacaaactcaggcagggactcagcatctacacatcctgttctacggtacggtgattgtgacacaaatcggctgcatgggaaccatactagctgcc

SEQ ID NO: 217843 - DNA, 3700 bp, Zea Mays
atggcgagcgggggaggggggattcgggcgacgacttcggggaggatgaagtcgcgagggtggggagattcaagcgacgactttgggacaccggctattgcgctgaggcgtgggggcgactgtagtggcacggcgagttcagactccagcgccgtcttcttcgcggtcgccttttgcgctccatcccctgggctttccgtcacggcggccgcagccatggtggagatgcggcagcggaggaagccgctggtgctcgcctccacgcaggcgctcctcgactcgcttccgggggatcgcccgccgccaccgccgcagaagccggtgcgccttaaggccggcgtcctccgattcccctccggaggtggtggcgccgagttcggggagctcgcgtctttcgtcggcatccctgcccctgctctccgacggctcgcggtcgtcacgggtactcctgtgcttgtcaagaatactgacaataatgttgggaggattgtcaaagcagtattgtttggtaacccgtcccttgacaagtcctgctcagaacatactgaccaagtggtctctgcctctctctctggtcatgcaatgggcttcttaccttgtcgcacgttccctgctattggttttacatccatggatgaagatgttggttatgttagcccacttttggcattcaacttgggattgcatgtttcttgccttaaacttcttattcaaagagaagggcagcctttcaagttctgttctcgagctgaagagattgatgcaactgccagttctggaagtgatctttctcttcacttagaccttcttccatgccctcaagtgcctaaatatgcattgcatttacgagtttctgttgtgaggattcctgattgtggtgtgcttgcttctttaaagatatattcatcctttggaggaagtgagtaccaagacatggtagatcaagctttgaacgagtactttaagtttgataggttcctagcaagaggagatgtttttggtatacaaaacagttggaagtgtggctcaagctgctgcctggcatgcaataagcaggataataaactgaatccccgtaatatgatctactttaaggtgactggcatggaaccatcagatgaacctatacttcgtgttaattgcaatgaaacagcccttgtacttggtggagctgcttctgctgcaatccccccttattccttttttgcttcttctggtaattcagtaccattgcacagtgaagtagtggagcatttagcatctgtcattgcaccagcattgtgcccttcggatattttaccaaaaataaagttttccacttttttatatggcccgccaggatgtggaaagcgcacagtggttaggcatgttgctaaccatcttggtctgcatgtggtcgagtgtagctgtcatgatctgatgacatcatcagaaagtggggcacctgctgcacttgcaactgcctttaaagaagctcagaagtattctccttgtataatacttcttcgccactttgatgcaattgggaatgcatcctcaaacgaaggtccacagtctgagcaatctgggattgcatcgaacattgaatctgtcattaagcagtacattggacaacgttgggttgctaaggattcactgccaggaaaagatgtaaatgggagctcatacctcgtggagcctgaatgtgtaagctctcttcaaatcatactagttgcaactgcggacagttctgaaggaatgcaacagtcaattagaagatgcttccgctatgagatcgacatgaagactatgaatgaagaacagagaaacgaactgatatctgagacacttcaaggcattcctaaagttgctgatgagagtatttgtgacaagttcataaaagatttagcagcgcaaacgtcaggtttcatgcccagggacatacttgcattggtcgcagatgctggtgtgtcttttgcgcataaaattgcagcagggaaagatagcaaagcaatcagtaagcatacggaggtccttccagaaagctcttctgccactcaaaatgaggaacaccatttcagcaaagaagatattatgtcttccttggaacgagccaagaaacggaatcgtgctgcactgggcacacccaaagttcctaatgtcaaatgggaagatgttggtgggctagaggatgtgaaaaaggttattctagatactattcagttgcctctgatgtacaagcacctgttttcttctaaattgcgcaagcgatcaggtgtcctgctatatggacctccaggaacagggaaggtccagaactgataaacatgtatgttggagaatcagagaaaaatgttcgggatatttttgagaaggctaggtctgcacgcccatgtgtcattttctttgatgagcttgattcccttgctcctgcacgaggatcctcagcagattctggcggtgtcatggacagggttgtttcccagttacttgtggagatcgatgggttgagtgacaacagccaggaccttttcattattggggctaccaataggcctgaccttcttgattctgcccttcttcgccctggtcggttcgacaagcttctttatgtcggtgtaaatactgaggcatcatacagggaaaggatccttaaagcacagacacgcaagtataagctgcacaagaacgtttctctcttgtcagttgcgcagcgttgtccaccaaacttcactggtgctgatatttacgcgctgtgtgcggatgcatggtttcatgcagcaaagcgatcagttgaaacattcgaaatcgatccttcaagaagtaatgaagccagtgccgaagaagtcatcgtcgagatcgacgattttatcacggtgttaggagatatcgcaccgtcgctctctctggacgagctacaaaactacgaacagttgaggcagaagatcgaaggaccttctagatgaagttgggtttccactccctgctgacattcttaaactgctaacacaccaaaacattccctgtcttacattttcgttcgtacacaagttttcctccctgaaaacttgggcacttctatatccattcctgatttatacaatcacatccttgtagcagcatctgtattgacatcagaatgacattttctctgaagagaaacatcctgtcattctttgttagcagctccgcaactattctgaatgagcccgtgaagtcaagcactcaaagccttacctgggaaacaaaatgctattcctgacctgaaggaagcatccaccaatacagctagtttgggtacacacgctgaaccagctagttcgcctgggagaggcctctgtctcgtttagatgccatcgtctagaagttgtatcggaaaaattataagcgaatgttgcaatgaacagagttccttgtactgctgtgatttgtcattggtcaaagagaactaactgcagcgtttgtctacctacaatacttgtttttttgttgttgctatcttgtagtgccagcagcgatgcctccttgttggtgctcggcaagtcggctggtgtgagcaaaatccgtacgtcgtcgtctccagtggtgtcattctaaactggatctgctgctctcgagaccgaacaactgcaacaaactcaggcagggactcagcatctacacatcctgttctacggtgattgtgacacaaatcggctgcatgggaaccatactagctgcc

SEQ ID NO: 217844 - DNA, 3737 bp, Zea Mays
atggcgagcgggggaggggggattcgggcgacgacttcggggaggatgaagtcgcgagggtggggagattcaagcgacgactttgggacaccggctattgcgctgaggcgtgggggcgactgtagtggcacggcgagttcagactccagcgccgtcttcttcgcggtcgccttttgcgctccatcccctgggctttccgtcacggcggccgcagccatggtggagatgcggcagcggaggaagccgctggtgctcgcctccacgcaggcgctcctcgactcgcttccgggggatcgcccgccgccaccgccgcagaagccggtgcgccttaaggccggcgtcctccgattcccctccggaggtggtggcgccgagttcggggagctcgcgtctttcgtcggcatccctgcccctgctctccgacggctcgcggtcgtcacgggtactcctgtgcttgtcaagaatactgacaataatgttgggaggattgtcaaagcagtattgtttggtaacccgtcccttgacaagtcctgctcagaacatactgaccaagtggtctctgcctctctctctggtcatgcaatgggcttcttaccttgtcgcacgttccctgctattggttttacatccatggatgaagatgttggttatgttagcccacttttggcattcaacttgggattgcatgtttcttgccttaaacttcttattcaaagagaagggcagcctttcaagttctgttctcgagctgaagagattgatgcaactgccagttctggaagtgatctttctcttcacttagaccttcttccatgccctcaagtgcctaaatatgcattgcatttacgagtttctgttgtgaggattcctgattgtggtgtgcttgcttctttaaagatatattcatcctttggaggaagtgagtaccaagacatggtagatcaagctttgaacgagtactttaagtttgataggttcctagcaagaggagatgtttttggtatacaaaacagttggaagtgtggctcaagctgctgcctggcatgcaataagcaggataataaactgaatccccgtaatatgatctactttaaggtgactggcatggaaccatcagatgaacctatacttcgtgttaattgcaatgaaacagcccttgtacttggtggagctgcttctgctgcaatccccccttattccttttttgcttcttctggtaattcagtaccattgcacagtgaagtagtggagcatttagcatctgtcattgcaccagcattgtgcccttcggatattttaccaaaaataaagttttccacttttttatatggcccgccaggatgtggaaagcgcacagtggttaggcatgttgctaaccatcttggtctgcatgtggtcgagtgtagctgtcatgatctgatgacatcatcagaaagtggggcacctgctgcacttgcaactgcctttaaagaagctcagaagtattctccttgtataatacttcttcgccactttgatgcaattgggaatgcatcctcaaacgaaggtccacagtctgagcaatctgggattgcatcgaacattgaatctgtcattaagcagtacattggacaacgttgggttgctaaggattcactgccaggaaaagatgtaaatgggagctcatacctcgtggagcctgaatgtgtaagctctcttcaaatcatactagttgcaactgcggacagttctgaaggaatgcaacagtcaattagaagatgcttccgctatgagatcgacatgaagactatgaatgaagaacagagaaacgaactgatatctgagacacttcaaggcattcctaaagttgctgatgagagtatttgtgacaagttcataaaagatttagcagcgcaaacgtcaggtttcatgcccagggacatacttgcattggtcgcagatgctggtgtgtcttttgcgcataaaattgcagcagggaaagatagcaaagcaatcagtaagcatacggaggtccttccagaaagctcttctgccactcaaaatgaggaacaccatttcagcaaagaagatattatgtcttccttggaacgagccaagaaacggaatcgtgctgcactgggcacacccaaagttcctaatgtcaaatgggaagatgttggtgggctagaggatgtgaaaaaggttattctagatactattcagttgcctctgatgtacaagcacctgttttcttctaaattgcgcaagcgatcaggtgtcctgctatatggacctccaggaacagggaagactttactcgcgaaagcagtagcaactgaatgctcattgaactttcttagcgtcaaaggtccagaactgataaacatgtatgttggagaatcagagaaaaatgttcgggatatttttgagaaggctaggtctgcacgcccatgtgtcattttctttgatgagcttgattcccttgctcctgcacgaggatcctcagcagattctggcggtgtcatggacagggttgtttcccagttacttgtggagatcgatgggttgagtgacaacagccaggaccttttcattattggggctaccaataggcctgaccttcttgattctgcccttcttcgccctggtcggttcgacaagcttctttatgtcggtgtaaatactgaggcatcatacagggaaaggatccttaaagcacagacacgcaagtataagctgcacaagaacgtttctctcttgtcagttgcgcagcgttgtccaccaaacttcactggtgctgatatttacgcgctgtgtgcggatgcatggtttcatgcagcaaagcgatcagttgaaacattcgaaatcgatccttcaagaagtaatgaagccagtgccgaagaagtcatcgtcgagatcgacgattttatcacggtgttaggagatatcgcaccgtcgctctctctggacgagctacaaaactacgaacagttgaggcagaagatcgaaggaccttctagatgaagttgggtttccactccctgctgacattcttaaactgctaacacaccaaaacattccctgtcttacattttcgttcgtacacaagttttcctccctgaaaacttgggcacttctatatccattcctgatttatacaatcacatccttgtagcagcatctgtattgacatcagaatgacattttctctgaagagaaacatcctgtcattctttgttagcagctccgcaactattctgaatgagcccgtgaagtcaagcactcaaagccttacctgggaaacaaaatgctattcctgacctgaaggaagcatccaccaatacagctagtttgggtacacacgctgaaccagctagttcgcctgggagaggcctctgtctcgtttagatgccatcgtctagaagttgtatcggaaaaattataagcgaatgttgcaatgaacagagttccttgtactgctgtgatttgtcattggtcaaagagaactaactgcagcgtttgtctacctacaatacttgtttttttgttgttgctatcttgtagtgccagcagcgatgcctccttgttggtgctcggcaagtcggctggtgtgagcaaaatccgtacgtcgtcgtctccagtggtgtcattctaaactggatctgctgctctcgagaccgaacaactgcaacaaactcaggcagggactcagcatctacacatcctgttctacgatgttcatttttattaaatctgca

SEQ ID NO: 217845 - DNA, 3535 bp, Zea Mays
atggcgagcgggggaggggggattcgggcgacgacttcggggaggatgaagtcgcgagggtggggagattcaagcgacgactttgggacaccggctattgcgctgaggcgtgggggcgactgtagtggcacggcgagttcagactccagcgccgtcttcttcgcggtcgccttttgcgctccatcccctgggctttccgtcacggcggccgcagccatggtggagatgcggcagcggaggaagccgctggtgctcgcctccacgcaggcgctcctcgactcgcttccgggggatcgcccgccgccaccgccgcagaagccggtgcgccttaaggccggcgtcctccgattcccctccggaggtggtggcgccgagttcggggagctcgcgtctttcgtcggcatccctgcccctgctctccgacggctcgcggtcgtcacgggtactcctgtgcttgtcaagaatactgacaataatgttgggaggattgtcaaagcagtattgtttggtaacccgtcccttgacaagtcctgctcagaacatactgaccaagtggtctctgcctctctctctggtcatgcaatgggcttcttaccttgtcgcacgttccctgctattggttttacatccatggatgaagatgttggttatgttagcccacttttggcattcaacttgggattgcatgtttcttgccttaaacttcttattcaaagagaagggcagcctttcaagttctgttctcgagctgaagagattgatgcaactgccagttctggaagtgatctttctcttcacttagaccttcttccatgccctcaagtgcctaaatatgcattgcatttacgagtttctgttgtgaggattcctgattgtggtgtgcttgcttctttaaagatatattcatcctttggaggaagtgagtaccaagacatggtagatcaagctttgaacgagtactttaagtttgataggttcctagcaagaggagatgtttttggtatacaaaacagttggaagtgtggctcaagctgctgcctggcatgcaataagcaggataataaactgaatccccgtaatatgatctactttaaggtgactggcatggaaccatcagatgaacctatacttcgtgttaattgcaatgaaacagcccttgtacttggtggagctgcttctgctgcaatccccccttattccttttttgcttcttctggtaattcagtaccattgcacagtgaagtagtggagcatttagcatctgtcattgcaccagcattgtgcccttcggatattttaccaaaaataaagttttccacttttttatatggcccgccaggatgtggaaagcgcacagtggttaggcatgttgctaaccatcttggtctgcatgtggtcgagtgtagctgtcatgatctgatgacatcatcagaaagtggggcacctgctgcacttgcaactgcctttaaagaagctcagaagtattctccttgtataatacttcttcgccactttgatgcaattgggaatgcatcctcaaacgaaggtccacagtctgagcaatctgggattgcatcgaacattgaatctgtcattaagcagtacattggacaacgttgggttgctaaggattcactgccaggaaaagatgtaaatgggagctcatacctcgtggagcctgaatgtgtaagctctcttcaaatcatactagttgcaactgcggacagttctgaaggaatgcaacagtcaattagaagatgcttccgctatgagatcgacatgaagactatgaatgaagaacagagaaacgaactgatatctgagacacttcaaggcattcctaaagttgctgatgagagtatttgtgacaagttcataaaagatttagcagcgcaaacgtcaggtttcatgcccagggacatacttgcattggtcgcagatgctggtgtgtcttttgcgcataaaattgcagcagggaaagatagcaaagcaatcagtaagcatacggaggtccttccagaaagctcttctgccactcaaaatgaggaacaccatttcagcaaagaagatattatgtcttccttggaacgagccaagaaacggaatcgtgctgcactgggcacacccaaagttcctaatgtcaaatgggaagatgttggtgggctagaggatgtgaaaaaggttattctagatactattcagttgcctctgatgtacaagcacctgttttcttctaaattgcgcaagcgatcaggtgtcctgctatatggacctccaggaacagggaagagaaaaatgttcgggatatttttgagaaggctaggtctgcacgcccatgtgtcattttctttgatgagcttgattcccttgctcctgcacgaggatcctcagcagattctggcggtgtcatggacagggttgtttcccagttacttgtggagatcgatgggttgagtgacaacagccaggaccttttcattattggggctaccaataggcctgaccttcttgattctgcccttcttcgccctggtcggttcgacaagcttctttatgtcggtgtaaatactgaggcatcatacagggaaaggatccttaaagcacagacacgcaagtataagctgcacaagaacgtttctctcttgtcagttgcgcagcgttgtccaccaaacttcactggtgctgatatttacgcgctgtgtgcggatgcatggtttcatgcagcaaagcgatcagttgaaacattcgaaatcgatccttcaagaagtaatgaagccagtgccgaagaagtcatcgtcgagatcgacgattttatcacggtgttaggagatatcgcaccgtcgctctctctggacgagctacaaaactacgaacagttgaggcagaagatcgaaggaccttctagatgaagttgggtttccactccctgctgacattcttaaactgctaacacaccaaaacattccctgtcttacattttcgttcgtacacaagttttcctccctgaaaacttgggcacttctatatccattcctgatttatacaatcacatccttgtagcagcatctgtattgacatcagaatgacattttctctgaagagaaacatcctgtcattctttgttagcagctccgcaactattctgaatgagcccgtgaagtcaagcactcaaagccttacctgggaaacaaaatgctattcctgacctgaaggaagcatccaccaatacagctagtttgggtacacacgctgaaccagctagttcgcctgggagaggcctctgtctcgtttagatgccatcgtctagaagttgtatcggaaaaattataagcgaatgttgcaatgaacagagttccttgtactgctgtgatttgtcattggtcaaagagaactaactgcagcgtttgtctacctacaatacttgtttttttgttgttgctatcttgtagtgccagcagcgatgcctccttgttggtgctcggcaagtcggctggtgtgagcaaaatccgtacgtcgtcgtctccagtggtgtcat

SEQ ID NO: 217846 - DNA, 564 bp, Zea Mays
ggcgttcacacctctggctgccttcatttcctgttgacgactgagcgggcgagcgccggcgccctttgccaggtccgtcggcccgttagccggcgactagcgcctccctttgccaggtcttcgacgtccccttcgccgtcgactggcgcccagcagccagcagcttgttattgagcagcagatccttttctatctgtcgtgttctgtctgcctggtacatttggaagaatgggggtttaccttagcactccgaaaactgagaaggtatccgaagatggggaaaatgataaacttaaattcggagtttcatctatgcaagggtggcgtacaactatggaagatgctccttatgcgtcttacctggatactgacacaccgacacaagtgatggaatccgactcagactcggatatccaactcagcatgattttactcaacttcccaattgtgacttggaatccaattgggtgtgaagagtctgattcgccaaaaataaatgtgctttcaatgtccaggttactgggtgtgcttatatggaaacttgtagaatgtcctaggaagtag

SEQ ID NO: 217847 - DNA, 604 bp, Zea Mays
ggcgttcacacctctggctgccttcatttcctgttgacgactgagcgggcgagcgccggcgccctttgccaggtccgtcggcccgttagccggcgactagcgcctccctttgccaggtcttcgacgtccccttcgccgtcgactggcgcccagcagccagcaggtccggtcgccccttctcgtccttcctgcagttcgaaagcgagcatcgaaaccctaaaatccttttctatctgtcgtgttctgtctgcctggtacatttggaagaatgggggtttaccttagcactccgaaaactgagaaggtatccgaagatggggaaaatgataaacttaaattcggagtttcatctatgcaagggtggcgtacaactatggaagatgctccttatgcgtcttacctggatactgacacaccgacacaagtgatggaatccgactcagactcggatatccaactcagcatgattttactcaacttcccaattgtgacttggaatccaattgggtgtgaagagtctgattcgccaaaaataaatgtgctttcaatgtccaggttactgggtgtgcttatatggaaacttgtagaatgtcctaggaagtag

SEQ ID NO: 217848 - DNA, 502 bp, Zea Mays
ctggcgttcacacctctggctgccttcatttcctgttgacgactgagcgggcgagcgccggcgccctttgccaggtccgtcggcccgttagccggcgactagcgcctccctttgccaggtcttcgacgtccccttcgccgtcgactggcgcccagcagccagcagaatgggggtttaccttagcactccgaaaactgagaaggtatccgaagatggggaaaatgataaacttaaattcggagtttcatctatgcaagggtggcgtacaactatggaagatgctccttatgcgtcttacctggatactgacacaccgacacaagtgatggaatccgactcagactcggatatccaactcagcatgattttactcaacttcccaattgtgacttggaatccaattgggtgtgaagagtctgattcgccaaaaataaatgtgctttcaatgtccaggttactgggtgtgcttatatggaaacttgtagaatgtcctaggaagtag

SEQ ID NO: 217849 - DNA, 740 bp, Zea Mays
ctggcgttcacacctctggctgccttcatttcctgttgacgactgagcgggcgagcgccggcgccctttgccaggtccgtcggcccgttagccggcgactagcgcctccctttgccaggtcttcgacgtccccttcgccgtcgactggcgcccagcagccagcaggtccggtcgccccttctcgtccttcctgcagttcgaaagcgagcatcgaaaccctaaagcaagctacttgtatttgaatctggcacaattgcaagtgtacacatgtattgtgcctactaacttaaattttctatttttttgggatttccttaatccgttgcacaattcatgcgggttgcttcaatttagcagatccttttctatctgtcgtgttctgtctgcctggtacatttggaagaatgggggtttaccttagcactccgaaaactgagaaggtatccgaagatggggaaaatgataaacttaaattcggagtttcatctatgcaagggtggcgtacaactatggaagatgctccttatgcgtcttacctggatactgacacaccgacacaagtgatggaatccgactcagactcggatatccaactcagcatgattttactcaacttcccaattgtgacttggaatccaattgggtgtgaagagtctgattcgccaaaaataaatgtgctttcaatgtccaggttactgggtgtgcttatatggaaacttgtagaatgtcctaggaagtag

SEQ ID NO: 217850 - DNA, 740 bp, Zea Mays
gttctggcgttcacacctctggctgccttcatttcctgttgacgactgagcgggcgagcgccggcgccctttgccaggtccgtcggcccgttagccggcgactagcgcctccctttgccaggtcttcgacgtccccttcgccgtcgactggcgcccagcagccagcaggtccggtcgccccttctcgtccttcctgcagttcgaaagcgagcatcgaaaccctaaagcaagctacttgtatttgaatctggcacaattgcaagtgtacacatgtattgtgcctactaacttaaattttctatttttttgggatttccttaatccgttgcacaattcatgcgggttgcttcaatttagatccttttctatctgtcgtgttctgtctgcctggtacatttggaagaatgggggtttaccttagcactccgaaaactgagaaggtatccgaagatggggaaaatgataaacttaaattcggagtttcatctatgcaagggtggcgtacaactatggaagatgctccttatgcgtcttacctggatactgacacaccgacacaagtgatggaatccgactcagactcggatatccaactcagcatgattttactcaacttcccaattgtgacttggaatccaattgggtgtgaagagtctgattcgccaaaaataaatgtgctttcaatgtccaggttactgggtgtgcttatatggaaacttgtagaatgtcctaggaagtag

SEQ ID NO: 217851 - DNA, 515 bp, Zea Mays
cccgttctggcgttcacacctctggctgccttcatttcctgttgacgactgagcgggcgagcgccggcgccctttgccaggccaggtcttcgacgtccccttcgccgtcgactggcgcccagcagccagcagatccttttctatctgtcgtgttctgtctgcctggtacatttggaagaatgggggtttaccttagcactccgaaaactgagaaggtatccgaagatggggaaaatgataaacttaaattcggagtttcatctatgcaagggtggcgtacaactatggaagatgctccttatgcgtcttacctggatactgacacaccgacacaagtgatggaatccgactcagactcggatatccaactcagcatgattttactcaacttcccaattgtgacttggaatccaattgggtgtgaagagtctgattcgccaaaaataaatgtgctttcaatgtccaggttactgggtgtgcttatatggaaacttgtagaatgtcctaggaagtag

SEQ ID NO: 217852 - DNA, 1376 bp, Zea Mays
aaaagatgcatcaacaccgatgtgtttggtggcacaaagtgtttttgaagcaggtttaaagaggtttatgcatgagccaggatatatccttgaatacacagacttcttgtgtcgtttaaatgacgatagaaatgtacgtgctttgtttgagagggcactgagcttacttcctcccgaggaatccacagaggtatggagacgatttgcacaatttgaacagaactatggggatttatcaagcatgcttaaggttgaacaaagaaggaaagaggctctatctaggacatctgaagatgccttatctgcatcggaaaacacacttcatgacatagtttctcgatacagttacatggatctttggccatgctcatcaaaagaattggattatctagcgagacaagagtggcttgcgaaaaacattgttaagaaggttgagaaaccagctatgttaaatagcggtagcatgctagacaaaggtgctgcaggatttagtgcgagtgcgaggttattaccacaatctgccaaagttgttcgtcctgagacttctcaaatggttatttatgatccaagacagatgaaaggcccagagtttgcagcaactagcagtgggtacacgaaggaggttgaagccacgctcaaagtgctatcgccgtcgatggtgtcctttattaagaatttgcctgctattgaaggaccatcgccggatatcgatgtggtgctcagcgtgctgctgcagagcacattgccagttgcacagagtgctgggaaagcaggtggcgtgagtgagctctcaggcgttggaaaaacgggactgaaccagaatggatctgtccatagacctccaagggagagaaggaaggacgtggagaggcaaggggcgcaggaggaagaggatgcgtcggcggtgcagagcagggcagctgtgccacgagacatcttcaggcttcggcagattcagaggagccgtggcctgggtgtgggtggtgccgccgtttcgcagtctgggtcctcggcattttctttctcgggcggtggaagcgccttctctggggaccactcagctagcacagattagcctactcaccagacatgttcaacagctcagctcaaagctcaactgcgagtagtgagctcaaaggctacctccagcagatttatatcacattccttttctcatcccctatttcaaacatcactttgcaaacaatatcatctatagtttcatgtcccctattttacactacatgctggagacagtctaaggacataatgacatactagtagggtgcccgtgcgttgctacggcaacttaaaaattgatacaaaacaataacgcaatataattacaatctttgattgatgattttgtagctaac

SEQ ID NO: 217853 - DNA, 1397 bp, Zea Mays
tgacatgtcagctacaaggctttcatgtcctttctgggtgttgcataaagtggcacaaagtgtttttgaagcaggtttaaagaggtttatgcatgagccaggatatatccttgaatacacagacttcttgtgtcgtttaaatgacgatagaaatgtacgtgctttgtttgagagggcactgagcttacttcctcccgaggaatccacagaggtatggagacgatttgcacaatttgaacagaactatggggatttatcaagcatgcttaaggttgaacaaagaaggaaagaggctctatctaggacatctgaagatgccttatctgcatcggaaaacacacttcatgacatagtttctcgatacagttacatggatctttggccatgctcatcaaaagaattggattatctagcgagacaagagtggcttgcgaaaaacattgttaagaaggttgagaaaccagctatgttaaatagcggtagcatgctagacaaaggtgctgcaggatttagtgcgagtgcgaggttattaccacaatctgccaaagttgttcgtcctgagacttctcaaatggttatttatgatccaagacagatgaaaggcccagagtttgcagcaactagcagtgggtacacgaaggaggttgaagccacgctcaaagtgctatcgccgtcgatggtgtcctttattaagaatttgcctgctattgaaggaccatcgccggatatcgatgtggtgctcagcgtgctgctgcagagcacattgccagttgcacagagtgctgggaaagcaggtggcgtgagtgagctctcaggcgttggaaaaacgggactgaaccagaatggatctgtccatagacctccaagggagagaaggaaggacgtggagaggcaaggggcgcaggaggaagaggatgcgtcggcggtgcagagcagggcagctgtgccacgagacatcttcaggcttcggcagattcagaggagccgtggcctgggtgtgggtggtgccgccgtttcgcagtctgggtcctcggcattttctttctcgggcggtggaagcgccttctctggggaccactcagctagcacagattagcctactcaccagacatgttcaacagctcagctcaaagctcaactgcgagtagtgagctcaaaggctacctccagcagatttatatcacattccttttctcatcccctatttcaaacatcactttgcaaacaatatcatctatagtttcatgtcccctattttacactacatgctggagacagtctaaggacataatgacatactagtagggtgcccgtgcgttgctacggcaacttaaaaattgatacaaaacaataacgcaatataattacaatctttgattgatgattttgtagctaac

SEQ ID NO: 217854 - DNA, 2183 bp, Zea Mays
ttgcaccatatcgactttgcgggcgctgttacatcaactttatcaggagaattaacgataaaaggggctctgagggtcttgatgagacgaagaaggcttttgatttcatgctcaactacgttgggaatgatgcagcttctggccctgtttggatggagtatattaatttcctcaagtccatgccggttgtgacgccccatgaagagtcgcatcgcatgactactgttcgtaaagtgtaccagaaggcaattttagttccaactaatcatgtagagcagttgtggaaggattacgagaacttcgaaaattctgttagccgcaccttggcaaaaggcttgttatctgaataccaaccaaagtttaacagtgctaaggctgtatatagagagcgaaaaaagtacattgatgatattgattggaatgtactggccaccccccctacaggctcgtacaaggaagagcaacagtgtatggcatggaaaagactcttggtatttgaaaaggggaaccctcaaagaattgatgctacaacagctaataggcgtatcacctttacttatgagcaaattctgaagtacttaagtatgcctttgctgaaatggaagagtccagaggggcgatacagactgctaagacagtatacgaatctcttctaggtgaaaatgctagtgagacctcacttgcaaatattcagtttattcgatttctaaggagaactgaaggcactgaagcagcccgtaagtactttttggatgctcggaagtcaccaagctgcacttatcatttgtatgttgcttatgctacaatggcattctgcgttgacaaggatgcaaaggtggcacaaagtgtttttgaagcaggtttaaagaggtttatgcatgagccaggatatatccttgaatacacagacttcttgtgtcgtttaaatgacgatagaaatgtacgtgctttgtttgagagggcactgagcttacttcctcccgaggaatccacagaggtatggagacgatttgcacaatttgaacagaactatggggatttatcaagcatgcttaaggttgaacaaagaaggaaagaggctctatctaggacatctgaagatgccttatctgcatcggaaaacacacttcatgacatagtttctcgatacagttacatggatctttggccatgctcatcaaaagaattggattatctagcgagacaagagtggcttgcgaaaaacattgttaagaaggttgagaaaccagctatgttaaatagcggtagcatgctagacaaaggtgctgcaggatttagtgcgagtgcgaggttattaccacaatctgccaaagttgttcgtcctgagacttctcaaatggttatttatgatccaagacagatgaaaggcccagagtttgcagcaactagcagtgggtacacgaaggaggttgaagccacgctcaaagtgctatcgccgtcgatggtgtcctttattaagaatttgcctgctattgaaggaccatcgccggatatcgatgtggtgctcagcgtgctgctgcagagcacattgccagttgcacagagtgctgggaaagcaggtggcgtgagtgagctctcaggcgttggaaaaacgggactgaaccagaatggatctgtccatagacctccaagggagagaaggaaggacgtggagaggcaaggggcgcaggaggaagaggatgcgtcggcggtgcagagcagggcagctgtgccacgagacatcttcaggcttcggcagattcagaggagccgtggcctgggtgtgggtggtgccgccgtttcgcagtctgggtcctcggcattttctttctcgggcggtggaagcgccttctctggggaccactcagctagcacagattagcctactcaccagacatgttcaacagctcagctcaaagctcaactgcgagtagtgagctcaaaggctacctccagcagatttatatcacattccttttctcatcccctatttcaaacatcactttgcaaacaatatcatctatagtttcatgtcccctattttacactacatgctggagacagtctaaggacataatgacatactagtagggtgcccgtgcgttgctacggcaacttaaaaattgatacaaaacaataacgcaatataattacaatctttgattgatgattttgtagctaac

SEQ ID NO: 217855 - DNA, 2597 bp, Zea Mays
ttcagatcagctcaacaaagataaccttgcgccgcctcctaagaagatcaagactacccagccaggttctacagaccctcaaaaccttaatcgttagatcatcgccgttctcatgaagaattccggaggaggcgccgcccatggcgatggcggcgacatctacaatgtccgggccgccgagatcctcgccaacgaggccctcctgctccccatcaatgaggccgccccaatctacgagaatctgctcgccactttccccacggccgccaaatactggaagcagtatgtcgaagcctacatggccaccaacaacgatgaagccgccaagcagattttcagcagatgcctgctcaactgccttcacattagtctatggcgctgttacatcaactttatcaggagaattaacgataaaaggggctctgagggtcttgatgagacgaagaaggcttttgatttcatgctcaactacgttgggaatgatgcagcttctggccctgtttggatggagtatattaatttcctcaagtccatgccggttgtgacgccccatgaagagtcgcatcgcatgactactgttcgtaaagtgtaccagaaggcaattttagttccaactaatcatgtagagcagttgtggaaggattacgagaacttcgaaaattctgttagccgcaccttggcaaaaggcttgttatctgaataccaaccaaagtttaacagtgctaaggctgtatatagagagcgaaaaaagtacattgatgatattgattggaatgtactggccaccccccctacaggctcgtacaaggaagagcaacagtgtatggcatggaaaagactcttggtatttgaaaaggggaaccctcaaagaattgatgctacaacagctaataggcgtatcacctttacttatgagcaatgcctgatgtatctatatcatcatcctgatatatggtacgattatgctatgtggcatgtgaagaatggttctatggattctgcatcaaaaatatttcagcgagctctaaaagcaatccatgattctgaagtacttaagtatgcctttgctgaaatggaagagtccagaggggcgatacagactgctaagacagtatacgaatctcttctaggtgaaaatgctagtgagacctcacttgcaaatattcagtttattcgatttctaaggagaactgaaggcactgaagcagcccgtaagtactttttggatgctcggaagtcaccaagctgcacttatcatttgtatgttgcttatgctacaatggcattctgcgttgacaaggatgcaaaggtggcacaaagtgtttttgaagcaggtttaaagaggtttatgcatgagccaggatatatccttgaatacacagacttcttgtgtcgtttaaatgacgatagaaatgtacgtgctttgtttgagagggcactgagcttacttcctcccgaggaatccacagaggttgaacaaagaaggaaagaggctctatctaggacatctgaagatgccttatctgcatcggaaaacacacttcatgacatagtttctcgatacagttacatggatctttggccatgctcatcaaaagaattggattatctagcgagacaagagtggcttgcgaaaaacattgttaagaaggttgagaaaccagctatgttaaatagcggtagcatgctagacaaaggtgctgcaggatttagtgcgagtgcgaggttattaccacaatctgccaaagttgttcgtcctgagacttctcaaatggttatttatgatccaagacagatgaaaggcccagagtttgcagcaactagcagtgggtacacgaaggaggttgaagccacgctcaaagtgctatcgccgtcgatggtgtcctttattaagaatttgcctgctattgaaggaccatcgccggatatcgatgtggtgctcagcgtgctgctgcagagcacattgccagttgcacagagtgctgggaaagcaggtggcgtgagtgagctctcaggcgttggaaaaacgggactgaaccagaatggatctgtccatagacctccaagggagagaaggaaggacgtggagaggcaaggggcgcaggaggaagaggatgcgtcggcggtgcagagcagggcagctgtgccacgagacatcttcaggcttcggcagattcagaggagccgtggcctgggtgtgggtggtgccgccgtttcgcagtctgggtcctcggcattttctttctcgggcggtggaagcgccttctctggggaccactcagctagcacagattagcctactcaccagacatgttcaacagctcagctcaaagctcaactgcgagtagtgagctcaaaggctacctccagcagatttatatcacattccttttctcatcccctatttcaaacatcactttgcaaacaatatcatctatagtttcatgtcccctattttacactacatgctggagacagtctaaggacataatgacatactagtagggtgcccgtgcgttgctacggcaacttaaaaattgatacaaaacaataacgcaatataattacaatctttgattgatgattttgtagctaac

SEQ ID NO: 217856 - DNA, 2598 bp, Zea Mays
ttcagatcagctcaacaaagataaccttgcgccgcctcctaagaagatcaagactacccagccaggttctacagaccctcaaaaccttaatcgttagatcatcgccgttctcatgaagaattccggaggaggcgccgcccatggcgatggcggcgacatctacaatgtccgggccgccgagatcctcgccaacgaggccctcctgctccccatcaatgaggccgccccaatctacgagaatctgctcgccactttccccacggccgccaaatactggaagcagtatgtcgaagcctacatggccaccaacaacgatgaagccgccaagcagattttcagcagatgcctgctcaactgccttcacattagtctatggcgctgttacatcaactttatcaggagaattaacgataaaaggggctctgagggtcttgatgagacgaagaaggcttttgatttcatgctcaactacgttgggaatgatgcagcttctggccctgtttggatggagtatattaatttcctcaagtccatgccggttgtgacgccccatgaagagtcgcatcgcatgactactgttcgtaaagtgtaccagaaggcaattttagttccaactaatcatgtagagcagttgtggaaggattacgagaacttcgaaaattctgttagccgcaccttggcaaaaggcttgttatctgaataccaaccaaagtttaacagtgctaaggctgtatatagagagcgaaaaaagtacattgatgatattgattggaatgtactggccaccccccctacaggctcgtacaaggaagagcaacagtgtatggcatggaaaagactcttggtatttgaaaaggggaaccctcaaagaattgatgctacaacagctaataggcgtatcacctttacttatgagcaatgcctgatgtatctatatcatcatcctgatatatggtacgattatgctatgtggcatgtgaagaatggttctatggattctgcatcaaaaatatttcagcgagctctaaaagcaatccatgactgctaagacagtatacgaatctcttctaggtgaaaatgctagtgagacctcacttgcaaatattcagtttattcgatttctaaggagaactgaaggcactgaagcagcccgtaagtactttttggatgctcggaagtcaccaagctgcacttatcatttgtatgttgcttatgctacaatggcattctgcgttgacaaggatgcaaaggtggcacaaagtgtttttgaagcaggtttaaagaggtttatgcatgagccaggatatatccttgaatacacagacttcttgtgtcgtttaaatgacgatagaaatgtacgtgctttgtttgagagggcactgagcttacttcctcccgaggaatccacagaggtatggagacgatttgcacaatttgaacagaactatggggatttatcaagcatgcttaaggttgaacaaagaaggaaagaggctctatctaggacatctgaagatgccttatctgcatcggaaaacacacttcatgacatagtttctcgatacagttacatggatctttggccatgctcatcaaaagaattggattatctagcgagacaagagtggcttgcgaaaaacattgttaagaaggttgagaaaccagctatgttaaatagcggtagcatgctagacaaaggtgctgcaggatttagtgcgagtgcgaggttattaccacaatctgccaaagttgttcgtcctgagacttctcaaatggttatttatgatccaagacagatgaaaggcccagagtttgcagcaactagcagtgggtacacgaaggaggttgaagccacgctcaaagtgctatcgccgtcgatggtgtcctttattaagaatttgcctgctattgaaggaccatcgccggatatcgatgtggtgctcagcgtgctgctgcagagcacattgccagttgcacagagtgctgggaaagcaggtggcgtgagtgagctctcaggcgttggaaaaacgggactgaaccagaatggatctgtccatagacctccaagggagagaaggaaggacgtggagaggcaaggggcgcaggaggaagaggatgcgtcggcggtgcagagcagggcagctgtgccacgagacatcttcaggcttcggcagattcagaggagccgtggcctgggtgtgggtggtgccgccgtttcgcagtctgggtcctcggcattttctttctcgggcggtggaagcgccttctctggggaccactcagctagcacagattagcctactcaccagacatgttcaacagctcagctcaaagctcaactgcgagtagtgagctcaaaggctacctccagcagatttatatcacattccttttctcatcccctatttcaaacatcactttgcaaacaatatcatctatagtttcatgtcccctattttacactacatgctggagacagtctaaggacataatgacatactagtagggtgcccgtgcgttgctacggcaacttaaaaattgatacaaaacaataacgcaatataattacaatctttgattgatgattttgtagctaac

SEQ ID NO: 217857 - DNA, 2536 bp, Zea Mays
ttcagatcagctcaacaaagataaccttgcgccgcctcctaagaagatcaagactacccagccaggttctacagaccctcaaaaccttaatcgttagatcatcgccgttctcatgaagaattccggaggaggcgccgcccatggcgatggcggcgacatctacaatgtccgggccgccgagatcctcgccaacgaggccctcctgctccccatcaatgaggccgccccaatctacgagaatctgctcgccactttccccacggccgccaaatactggaagcagtatgtcgaagcctacatggccaccaacaacgatgaagccgccaagcagattttcagcagatgcctgctcaactgccttcacattagtctatggcgctgttacatcaactttatcaggagaattaacgataaaaggggctctgagggtcttgatgagacgaagaaggcttttgatttcatgctcaactacgttgggaatgatgcagcttctggccctgtttggatggagtatattaatttcctcaagtccatgccggttgtgacgccccatgaagagtcgcatcgcatgactactgttcgtaaagtgtaccagaaggcaattttagttccaactaatcatgtagagcagttgtggaaggattacgagaacttcgaaaattctgttagccgcaccttggcaaaaggcttgttatctgaataccaaccaaagtttaacagtgctaaggctgtatatagagagcgaaaaaagtacattgatgatattgattggaatgtactggccaccccccctacaggctcgtacaaggaagagcaacagtgtatggcatggaaaagactcttggtatttgaaaaggggaaccctcaaagaattgatgctacaacagctaataggcgtatcacctttacttatgagcaaattctgaagtacttaagtatgcctttgctgaaatggaagagtccagaggggcgatacagactgctaagacagtatacgaatctcttctaggtgaaaatgctagtgagacctcacttgcaaatattcagtttattcgatttctaaggagaactgaaggcactgaagcagcccgtaagtactttttggatgctcggaagtcaccaagctgcacttatcatttgtatgttgcttatgctacaatggcattctgcgttgacaaggatgcaaaggtggcacaaagtgtttttgaagcaggtttaaagaggtttatgcatgagccaggatatatccttgaatacacagacttcttgtgtcgtttaaatgacgatagaaatgtacgtgctttgtttgagagggcactgagcttacttcctcccgaggaatccacagaggtatggagacgatttgcacaatttgaacagaactatggggatttatcaagcatgcttaaggttgaacaaagaaggaaagaggctctatctaggacatctgaagatgccttatctgcatcggaaaacacacttcatgacatagtttctcgatacagttacatggatctttggccatgctcatcaaaagaattggattatctagcgagacaagagtggcttgcgaaaaacattgttaagaaggttgagaaaccagctatgttaaatagcggtagcatgctagacaaaggtgctgcaggatttagtgcgagtgcgaggttattaccacaatctgccaaagttgttcgtcctgagacttctcaaatggttatttatgatccaagacagatgaaaggcccagagtttgcagcaactagcagtgggtacacgaaggaggttgaagccacgctcaaagtgctatcgccgtcgatggtgtcctttattaagaatttgcctgctattgaaggaccatcgccggatatcgatgtggtgctcagcgtgctgctgcagagcacattgccagttgcacagagtgctgggaaagcaggtggcgtgagtgagctctcaggcgttggaaaaacgggactgaaccagaatggatctgtccatagacctccaagggagagaaggaaggacgtggagaggcaaggggcgcaggaggaagaggatgcgtcggcggtgcagagcagggcagctgtgccacgagacatcttcaggcttcggcagattcagaggagccgtggcctgggtgtgggtggtgccgccgtttcgcagtctgggtcctcggcattttctttctcgggcggtggaagcgccttctctggggaccactcagctagcacagattagcctactcaccagacatgttcaacagctcagctcaaagctcaactgcgagtagtgagctcaaaggctacctccagcagatttatatcacattccttttctcatcccctatttcaaacatcactttgcaaacaatatcatctatagtttcatgtcccctattttacactacatgctggagacagtctaaggacataatgacatactagtagggtgcccgtgcgttgctacggcaacttaaaaattgatacaaaacaataacgcaatataattacaatctttgattgatgattttgtagctaac

SEQ ID NO: 217858 - DNA, 1883 bp, Zea Mays
ttcagatcagctcaacaaagataaccttgcgccgcctcctaagaagatcaagactacccagccaggttctacagaccctcaaaaccttaatcgttagatcatcgccgttctcatgaagaattccggaggaggcgccgcccatggcgatggcggcgacatctacaatgtccgggccgccgagatcctcgccaacgaggccctcctgctccccatcaatgaggccgccccaatctacgagaatctgctcgccactttccccacggccgccaaatactggaagcagtatgtcgaagcctacatggccaccaacaacgatgaagccgccaagcagattttcagcagatgcctgctcaactgccttcacattagtctatggcgctgttacatcaactttatcaggagaattaacgataaaaggggctctgagggtcttgatgagacgaagaaggcttttgatttcatgctcaactacgttgggaatgatgcagcttctggccctgtttggatggagtatattaatttcctcaagtccatgccggttgtgacgccccatgaagagtcgcatcgcatgactactgttcgtaaagtgtaccagaaggcaattttagttccaactaatcatgtagagcagttgtggaaggattacgagaacttcgaaaattctgttagccgcaccttggcaaaaggcttgttatctgaataccaaccaaagtttaacagtgctaaggctgtatatagagagcgaaaaaagtacattgatgatattgattggaatgtactggccaccccccctacaggctcgtacaaggaagagcaacagtgtatggcatggaaaagactcttggtatttgaaaaggggaaccctcaaagaattgatgctacaacagctaataggcgtatcacctttacttatgagcaatgcctgatgtatctatatcatcatcctgatatatggtacgattatgctatgtggcatgtgaagaatggttctatggattctgcatcaaaaatatttcagcgagctctaaaagcaatccatgattctgaagtacttaagtatgcctttgctgaaatggaagagtccagaggggcgatacagactgctaagacagtatacgaatctcttctaggtgaaaatgctagtgagacctcacttgcaaatattcagtttattcgatttctaaggagaactgaaggcactgaagcagcccgtaagtactttttggatgctcggaagtcaccaagctgcacttatcatttgtatgttgcttatgctacaatggcattctgcgttgacaaggatgcaaaggtggcacaaagtgtttttgaagcaggtttaaagaggtttatgcatgagccaggatatatccttgaatacacagacttcttgtgtcgtttaaatgacgatagaaatgtacgtgctttgtttgagagggcactgagcttacttcctcccgaggaatccacagaggtatggagacgatttgcacaatttgaacagaactatggggatttatcaagcatgcttaaggttgaacaaagaaggaaagaggctctatctaggacatctgaagatgccttatctgcatcggaaaacacacttcatgacatagtttctcgatacagttacatggatctttggccatgctcatcaaaagaattggattatctagcgagacaagagtggcttgcgaaaaacattgttaagaaggttgagaaaccagctatgttaaatagcggtagcatgctagacaaaggtgctgcaggatttagtgcgagtgcgaggttattaccacaatctgccaaagttgttcgtcctgagacttctcaaatggttatttatgatccaagacagatgaaagagtgggaaatcaccgtggatt

SEQ ID NO: 217859 - DNA, 4470 bp, Zea Mays
atctctatctcatcgtcatcattagaaaggccgaagccgtctccgttcctcctcgacgcgtctcttccacagccgcaacctctatccctcgtctggtatcgtctcccacacccctctgccccaactcagaaaaaccctcgaaaagcggcggcggcgcgacatggcggaggtcgaggctccagctgctgcggttgcggcggcgacccctgaggtggcgacggtgaccgagggcggagccgctacggaggcgaagggtccgcacaagctgcaccgccagtggaccttctgcttgtatgatcatgttttccgtccaagcaagttgcctgggactgctgattttcacctattcaaggctggagtagagccaaaatgggaagacccagagtgtgcaaatggtggcaaatggactgtcccatgcaacagaaagccaacctttgagaccatgtggcttgaaacgttgatggctcttgttggggagcagtttgatgaaacagatgacatttgtggaattgttgctagtgtccgtccaagaggagataagcttgcattgtggactaggactgccagcaatgaagctgtccaggtaaacattggcaagaaatggaaggatgtcatcgactacaatgacaagatcatctacactttccatgacgactcgagaagggataagccaagcagaggtggacggtacaccgtaaaactgggcagggcagggcgcgctcagcacgtttgcttcggaaacactgcgagtgtgcgacacatttcccggcttgatctcgaagcgagccctgatgtgtttgtcatgcacctgcctgccttggcttgtgctctaatcaacgccggactccccaactcacggttggtgcgggacgccaccccgccaccttaccgcccgcctcggcgcctcaccagtcaccacacctcgcgcctgccatcagctatatcaccgtggccacttccgtgtcccttcacggatacctcacccccacagcccccggtcgatcgctcggcaatcggcatggacgccggctcggtcaccggtggcctcgccgcgggctcgcacatgcgggacgagctgcatgtcatgcgcgcccgcgaggagccgaacgccaaggtccggagcgccgacgtgaagacgtgccgcgtgtgcgccgacgaggtcgggacgcgggaggacgggcagcccttcgtggcgtgcgccgagtgcggcttccccgtctgccggccctgctacgagtacgagcgcagcgagggcacgcagtgctgcccgcagtgcaacacccgctacaagcgccagaaagggtgcccgagggtggaaggggacgaggaggagggcccggagatggacgacttcgaggacgagttccccgccaagagccccaagaagcctcacgagcctgtcgcgttcgacgtctactcggagaacggcgagcacccggcgcagaaatggcggacgggtggccagacgctgtcgtccttcaccggaagcgtcgccgggaaggacctggaggcggagagggagatggaggggagcatggagtggaaggaccggatcgacaagtggaagaccaagcaggagaagaggggcaagctcaaccacgacgacagcgacgacgacgacgacaagaacgaagacgagtacatgctgcttgccgaggcccgacagccgctgtggcgcaaggttccgatcccgtcgagcatgatcaacccgtaccgcatcgtcatcgtgctccgcctggtggtgctctgcttcttcctcaagttccggatcacgacgcccgccacggacgccgtgcctctgtggctggcgtccgtcatctgcgagctctggttcgccttctcctggatcctggaccagctgccaaagtgggcgccggtgacgcgggagacgtacctggaccgcctggcgctgcggtacgaccgtgagggcgaggcgtgccggctgtcccccatcgacttcttcgtcagcacggtggacccgctcaaggagccgcccatcatcaccgccaacaccgtgctgtccatcctcgccgtcgactaccccgtggaccgcgtcagctgctacgtctccgacgacggcgcgtccatgctgctcttcgacgcgctgtccgagaccgccgagttcgcgcgccgctgggtgcccttctgcaagaagttcgccgtggagccgcgcgccccggagttctacttctcgcagaagatcgactacctcaaggacaaggtgcagccgacgttcgtcaaggagcgccgcgccatgaagagggagtacgaggagttcaaggtgcgcatcaacgcgctggtggccaaggcgcagaagaagcccgaggaggggtgggtcatgcaggacggcacgccgtggcccgggaacaacacgcgcgaccacccgggcatgatccaggtctacctcggcaaccagggcgcgctggacgtggagggccacgagctgccgcgcctcgtctacgtgtcccgtgagaagcgccccgggtacaaccaccacaagaaggcgggcgccatgaacgcgctggtgcgcgtctccgccgtgctcaccaacgcgcccttcatcctcaacctcgactgcgaccactacgtcaacaacagcaaggccgtgcgcgaggccatgtgcttcctcatggacccgcagctggggaagaagctctgctacgtccagttcccgcagcgcttcgatggcatcgatcgccacgaccgatacgccaaccgcaacgtcgtcttcttcgacatcaacatgaaggggctggacggcatccagggcccggtgtacgtcggcacggggtgcgtgttcaaccgccaggcgctgtacggctacgacccgccgcggcccgagaagcggcccaagatgacgtgcgactgctggccgtcgtggtgctgctgctgctgctgcttcggcggcggcaagcgcggcaaggcgcgcaaggacaagaagggcgacggcggcgaggagccgcgccggggcctgctcggcttctacaggaagcggagcaagaaggacaagctcggcggcgggtcggtggccggcagcaagaagggcggcgggctgtacaagaagcaccagcgcgcgttcgagctggaggagatcgaggaggggctggaggggtacgacgagctggagcgctcctcgctcatgtcgcagaagagcttcgagaagcggttcggccagtcgcccgtgttcatcgcctccacgctcgtcgaggacggcggcctgccgcagggcgccgccgccgaccccgccgcgctcatcaaggaggccatccacgtcatcagctgcggatacgaggagaagaccgagtggggcaaggagattgggtggatctatgggtcggtgacagaggatatcctgacggggttcaagatgcactgccgggggtggaagtccgtgtactgcacgccgacacggccggcgttcaaggggtcggcgcccatcaacttgtctgatcgtctccaccaggtgctgcgctgggcgctggggtccgtggagatcttcatgagccgccactgcccgctctggtacgcctacggcggccggctcaagtggctggagcgcttcgcctacaccaacaccatcgtgtaccccttcacctccatcccgctcctcgcctactgcaccatccccgccgtctgcctgctcaccggcaagttcatcattcccacgctgaacaacctcgccagcatctggttcatcgcgctcttcctgtccatcatcgcgacgagcgtcctggagctgcggtggagcggggtgagcatcgaggactggtggcgcaacgagcagttctgggtcatcggcggcgtgtccgcgcatctcttcgccgtgttccagggcttcctcaaggttctgggcggcgtggacaccagcttcaccgtcacctccaaggcggccggcgacgaggccgacgccttcggggacctctacctcttcaagtggaccaccctgctggtgccccccaccacgctcatcatcatcaacatggtgggcatcgtggccggcgtgtccgacgccgtcaacaacggctacggctcctggggcccgctcttcggcaagctcttcttctccttctgggtcatcgtccacctctacccgttcctcaaggggctcatggggaggcagaaccggacgcccaccatcgtcgtgctctggtccatcctcctcgcctccatcttctcgctcgtctgggtcaggatcgacccgtttatcccgaaggccaagggccccatcctcaagccatgcggagtcgagtgctgagctcacctagctaccttcttgttgcatgtacggacgccgccgtgcgtttggacatacaggcacttttgggccaggctactcatgttcgactttttttttaattttgtacaagatttgtgatcgagtgactgagtgagacagagtgttgggtgtaagaactgtgatggaattcactcaaattaatggacattttttttcttcaactgcaaccggtg

SEQ ID NO: 217860 - DNA, 3342 bp, Zea Mays
cttcactgtgctgcaaagcgtgcgcggactatctttgaaggcggtaacagctagagcgcgcacctgagagggagagagaggaggagcgcattcctctctgcctcgcacagtttggtttgtttcgctaaggggaggagagagaaacaaagggagataacccatggaggggaggagctccaattcccttctccgcatgcgcgagcgatctctcgtctcttccccgctttgctggaacaatggctgagagcaagcggtttgatacgaagagcacaggttgtcttgaaggcctcttcaacttccttgccctcaaccaacggttgcaaatgccgaagacgattgcctatcgaaggcacagcgaaggaagtgacaatacactcagaatgaaagtcccaaagcccaaaacttgcagtgaaaaagatgaaaacatcccgttgcagaaggaaactagcagtgaccctcaaattgataaggccaacatgttcgtatggaggacactcatgttcaagagaaaaacactcgggaaagacaaaaagaagagcagctcaccggccagctccccatcctcatcacgtctgctgcgctccagatcaatccatcactcgaaatgctttgattatgaggttcctgatgagttagctgcacattatcatgcaatgaacaactcgggctccattgaaatgggttcttgtcacagtgaaccgacaccattgccacatgagtgtccacaacatcccactgtccaagagccttgcagggcttgtggcagcatggatggcaaaggtagcatagatatggaggcacccagtgagacagcacctgggaatctcactgatgagagtgaggctctcgctacacaaaaaactcgtgatgctgcaacacatccttcgaaggagttcttggattttcttgaattatttaatgcacatagggagctatttttgaagattcttcatgacccttcattactaggaacacctgaacaacaagggcaagaagcttcatccagtggttctgtaccattgaacaaattggaatcatttccaagaccaggagggtcatcagggaaacgtaaccctatatttgatcggagtgacagtgagaaaaacatgccagaaatccaaaggtcaccatcaagacctacctctgacccggaagctgcaaaggtcatcagtacaagaatgcctactggtgttgacagctccgcagtttctcttgcagaatcaaggagcctgaagaaagctggaacagcttcaaaccgttttaaagctatccgtagaaagataaaagatgtcgtaagggagaaccggaaagagcttgctcggattaccaaggatggggttttccacaaactgccatatggccaaaaaatgactgggttgaccaggagctcctccatggagaagtttgtccaggaggagaaacaaatccgaaggacatattctattgcagaatcagtagacaagtattcaacactttatgagtcaatctctagggactcaagaatttctctagaaagattaaacataacaatggaaggcggtgcaaacttaaatgataagaagacgccaacgagcctcaaaagaataacctctcttccagagatgcggttgtgttcatctcaactagaggtcctgcctgaagtttcagcttctcggattgggtccaagatttggaatgtggaatctgaccgcttttcttcacgtggaactgatgccttcagtatctgtgcggaaggaaattcctatcctgatgatgtcacggaaaaatcagaaaatattcacattgaattaaattgtggaggcttcttggaagaagatttccgcagcatccttcgaactccatcttctcttggccggtctttctcccaccgccgcattaatagtttaccttccttcgatcggtcattctttcaagaccgtactggtagtttcacggagtgttctatagcagattcagagccacagttcgaaaacttgcagcttgaggacgaggactggttagtcaagccaccactgtccgcaggagcatatgctgccaatttcaatgatgaagaatggctggtcacaccactgaagcgctcccgtgtcatgaatggtattgaccatgaggatgaagagtggttagttaaggcgacgaaactgtctggtgccaaggatgctgatcttgaagctgaagagtggttagtcaagtcagggcagcctaacgatgctttggattcggacttccgcttcatacacgaattttctgaacaaggtgctgcagaacccttgcacatctatgtcagtgacaagaacgaggctgatttccagtatgtcaaggacatcctcaagaaatcagggttcagctgcggcgatgtcgactggtacgcgtccaatcagccagtgagccctgtggtctttgacgaggcagaatgctcgtgtcaggaggtcagcatggcaagcgatgaacctcacagcatcgtcaggcgcatgctcctgtttgatctcatcaacgaggtcctgctggacatctatgactcctcactcgtcatcggcccatggcactcacgcttcgacctgcgaaccagacccattcccatggggtaccatgtccttgaggaggtgtgggcgaaggtgagctgctacctgagcctgcattggaaggaaggccagacggtggaggacattgtggcacatgaccttatgagaaaggacggctggatgaacctggtatatgacgcggagtgcaccgcgttggacatggaggatctgatggtggaggaccttcttgatgacgttgtcattcagatagtgttagaatccattgatgaatgactatccggagcctctttttttaaccagcggcttgagcttcgcagtaatctgttcataaggctgaacagtgaagtgatatccgaaggaatgtactagatagatggatcgcttgtctgtctcgcattgtgcaacagtaactgtgtagatcattttaaaagattggcgattctatgaattgtcaaatgtggcagatgttggccatgcatacaaagttggaaacagaaggtaaacaatagataagaaatagcgaaacagatagcattatatacctgttaaattcaaccaaactgtcgtgagtttttattagtcaatactggtatatctaggttgtgtctcccctacaaatcctggtgttttgtactctattcatgagtctgtggaaggcacaattctgagtgtgaaaaacactactctgttatatatgtgtgactacggccatcttttcagtgaattgtcgtatatttttttaacaagtcagcaaatcgtcatatatggttatagatatgtgcttgcaacttgcaatcttctt

SEQ ID NO: 217861 - DNA, 3264 bp, Zea Mays
agagagaggaggagcgcattcctctctgcctcgcacagtttggtttgtttcgctaaggggaggagagagaaacaaagggagataacccatggaggggaggagctccaattcccttctccgcatgcgcgagcgatctctcgtctcttccccgctttgctggaacaatggctgagagcaagcggtttgatacgaagagcacaggttgtcttgaaggcctcttcaacttccttgccctcaaccaacggttgcaaatgccgaagacgattgcctatcgaaggcacagcgaaggaagtgacaatacactcagaatgaaagtcccaaagcccaaaacttgcagtgaaaaagatgaaaacatcccgaaggaaactagcagtgaccctcaaattgataaggccaacatgttcgtatggaggacactcatgttcaagagaaaaacactcgggaaagacaaaaagaagagcagctcaccggccagctccccatcctcatcacgtctgctgcgctccagatcaatccatcactcgaaatgctttgattatgaggttcctgatgagttagctgcacattatcatgcaatgaacaactcgggctccattgaaatgggttcttgtcacagtgaaccgacaccattgccacatgagtgtccacaacatcccactgtccaagagccttgcagggcttgtggcagcatggatggcaaaggtagcatagatatggaggcacccagtgagacagcacctgggaatctcactgatgagagtgaggctctcgctacacaaaaaactcgtgatgctgcaacacatccttcgaaggagttcttggattttcttgaattatttaatgcacatagggagctatttttgaagattcttcatgacccttcattactaggaacacctgaacaacaagggcaagaagcttcatccagtggttctgtaccattgaacaaattggaatcatttccaagaccaggagggtcatcagggaaacgtaaccctatatttgatcggagtgacagtgagaaaaacatgccagaaatccaaaggtcaccatcaagacctacctctgacccggaagctgcaaaggtcatcagtacaagaatgcctactggtgttgacagctccgcagtttctcttgcagaatcaaggagcctgaagaaagctggaacagcttcaaaccgttttaaagctatccgtagaaagataaaagatgtcgtaagggagaaccggaaagagcttgctcggattaccaaggatggggttttccacaaactgccatatggccaaaaaatgactgggttgaccaggagctcctccatggagaagtttgtccaggaggagaaacaaatccgaaggacatattctattgcagaatcagtagacaagtattcaacactttatgagtcaatctctagggactcaagaatttctctagaaagattaaacataacaatggaaggcggtgcaaacttaaatgataagaagacgccaacgagcctcaaaagaataacctctcttccagagatgcggttgtgttcatctcaactagaggtcctgcctgaagtttcagcttctcggattgggtccaagatttggaatgtggaatctgaccgcttttcttcacgtggaactgatgccttcagtatctgtgcggaaggaaattcctatcctgatgatgtcacggaaaaatcagaaaatattcacattgaattaaattgtggaggcttcttggaagaagatttccgcagcatccttcgaactccatcttctcttggccggtctttctcccaccgccgcattaatagtttaccttccttcgatcggtcattctttcaagaccgtactggtagtttcacggagtgttctatagcagattcagagccacagttcgaaaacttgcagcttgaggacgaggactggttagtcaagccaccactgtccgcaggagcatatgctgccaatttcaatgatgaagaatggctggtcacaccactgaagcgctcccgtgtcatgaatggtattgaccatgaggatgaagagtggttagttaaggcgacgaaactgtctggtgccaaggatgctgatcttgaagctgaagagtggttagtcaagtcagggcagcctaacgatgctttggattcggacttccgcttcatacacgaattttctgaacaaggtgctgcagaacccttgcacatctatgtcagtgacaagaacgaggctgatttccagtatgtcaaggacatcctcaagaaatcagggttcagctgcggcgatgtcgactggtacgcgtccaatcagccagtgagccctgtggtctttgacgaggcagaatgctcgtgtcaggaggtcagcatggcaagcgatgaacctcacagcatcgtcaggcgcatgctcctgtttgatctcatcaacgaggtcctgctggacatctatgactcctcactcgtcatcggcccatggcactcacgcttcgacctgcgaaccagacccattcccatggggtaccatgtccttgaggaggtgtgggcgaaggtgagctgctacctgagcctgcattggaaggaaggccagacggtggaggacattgtggcacatgaccttatgagaaaggacggctggatgaacctggtatatgacgcggagtgcaccgcgttggacatggaggatctgatggtggaggaccttcttgatgacgttgtcattcagatagtgttagaatccattgatgaatgactatccggagcctctttttttaaccagcggcttgagcttcgcagtaatctgttcataaggctgaacagtgaagtgatatccgaaggaatgtactagatagatggatcgcttgtctgtctcgcattgtgcaacagtaactgtgtagatcattttaaaagattggcgattctatgaattgtcaaatgtggcagatgttggccatgcatacaaagttggaaacagaaggtaaacaatagataagaaatagcgaaacagatagcattatatacctgttaaattcaaccaaactgtcgtgagtttttattagtcaatactggtatatctaggttgtgtctcccctacaaatcctggtgttttgtactctattcatgagtctgtggaaggcacaattctgagtgtgaaaaacactactctgttatatatgtgtgactacggccatcttttcagtgaattgtcgtatatttttttaacaagtcagcaaatcgtcatatatggttatagatatgtgcttgcaacttgcaatcttctt

SEQ ID NO: 217862 - DNA, 3142 bp, Zea Mays
ctgacaatatatgacaaacgcttctttgctggaacaatggctgagagcaagcggtttgatacgaagagcacaggttgtcttgaaggcctcttcaacttccttgccctcaaccaacggttgcaaatgccgaagacgattgcctatcgaaggcacagcgaaggaagtgacaatacactcagaatgaaagtcccaaagcccaaaacttgcagtgaaaaagatgaaaacatcccgttgcagaaggaaactagcagtgaccctcaaattgataaggccaacatgttcgtatggaggacactcatgttcaagagaaaaacactcgggaaagacaaaaagaagagcagctcaccggccagctccccatcctcatcacgtctgctgcgctccagatcaatccatcactcgaaatgctttgattatgaggttcctgatgagttagctgcacattatcatgcaatgaacaactcgggctccattgaaatgggttcttgtcacagtgaaccgacaccattgccacatgagtgtccacaacatcccactgtccaagagccttgcagggcttgtggcagcatggatggcaaaggtagcatagatatggaggcacccagtgagacagcacctgggaatctcactgatgagagtgaggctctcgctacacaaaaaactcgtgatgctgcaacacatccttcgaaggagttcttggattttcttgaattatttaatgcacatagggagctatttttgaagattcttcatgacccttcattactaggaacacctgaacaacaagggcaagaagcttcatccagtggttctgtaccattgaacaaattggaatcatttccaagaccaggagggtcatcagggaaacgtaaccctatatttgatcggagtgacagtgagaaaaacatgccagaaatccaaaggtcaccatcaagacctacctctgacccggaagctgcaaaggtcatcagtacaagaatgcctactggtgttgacagctccgcagtttctcttgcagaatcaaggagcctgaagaaagctggaacagcttcaaaccgttttaaagctatccgtagaaagataaaagatgtcgtaagggagaaccggaaagagcttgctcggattaccaaggatggggttttccacaaactgccatatggccaaaaaatgactgggttgaccaggagctcctccatggagaagtttgtccaggaggagaaacaaatccgaaggacatattctattgcagaatcagtagacaagtattcaacactttatgagtcaatctctagggactcaagaatttctctagaaagattaaacataacaatggaaggcggtgcaaacttaaatgataagaagacgccaacgagcctcaaaagaataacctctcttccagagatgcggttgtgttcatctcaactagaggtcctgcctgaagtttcagcttctcggattgggtccaagatttggaatgtggaatctgaccgcttttcttcacgtggaactgatgccttcagtatctgtgcggaaggaaattcctatcctgatgatgtcacggaaaaatcagaaaatattcacattgaattaaattgtggaggcttcttggaagaagatttccgcagcatccttcgaactccatcttctcttggccggtctttctcccaccgccgcattaatagtttaccttccttcgatcggtcattctttcaagaccgtactggtagtttcacggagtgttctatagcagattcagagccacagttcgaaaacttgcagcttgaggacgaggactggttagtcaagccaccactgtccgcaggagcatatgctgccaatttcaatgatgaagaatggctggtcacaccactgaagcgctcccgtgtcatgaatggtattgaccatgaggatgaagagtggttagttaaggcgacgaaactgtctggtgccaaggatgctgatcttgaagctgaagagtggttagtcaagtcagggcagcctaacgatgctttggattcggacttccgcttcatacacgaattttctgaacaaggtgctgcagaacccttgcacatctatgtcagtgacaagaacgaggctgatttccagtatgtcaaggacatcctcaagaaatcagggttcagctgcggcgatgtcgactggtacgcgtccaatcagccagtgagccctgtggtctttgacgaggcagaatgctcgtgtcaggaggtcagcatggcaagcgatgaacctcacagcatcgtcaggcgcatgctcctgtttgatctcatcaacgaggtcctgctggacatctatgactcctcactcgtcatcggcccatggcactcacgcttcgacctgcgaaccagacccattcccatggggtaccatgtccttgaggaggtgtgggcgaaggtgagctgctacctgagcctgcattggaaggaaggccagacggtggaggacattgtggcacatgaccttatgagaaaggacggctggatgaacctggtatatgacgcggagtgcaccgcgttggacatggaggatctgatggtggaggaccttcttgatgacgttgtcattcagatagtgttagaatccattgatgaatgactatccggagcctctttttttaaccagcggcttgagcttcgcagtaatctgttcataaggctgaacagtgaagtgatatccgaaggaatgtactagatagatggatcgcttgtctgtctcgcattgtgcaacagtaactgtgtagatcattttaaaagattggcgattctatgaattgtcaaatgtggcagatgttggccatgcatacaaagttggaaacagaaggtaaacaatagataagaaatagcgaaacagatagcattatatacctgttaaattcaaccaaactgtcgtgagtttttattagtcaatactggtatatctaggttgtgtctcccctacaaatcctggtgttttgtactctattcatgagtctgtggaaggcacaattctgagtgtgaaaaacactactctgttatatatgtgtgactacggccatcttttcagtgaattgtcgtatatttttttaacaagtcagcaaatcgtcatatatggttatagatatgtgcttgcaacttgcaatcttctt

SEQ ID NO: 217863 - DNA, 6081 bp, Zea Mays
ctcaaaaacctctcgttccgaaagcgcacacaacaacagaaaacacgcgcgacggccaggtagagacagatccatttctcaccttgccccacctccctcgccgatcggggtcccccgcgcccagatcgcttcttcgcttcggtgcggaggtggccgagggggaggaggagctcccggatccgccccgccgtcgtcggctggtcgtggcgcgatccgcgggagagcagcaatgacggcggaggggacggcgtgcaacggcgccggcgaggcgctgaaggcggaattcgcgccggagaaggtggtggccgtgtccctggaggagaagccggtcggggagcgcgagggcgaggacgtcggcgggccgttcttgatcgtgaacggcggcgattccgacgggcactccgagcctggctcagatctgggcaaggcgcccgacgaggaccctgcatccgaggaggacgacgtgcccaccttcaatgcagctccggacgcggccgtggccggagatcacgggaccgccgaagggcaagttggtgctcagggtgcggcactcggtgcttcgtcggcggacgggggtgatcgtgcttccgacgggtctgagggtagcgcggatgagagcagaggtgacccaagttccgattgtgttgccgaagtggcgcagcaggaggctgttggtgaagaggacagtggggcagctgctctggcgtcccgtgaatgcgaacctaccatcaccagtgctgactctgaggcacactatgtggattctgaggttgaagacaaggagggcacagtggatggtagtgctgttgttgatgccgttgaagcggtggtgcatcaggaagctagtacagagcaggatgaagatgctgctgtgatgtcctctggccatgatgatgccctaacgtctcccaagtcttgttctgctgccgtggagtccgaggttattagagaggatagcaaagaacagagtatcactgatggtgtggagccacagcagcagggtacagttggggcaagtactttggtggagaatgagcatctttgtgccgacatgatggctgattcatttgtagctgccaatgagcctgacagtcaagaggatgctgctgtgatgtcctctggccatgatgatgccctaacgtctcccaagtcttgttctgctgccgtggagtccgaggttattagagaggatagcaaagaacagagtatcactgatggtgtggagccacagcagcagggtacagttggggcaagtgctttggtggagaatgagcatctttgtgtcgacatggcggctgattcatttgtagctgctactgagcctgacagtcaagaggatgctgctgtggagtcctgcgggcacgatgatctgctaacttttactgagtctggttctgctgacattgagtctgaggtttatggagaggatagcgaacaaaaagagagcaacactgttgttgtggagatcgtggtgcagggcgtaggtagggcagatgtgctgatggcaaatgggcatctttgtgccgacacccaagctggttcttctgaagctactactgagcctgagaatcatgctaatggcagcaaactgactgatgttgcagaatcagtggagggggatgccggcagtggagaacaggatacaatggattcgtcgcaaaccaatgggcatatttatgttgccttgagtgctgattcttgtatagttccttctgagtccaaggcccattcctttgagacagatgggcaacgaactgatcagctacaagaggaagctccaaaacttgaagctgaagtattggagggagtgctaaaaccaactgaaaggaactgtgcaggtagtgttgagaaactcataggagaggaagttggcacagatgggcatgcaagcataggaggtacagctgatgcttatggggagcaagaagccaagcctatgcaggtagaaggtgaagtcacttgcggtattctcgaatttgaaaaagtggataaggatggtgaagagggtttgtgtgatgactacacggttggtgttgtttcttctaatgaggaaacagagcttcctatgaaggaaaaagtagatgaagctgtccccagtgttaatgttggtgggccagagaaagtaactgacaatacaagccaagataccaagacagttgattttattgatgaaatcacagcagagtcaaactttaaagctgaaaatatggttgaagtgaaaagtgcagctcgtgaagttgacaaaacagaggtaaaagatcttgcttttgctgatgaggctaatgtagctcctttacaccttcaacgtgactgtgaatctgttatggaaactatagagcatgagaaggtagaattaccaggtggttgtcaagctcatgaaattgtgtattcttcagaactagaaccgaagaaagagtttgagatgggggttgatggtgctgttccattgcaaggagctgcagcttctgttgcctctgttttccaccatgagccaatgtccattgatttgtctgagaatgatagcggtaaccattctggcccaactactgcgttggaatcctgtgaccatgtgcaaaatgaagagagcatatcccaagaaatttccatgaccactattgagcaacctatagctattgatcaagttgaacctgtcaacctgaatgtagatgaacttgtggttgatgatgatcaacctggttttgctccaaggtgtgaatctgctaggctggataaacctggatgtacttccaaaaaggatgattcaaatgagattgttgaagatagcaaatcactggaaaatcagttagaaatttgcaatgcagctactatgtctgatgagtgttcctccagaaatgcaaatgaagatccctctccaattaatatgtctgctgagtgttcctccagaactgcaaatgaaggtttctctccaattaatgaggcttctcatctagctgaggagtcttgcctttcagacaagtcatacaatgctatcagttatgaaaatggaaatgggcctgctaaatcttctgaggagcctgacaagtcatgcaatgctatcatttgtgaaaatgaaaatgagcctgctaaatcttctgatgtggttgaaaccagatgcgtggaagcattagcgccttcatctgttggcacggttgtcacggcagaacagaaggacaatggacaccgtgcttctggtgagtggcatggagataatgtgcaagtcattggacaacaacagaagatctacataattaaagttccaaagtttgccggtgatgatctctggaataagatccaggctgcacaggctcacttagaccacctgacccaggaaagagatgcaattaaccgtcgtaggcaaaagcaaaaggctgtatgtgatcaatacagggagaagcttgaggcagcacgtagagaagagcgggaagctaggactgcacatggagataagaagaatgatttaaataatgtacgttcggtactagggaaattgcaccaagcaaattcagctgaagaacttgatgagctgattgcgaagaaagagaggactatgcaacatgagaccatttctttgaaagaagaaaaacttttaattaaagagattaatgaattaaaagcccaacggaagcagctatccaccactatgggctcaaaggctgaaatcaatgaggcatttgaccaaaaagatcacattcatgaaaggcataaggtgttaaagaaggattctgatgttttattgaccaacctgaaattcctagaggaaaacacaagaaagattcaaaagtctttcgaagatgaaagaacaggtctcagaaaattaacagaggaacaccgagcagctaatgaaatacgtcaaaaggcctacattgaatggactgagcttagatcagagccctccaagaagaatgaatacttcttcaggtacagggatgaccggaatgcagcagaaattttcagagctaatggcgatataaatggacttaaatcacactgtaatagtcagattgagggagtcatggaaatgtggaacaaaaacgaggaattccgcaagcagtatgttgagtcaaacaaggttagcacactaaagagattagggacccatgatggacggaaacttggccctgatgaggaccctccagtcatatcaagcagaagaccaagcagcatctatccattgtctgcctcaagcccgggagtggccactttagcttcaataccagcacctgtggtagctgctccagctgcagtctctgccaaagaggactcatttcctgttttggaagccccccagaccagcaagcgcaccaagtcaaaagcatctgatatctgtgcccagaccgagaacaactctgttatagtatcggaggcagaggctttggaacagactttgaaagagaaagctaaggccaaggaggccgaggagaggaagaggcggaaagccgagaaggacaaggagaaagccgagttcaaagcgcgcaaggaagctgaggagagggagaagaagaaagccaagaaagacaaaaggagaggcacggcaccagcagattctagcctcactggtgacgggcacgccgcggccttggccacagcagacactgacagcaacgcatcggacaacccgagggaagctgaggctcctcaaccggcggcggctcccaagaggctgtctaggcccgcagcggcaatcaagcagctgaacagggtgcagcccatgccggcgccgctacgtaacaggggcagaaggagactgcggcagtacatcctgatcgcggcggccgtgctatcggggcttgcgttgttcgtggcaggcaactatattcccaggctcaagtcggttcactcctaagtttatctgtaggaaaggggtgctaatctgtcgcggtgaacctgggtgtgattcgtattatttcgattattctccggttggtttgtactattttttttttacctcatataggttggttgtgaaagatgggggtgcattgtgttaaaagttgttttacaggatggtggtgaaatcttcgttagaacatggataataattagtactatagattctttcttgtagtagccttagcgtatatgatatttactggatatgtcgttcgccctatcgctctgccttaaatatctacataaatacagacatacagtagaataaatagacacaaacactgtatgataaacttgaataaatatctgatcgcttttgctcaacatacgaattaagcttagattctcctgcttctgccaatgttctcgacgaaggcctccccaatgccctccccgatggcctcgatgaggccgccgatgaccccgaacagcgcgttgacggtgaccctggcggcggtggccagcgcgctcctcttctccggcggcacgacaccgtgcacgtagagcccgttcaccacgtccttggcgcacctggcgtggaggtagtagccgcagggcaggcactggtacgcgtgctgccccgcgcgcctcgtccgcctgcacgcctggcacacgaagctcgtctgctccgcgccgtcccgcgccaggagcagcagcgggtgctcgtgcacggccgggagctccatccgccgcgccatcgccgcgcagcacgggtgcatgtcgaagctgcacgacgcgcaccggaacgagaagcccctcacgggcttaccgcacacgtcgcacctgcagcggaggaagccgcccgacgccggcttcacgaagaagaggaggtgcgggtgcttggggtggaacgggtgctcgtgcagcgacggcggcgccagcgcgcaggactcgtgcagctggaagccgcaggcctggcacatgaaccgcttcccggcgccgtactccttgcaccccatgcacatgaacaggtgcgggaagtcgaaccgggccagccggtgctccgggtggctgaaatgcaccatctcggcctcagcctccggcccgtccacgacgcgatctctcgtctccggtgcatcgtcttcggacgacgacgatggcagccggtggccgctgagctcccttgagctcatagacacgcacctgctgttcacgctgttgcttttacctctacctgtaccattgccattt

SEQ ID NO: 217864 - DNA, 6088 bp, Zea Mays
ctcaaaaacctctcgttccgaaagcgcacacaacaacagaaaacacgcgcgacggccaggtagagacagatccatttctcaccttgccccacctccctcgccgatcggggtcccccgcgcccagatcgcttcttcgcttcggtgcggaggtggccgagggggaggaggagctcccggatccgccccgccgtcgtcggctggtcgtggcgcgatccgcgggagagcagcaatgacggcggaggggacggcgtgcaacggcgccggcgaggcgctgaaggcggaattcgcgccggagaaggtggtggccgtgtccctggaggagaagccggtcggggagcgcgagggcgaggacgtcggcgggccgttcttgatcgtgaacggcggcgattccgacgggcactccgagcctggctcagatctgggcaaggcgcccgacgaggaccctgcatccgaggaggacgacgtgcccaccttcaatgcagctccggacgcggccgtggccggagatcacgggaccgccgaagggcaagttggtgctcagggtgcggcactcggtgcttcgtcggcggacgggggtgatcgtgcttccgacgggtctgagggtagcgcggatgagagcagaggtgacccaagttccgattgtgttgccgaagtggcgcagcaggaggctgttggtgaagaggacagtggggcagctgctctggcgtcccgtgaatgcgaacctaccatcaccagtgctgactctgaggcacactatgtggattctgaggttgaagacaaggagggcacagtggatggtagtgctgttgttgatgccgttgaagcggtggtgcatcaggaagctagtacagagcaggatgaagatgctgctgtgatgtcctctggccatgatgatgccctaacgtctcccaagtcttgttctgctgccgtggagtccgaggttattagagaggatagcaaagaacagagtatcactgatggtgtggagccacagcagcagggtacagttggggcaagtactttggtggagaatgagcatctttgtgccgacatgatggctgattcatttgtagctgccaatgagcctgacagtcaagaggatgctgctgtgatgtcctctggccatgatgatgccctaacgtctcccaagtcttgttctgctgccgtggagtccgaggttattagagaggatagcaaagaacagagtatcactgatggtgtggagccacagcagcagggtacagttggggcaagtgctttggtggagaatgagcatctttgtgtcgacatggcggctgattcatttgtagctgctactgagcctgacagtcaagaggatgctgctgtggagtcctgcgggcacgatgatctgctaacttttactgagtctggttctgctgacattgagtctgaggtttatggagaggatagcgaacaaaaagagagcaacactgttgttgtggagatcgtggtgcagggcgtaggtagggcagatgtgctgatggcaaatgggcatctttgtgccgacacccaagctggttcttctgaagctactactgagcctgagaatcatgctaatggcagcaaactgactgatgttgcagaatcagtggagggggatgccggcagtggagaacaggatacaatggattcgtcgcaaaccaatgggcatatttatgttgccttgagtgctgattcttgtatagttccttctgagtccaaggcccattcctttgagacagatgggcaacgaactgatcagctacaagaggaagctccaaaacttgaagctgaagtattggagggagtgctaaaaccaactgaaaggaactgtgcaggtagtgttgagaaactcataggagaggaagttggcacagatgggcatgcaagcataggaggtacagctgatgcttatggggagcaagaagccaagcctatgcaggtagaaggtgaagtcacttgcggtattctcgaatttgaaaaagtggataaggatggtgaagagggtttgtgtgatgactacacggttggtgttgtttcttctaatgaggaaacagagcttcctatgaaggaaaaagtagatgaagctgtccccagtgttaatgttggtgggccagagaaagtaactgacaatacaagccaagataccaagacagttgattttattgatgaaatcacagcagagtcaaactttaaagctgaaaatatggttgaagtgaaaagtgcagctcgtgaagttgacaaaacagaggtaaaagatcttgcttttgctgatgaggctaatgtagctcctttacaccttcaacgtgactgtgaatctgttatggaaactatagagcatgagaaggtagaattaccaggtggttgtcaagctcatgaaattgtgtattcttcagaactagaaccgaagaaagagtttgagatgggggttgatggtgctgttccattgcaaggagctgcagcttctgttgcctctgttttccaccatgagccaatgtccattgatttgtctgagaatgatagcggtaaccattctggcccaactactgcgttggaatcctgtgaccatgtgcaaaatgaagagagcatatcccaagaaatttccatgaccactattgagcaacctatagctattgatcaagttgaacctgtcaacctgaatgtagatgaacttgtggttgatgatgatcaacctggttttgctccaaggtgtgaatctgctaggctggataaacctggatgtacttccaaaaaggatgattcaaatgagattgttgaagatagcaaatcactggaaaatcagttagaaatttgcaatgcagctactatgtctgatgagtgttcctccagaaatgcaaatgaagatccctctccaattaatatgtctgctgagtgttcctccagaactgcaaatgaaggtttctctccaattaatgaggcttctcatctagctgaggagtcttgcctttcagacaagtcatacaatgctatcagttatgaaaatggaaatgggcctgctaaatcttctgaggagcctgacaagtcatgcaatgctatcatttgtgaaaatgaaaatgagcctgctaaatcttctgatgtggttgaaaccagatgcgtggaagcattagcgccttcatctgttggcacggttgtcacggcagaacagaaggacaatggacaccgtgcttctggtgagtggcatggagataatgtgcaagtcattggacaacaacagaagatctacataattaaagttccaaagtttgccggtgatgatctctggaataagatccaggctgcacaggctcacttagaccacctgacccaggaaagagatgcaattaaccgtcgtaggcaaaagcaaaaggctgtatgtgatcaatacagggagaagcttgaggcagcacgtagagaagagcgggaagctaggactgcacatggagataagaagaatgatttaaataatgtacgttcggtactagggaaattgcaccaagcaaattcagctgaagaacttgatgagctgattgcgaagaaagagaggactatgcaacatgagaccatttctttgaaagaagaaaaacttttaattaaagagattaatgaattaaaagcccaacggaagcagctatccaccactatgggctcaaaggctgaaatcaatgaggcatttgaccaaaaagatcacattcatgaaaggcataaggtgttaaagaaggattctgatgttttattgaccaacctgaaattcctagaggaaaacacaagaaagattcaaaagtctttcgaagatgaaagaacaggtctcagaaaattaacagaggaacaccgagcagctaatgaaatacgtcaaaaggcctacattgaatggactgagcttagatcagagccctccaagaagaatgaatacttcttcaggtacagggatgaccggaatgcagcagaaattttcagagctaatggcgatataaatggacttaaatcacactgtaatagtcagattgagggagtcatggaaatgtggaacaaaaacgaggaattccgcaagcagtatgttgagtcaaacaaggttagcacactaaagagattagggacccatgatggacggaaacttggccctgatgaggaccctccagtcatatcaagcagaagaccaagcagcatctatccattgtctgcctcaagcccgggagtggccactttagcttcaataccagcacctgtggtagctgctccagctgcagtctctgccaaagaggactcatttcctgttttggaagccccccagaccagcaagcgcaccaagtcaaaagcatctgatatctgtgcccagaccgagaacaactctgttatagtatcggaggcagaggctttggaacagactttgaaagagaaagctcgtctattggaggaacaattggagttagctaggaaggcggaaagccgagaaggacaaggagaaagccgagttcaaagcgcgcaaggaagctgaggagagggagaagaagaaagccaagaaagacaaaaggagaggcacggcaccagcagattctagcctcactggtgacgggcacgccgcggccttggccacagcagacactgacagcaacgcatcggacaacccgagggaagctgaggctcctcaaccggcggcggctcccaagaggctgtctaggcccgcagcggcaatcaagcagctgaacagggtgcagcccatgccggcgccgctacgtaacaggggcagaaggagactgcggcagtacatcctgatcgcggcggccgtgctatcggggcttgcgttgttcgtggcaggcaactatattcccaggctcaagtcggttcactcctaagtttatctgtaggaaaggggtgctaatctgtcgcggtgaacctgggtgtgattcgtattatttcgattattctccggttggtttgtactattttttttttacctcatataggttggttgtgaaagatgggggtgcattgtgttaaaagttgttttacaggatggtggtgaaatcttcgttagaacatggataataattagtactatagattctttcttgtagtagccttagcgtatatgatatttactggatatgtcgttcgccctatcgctctgccttaaatatctacataaatacagacatacagtagaataaatagacacaaacactgtatgataaacttgaataaatatctgatcgcttttgctcaacatacgaattaagcttagattctcctgcttctgccaatgttctcgacgaaggcctccccaatgccctccccgatggcctcgatgaggccgccgatgaccccgaacagcgcgttgacggtgaccctggcggcggtggccagcgcgctcctcttctccggcggcacgacaccgtgcacgtagagcccgttcaccacgtccttggcgcacctggcgtggaggtagtagccgcagggcaggcactggtacgcgtgctgccccgcgcgcctcgtccgcctgcacgcctggcacacgaagctcgtctgctccgcgccgtcccgcgccaggagcagcagcgggtgctcgtgcacggccgggagctccatccgccgcgccatcgccgcgcagcacgggtgcatgtcgaagctgcacgacgcgcaccggaacgagaagcccctcacgggcttaccgcacacgtcgcacctgcagcggaggaagccgcccgacgccggcttcacgaagaagaggaggtgcgggtgcttggggtggaacgggtgctcgtgcagcgacggcggcgccagcgcgcaggactcgtgcagctggaagccgcaggcctggcacatgaaccgcttcccggcgccgtactccttgcaccccatgcacatgaacaggtgcgggaagtcgaaccgggccagccggtgctccgggtggctgaaatgcaccatctcggcctcagcctccggcccgtccacgacgcgatctctcgtctccggtgcatcgtcttcggacgacgacgatggcagccggtggccgctgagctcccttgagctcatagacacgcacctgctgttcacgctgttgcttttacctctacctgtaccattgccattt

SEQ ID NO: 217865 - DNA, 1165 bp, Zea Mays
cttggagtcatgcatgtgtcttggtggtctcagaaacaaaagacggtgtccctctcaaaagtggatcatgtaaggcgttcagatgttctttctgcctggagtggtatacgtcctttggcgatggatccatcagcaaagaataccgagagtatttctcgagatcatgttgtatttgaagactaccccgggttaataacaattaccggtggaaaatggacaacctataggagtatggctgaagatgctgtaaatgcagcagtcatgtctgggaatttgaaaccagccaatggttgtttgactgataatttgcatattgttggtggatatggatgggatcctgcttcttttacggttcttgctcagaattataagcgaatgaagaagacatatggtggcaaggttattccaggtgcaatggacagtgctgtatcgaaacatttatcgcatgcatatggatctttggctgaacaagtggctactattgcccagaacgaaggcttgggaaagcgccttgctcatggatacccatttttggaagctgaagtagcatactgtgctcgttatgagtactgtgaatctgccgtggattttgttgcaaggagatgccggcttgctttccttgacacagatgctgctggtagagcattgccccgaatcattgaaattttagcttcagagcacaagtgggacaaggcaaggaagaaggcggagctgcagaagggtagagagttcttggaaacattcaagtcatctaagaacgcccaattccatgatgggaagcataatggacgttcatgaccgaatatgcagttttctgaataagtgttgattttacacatgcacaagcaggctccgatacaagagtgagcctgcgaatgcagaaaggtttcgtttccacatttctacgcatggctgtgaaaatcggcgtgctggtttccagcagaataagatgtggtcacggcactatgtaattgtaaataccacatcatattagtcgattttgaaataaactggaaccaagaatttgtacttttaattgttattcttgcatgttatatagttcgaaagaggagcaaaatcgacatggccatttcctttcgtcagtacgagtgactaatttttatcattcgttcgaggtcagcatcccgagaaaccagaaaaagac

SEQ ID NO: 217866 - DNA, 2374 bp, Zea Mays
gccaaacacacgattcgcctcccaacgctactacccctttccttccaacttccgcccgccggcgccagccgcaaccgaacaatccaagcaacgcgtcaggcgccgccatggccacgtggcgcctccgccgcgccggtgccgccctagctgcctcctccaccctcgccgctgtcctcgccgcctcatcggcttccgccaccgacccgtccgccgccgccctagaagcggcaaggcagcgtgttgcgcggtcgggggccacgccgcccctgcgagacgcgcagcgtgcggcgctggcagggtccacccctgctgagcccctagacgtgctcgtcgttggcggcggcgccaccggatgcggcgtcgcgctcgatgccgccacccgcgggctccgtgtaggccttgtggagcgcgaggatttctcttctggaacctcctcccgatccaccaaactcatccatggcggcgtgcgctacttggagaaggcagtgttcaatcttgattatgggcagctgaaacttgtttttcatgcacttaaggaacgcaaacaagtcatcgagaatgctccccatttgtgccatgctttgccatgcatgactccttgctttaactggtttgaggttgtatactactggtttggtttgaagctttatgatcttgttgctggaagaaggctactacatttgtcccgatattattctgtggatgaatcagttgagcttttcccaacccttgcaaaaaacggacataattgtagcctaaaaggaacagttgtgtactatgatggtcaaatgaatgactcacggctgaatgtggggttggcatgcactgctgcagttgttggtgcagctgttctcaattatgctgaagtggtctctctcattaaggatgaatcgggggagagaatcattggtgcacgcgtccgtgacacactatcaggtagaataaagtaaggagtttgaaaccttcgcaaaggtggttgttaatgcagcaggaccattctgtgactctgtgaggaagatggctgacagtaccgtagcacctatgatctgtcctagtagtggtgtgcacattgtacttcctgattactactcccctgaagggatggggctaattgttccaaaaaccaaggatggcagagttgtatttatgttgccatggttaggaaggaccgttgcgggaacaactgattctaacacagcaataacaatgcttcctgaaccacacgaggatgaaatacagttcatattggatgcaatctctgactatcttaatgttcaggtaaggcgttcagatgttctttctgcctggagtggtatacgtcctttggcgatggatccatcagcaaagaataccgagagtatttctcgagatcatgttgtatttgaagactaccccgggttaataacaattaccggtggaaaatggacaacctataggagtatggctgaagatgctgtaaatgcagcagtcatgtctgggaatttgaaaccagccaatggttgtttgactgataatttgcatattgttggtggatatggatgggatcctgcttcttttacggttcttgctcagaattataagcgaatgaagaagacatatggtggcaaggttattccaggtgcaatggacagtgctgtatcgaaacatttatcgcatgcatatggatctttggctgaacaagtggctactattgcccagaacgaaggcttgggaaagcgccttgctcatggatacccatttttggaagctgaagtagcatactgtgctcgttatgagtactgtgaatctgccgtggattttgttgcaaggagatgccggcttgctttccttgacacagatgctgctggtagagcattgccccgaatcattgaaattttagcttcagagcacaagtgggacaaggcaaggaagaaggcggagctgcagaagggtagagagttcttggaaacattcaagtcatctaagaacgcccaattccatgatgggaagcataatggacgttcatgaccgaatatgcagttttctgaataagtgttgattttacacatgcacaagcaggctccgatacaagagtgagcctgcgaatgcagaaaggtttcgtttccacatttctacgcatggctgtgaaaatcggcgtgctggtttccagcagaataagatgtggtcacggcactatgtaattgtaaataccacatcatattagtcgattttgaaataaactggaaccaagaatttgtacttttaattgttattcttgcatgttatatagttcgaaagaggagcaaaatcgacatggccatttcctttcgtcagtacgagtgactaatttttatcattcgttcgaggtcagcatcccgagaaaccagaaaaagac

SEQ ID NO: 217867 - DNA, 1547 bp, Zea Mays
atgacgacgctagatgatgtgatatatgaggccttggagttgagggatggaggatctgattatcttggcaagggtgttcttaaggctgtgaacaatgtaaatagcattattggaccagcaattgttggaaagcttgatggaacctccaacgaatggggctggtgcaaacagaagcttggagcaaatgccattcttgcggtctcacttgctgtgtgcaaagctggagctatggtgcagaagattcctctttaccagcacattgcaaatcttgctggaaacaaaactctggtgctccctgtacctgcctttaatgtgattaatggaggatcacatgctggaaacaagcttgccatgcaggagttcatgatcctcccaactggtgcctcattcaaggaggccatgaagatgggagttgaggtgtaccaccatctgaaggagcataatcaagaagaactgaagaagtatggtcaagatgctacaaatgttggggatgaaggtggttttgcacctaacattcaggaaaacaaaaaaggccttgaactactgaaggcggctatagaaaaggctggctacactgggaaggtgttcattggaatggatgttgctgcttctgaattcttcagtgagaaggacaagacttatgatcttaatttcaaggaggagaacaacgatggttcgaacaaaatatcaggtgacagcctgaaagatctgtacaagtccttcgtttctgagtaccctattgtgtcgatcgaagacccatttgatcaggatgactggaccacttacgccaaactcactggtgagattggacagcaagtgcagattgtaggagacgatcttctcgttactaatcccacaagggtcgccaaggccatcaatgagaagacctgcaacgctcttctcttgaaggtgaaccaaatcggctctgtgaccgagagtatcgaggctgtcagaatgtccaagcgtgctggatggggagtgatggcaagccacaggagtggcgagacagaggacaccttcatttctgacctctcagttggcctggctacgggccaaatcaagacaggagctccctgccggtctgagcgcctggccaaatacaaccagctgcgcttaggatcgaggaagagctcggtgttgccgcagtccacgccggagcgaagttcagagcaccagtggagccctactgaaccacgtgtgcctagagcctggagaaagaagatgaggatgtttccccactagttcgctgctgctttttgatagaatgcctgtacgatcacagtaatagaagtttggccttgtttgccgaatagctacactagtgggtttttttttctcgtggaaaaaaagaaagaaataaaacctttttttattctgaggagtgacgactgacgagtggtggtccgcactcgtggtaatatcgttgcccaaaatgattttgatggaacgggaaaatgttgctggtctttgccatatatgagtaggggatccaaatgtttcttcacaaaatattaagactctaaataaattttagttaaaaataaata

SEQ ID NO: 217868 - DNA, 2119 bp, Zea Mays
cctgtatacagtaaaagcaggagaaaccggttcaaattacagtcgaccttgacaaccagtacagtcgctagctatgactcttcggtttcagtgacgcagtacatgctagcttgctgccatctctcttctctatatatatgtgcatcgccgcgcgcatacatacatgcatagtaaagttagcaatgtcgatggattacttggctgctgctgtacccgtgaccttggctctgggagtgggatctatcttgttggtcttacgatggacgtactgccgccgccgaacaagcgccgaacaagtgagactgccgccggggtcaaggggcctcctgttcctaggggagacgctccactacctggcagcgtcctccaccccgggggtattgccaccattcttccagcgacggttggaaaggtatggccccatcttccggacgaacctggtcggggaggatctcgtcgtgtcgctggacgcggagctgaacgcgcacgtgctgaagcaggaggagcgcggcttccagatctggtacccgccctccttcatgcgcgtcttcggcgccgacaacatcaccgccaagctcggcgtgctccaccaccacatgaggaccctcgtgctccgcctcttcggccaccagaccgtccgctccgtgctgctgcacgacgtgcagcggagcgcgcgcgacgagctgcgctcatggctcggccgcccggacgtcgaggtcaggacggccacctccaggatgatatttggcgtcactgccaagaagctgatcagccatgacgacgcagcatctggagaaacgttgtggagatgcttccacgactggacttcggggctgctctcgtttccggtttccattcccggcacaaccttctacagatgcatgcagggacgtaagaaggttatgacgatgctgaaacagcagctcgttgagcgtcgacggaacgcagcggagcgcgagacgacagaggatttcttcgatctcgtgatcgatgaactgaacaagccagaccctatgatggacgagagcaccgcgttggacttgctgttcaccatgttgtttgcgagccatgagacgacgtccatggtattaaccgtcatactcaagtatctaacggacaaccccaaagctttgcaagaactgacagaggagcacgaaagaatcctggaaagtagggccaatccaggctctgacctcacgtgggaggagtacaagtctatgaaattcacatctcatgttatacatgagtcgctaaggctcgcaaacatcgcactggccatgttcaggaaagcaaatcaggatgtgcacataaatgggtacacaattccaaaaggatcaaagatcatgatgtgtgcactagcatcgcacttgaatacggaggtctacgaggacccctcagtgttcaatccatggagatggaaggatattcctgaaccagtcggcacctctaaggactttatggccttcgggggtggtttgcgcctatgcgctggtgccgagttttccaagatgcagatggctatgttcctccattacttggtcacaaattacagctggaaacccgtcagcggtgggacaatgttattctatccaggactgcaatttccagaaggcttccacatccagcttcttccaaaaatcccaaacgtggttccataaaccctatgaagaaatatgaatacgaataatttaagcaaatattctaaatgtaccctggggaattgaagttcgataacgatgtggtacgggctgatttggtaaccatggatcacaggaggatgggagaggattgatggagaaattagttcatttctccctcaacctctttcaatcctcttatgatccacttatcaccaaatcaaccctaatgatagcaggtcgaattgtcggaacaaataatagtttcaccaaacagaaggggagtatgcatgtgtgtaactttttatagttataaataatagtagagtaaattctgctcgttgtgtaacaactatgcaggtgagtaaaaattggttcagcatattgtgtatattatgcccagttcaatggaaaaaaaactttgttgtttggtgcgtatatacaatcttccaaacatgccatggatgatgtactttgccttg

SEQ ID NO: 217869 - DNA, 8979 bp, Zea Mays
atgccacacagccacagcaacgaactgcgggagctttacgctcgaaaagccgcgagccttcgttcgtccccgtcaacgtcgcgtttcctctttttcccggttccccgatcccctccgcgttttcctccaccacaccaccacttccctcgccgccactcgcgttcccgcccccaaggattacaccgtggcatctcgctacagccgccgctgatgcatctctccttccatccccctgctccgtcgcatctccctcgccggggcggcgtcgcaccaaccacaaccccatccttcgtcctccggaggaaccagcggaggcggcgccaccaccaccgcccgtaccgcctagccccccgcgcctctctctcagacctcatcgccaacctcccctcctccctcgcgctcgtaggtcccgcggcgctcgcggctgcggccgcggtcgccacctctttctcctcctggtcctcctcgtcccagaccagcctcccgccgccgccccaggaatccgaggactacaacgcgtgcggggatgtcgcgggcgagtgggttctcttcaccagcccggcgccattcaaccgctgcgtgctgctgcgttgcccgtccgtgtctttcgaggacgggctcgacggcgtcaacgagcgcctcctcaccgaggagcggcactacgtgaatctgagcaggggctgcatccccgtggtgcgcggcggggacggtgcctatgatatctcttaccagaggatttgcatcgccctggaggacggtggggtgatcgcgctcgattggcctgataatttgtacttggacaaagagcatggactggattccacggtgcttatggtgcctggtacgcacgaggggagcatggagaggaacattaaggtgttcgtgttagatgcactgaacaacgggtactttcctattgtaatgaaccccagagggtgcggcggctccccggtcactaccccaaggttatttacagcagctgacagtgatgatatctgcacagtggtacagtttataaacagcaagagaccttggacaacactaatgggtgttggatggggctatggggcaaatatgcttacaaagtacctcgtggaagttggagagtcgactcctcttactgctgctgtttgtattgacaacccttttgatatagaagaagcaacgagatcatttcctcatcatataactcttgatgaaaagctcacagctggcctggttgatattttgcgttctaataaggaactctttcaaggtaaagctaaaggtttcaatgttcaaaaggctttatcagccagttgtttgcgtgacttcgatgttgctatatccatggtttcacatgggttcgatactcttcatgacttctatgctgaaattagtacaaggctgtcagttgcccatgttagaatacctctactttttatacagagtgatgatgggactgtgccgcttcttgcagtgccccgcagttcaatatcagaaaatcctttcacaagccttctcttttgttcttgtgtacactccactatgtccatgtttcagagatacagtgtgttatggtgccagaaccttgccttagagtggttatcagcagttgagtttgctcttctgaagggtcgccatccacttatcaaagatgtggacatcacaattaacccgtccaaaggtctagcatttgttgaacctcaagtgaatcaaaggaaatctccaaaaggaaatagttttcgtcaacattctgagcttattttgtataataatgttgcacatggaataaatggactgctagttgattctgcaaataagtactctggtgctcaaaacaaagaaaatgggcagttgaataataatggtgacataggaactgtagacaaagatctggaagaagagttagaagagagttctgaagatgttgagaaaggtcaggcactacaatcagcaagtcttgtgatgaatatgctagatgctacaatgcctggcactctcaatgatgatcagaagaagaaggttctggtagctgtggagcaaggggagactcttgtgaaggctctagaagaagctgtacctgaagacgtgcgcggaaaacttacagcttctgtaactgaaattttacattccaaacgagaaactttcagtttaggtgcattgaatcgacttggctggaacaatgtaagaccaaccactaccaagacattggcccaggaaaagctcaaagattcagatcatgaaagcgggcttaaggataccaaaatggttgatcagaacaggatttctgcaaccgcttttgagggggatctgaaagacattaatatgacaaatgatgataaacctggagaaagcatcgaatcgtcacagggaaagccttctcaaacttctgaacctgttggaacagcgacagaaattggaactgaacagccttataaatcagataaagctaattatggaaccaatgatagcagtgaagggcagcatataacagaacaggacaatgaaatgactccaaagcaagtttctgatgatcagtcagtggccaactgtaatgggccttctaaagaaagggagcaatcagcagatgctacaacagaccagaatctacaatctaacacaacaacagaaaaggaaggtgacacaagtcgcacaggtgaagataagactgctcataatgtgaatgatcaaagcacacaagtctctaaaacagaagaatcaaaaccttcccccattactgtgacccaggcattagatgcattaactgggtttgatgactcgactcaaatggctgtcaacagtgtttttggagttcttgaaaatatgattgatcagtttgagaaacaacaggactctgagaatggtgaaagtgctgatggaaatgatggtatcacttccgtggatgagacagaatctcatgtgaaagagaatacagagaatgtgtcaagtggagaagatataaaccactcatctaaacaaccagaaggtagcagtcctggaaaaactgattcaatcatgtccaaatatgattgtgcttttggtgaggaaaatcccaatttaagcattgtttcatatggtagaggaaaaatgagatattaccgaggaaacaaagttggtgatcatgtgggtgctgatggtatcgagcgagtcagtggcttgcctgactatttattagatatagctgtcaactcttacttgaaggcgcaatatgcaatgtatcttcgtgaatttctttacacagaattgcaactcaaatcaccagagtctaattcagcaactgatcttttccttgatccacaagagggtaaatggaaaattgaagaacagatgggcaatgtgcaaaatgacaattttgaatcctcacaagagtcatctaagatggacaatgctattgagccaccctactttataccaggaaaaaatccagacatcgcatacaagtccaataaatggaataatacagtagcaaccaggtcaaaacctggtaatgatttgaacgaggcacttacacactttgttagagatgaactatcaagtgcccttaaaattgaagttggtcgcaaaatagggataacagatactaagcaacttgaaaggagtcttgcaaatgatgtagaacagattgctgctgaagtttctaaaactgttgtccttgactgtgagttgtattcagccatacatgtgcaaagaagtccaacaactatcaagtttggttcaacacatggaaaaaatgttgttgaagctgtgtcgactgcagttcagcaatctcagcatctgaggaatattcttcctgtcggtgtcatagttggtgtaactttggcatgtttgagaaattacttccatgttggtgtctctaagcatggtgaccatatgatagccactatgaagtcagatatttttggtgaggaagttattgttcaggacagcagcaaagagaatgttcaggatagtggaaaagcaaatacaaacgataataatattgaaaaaaccagtggggagaaccagcaggatatgacgaagtcacagggtcaagatatgatggtcggggctgtgacggctgccctaggtgcttctgctttggtagcacatcaacaaaataaggatgaaaattgcaaggattttgttgagatagaaggtgccaaacatgaggaaactgcacaggaaaagagccagaacagtttgatgagcagttttgctgagaaagccatgtctgtggcaggacctgtagttcccacaaagggtgatggtgaggttgatcatgaaaggcttgttgcagttctagctgaactcggacaaaagggtgggtttttgaggttcattggaaaaattgctctactctggggcggaattcgtggtgctatgagcttaactgataggcttatctcattcttacgtatcagtgagcggcccttatttcagaggattatgggattttctttaatggttctcatcctatggtcccctgttgtgattcctctactgccaacgcttgttcaaagttggacaataagtgcttcaacggggattatcggatatgcttgcattgttggattgtacatttctataatgatacttgtcatgctgtggggcaaaaggatacgtggctatgaggatccagttgagcaatatgggatgaatatttggtcggcgtctaggctgcgagagttttttcaaggtttggttggaggcgtaacggtcgtagggttggtgcactcgataagcattctactcggttttgcagcgtttcggacagggttctcttcatctttagctagaccccttgatcttctcaagtcttctagtaatgtgtttctgctagctcttcgagggcttgccacagcaactagcattgctgttgtggaagaaatggttttcagatcatggcttccagaggaaattgcagttgatcttggttactacaatgccattctgatatctggacttgtgttttctctaattcatcggtcactaccctcagtaccaggtttcttgctactttctctggtactttttgggcttaggcagaggacacaaggaaagcttgctgcacccattggcctacgttctggaatcatgactgccagttatttaatacaaagcagtggtgttttaacatccaaacctgaaacaccgttttggatgattagcacttaccatctgcatccttttgatggtgttatcggcttaagtatctgctccttgcttgctatctttttcttccctcaaaagcctgttcagaaggatacatctgtgtgatgaggctcagaagagtaaaacataatgctggagtgagcttccaacaaggactaatcaccatgcgtatgctgcgagcaatgaagggtttttcctaccatacatgttaaaatgcaatgccctgcaacttgctggcagcaaagagtatgtgctcggttagcttcttgctcatctgactgagggtactgctgattggaatggcttttggatctataactagagtatccaggtcatttgtacttaggcaagtgtgtatactactctatactggattatcgaaatgggggatggtttcttccctacgttgtaaggtggcggaggaacagatgatatgcctaggaagaggaactagtagatgataagagtttgcccctgatattaggcttcctctgaaatgcaggaattctagaggaatatacaggaatttcacaggaatcagtccattctcacagaaaaaatgcaggaaactgaaaaaaaatccccgcattccaaagggggcatcatctaggatttcttcataccgaattatcgattgacttcgaccacataccgtgcttttgttcatgtctttgaacacaggcacacccaaatttcgaggtttacaaggaaaatcgccaggcagtaaaccttcaatgcttttggctaggttttcattctgaaagtcatgtcttccgcgtcagcataatcctgtattcctgtataacctctgttcggacttcgtagtgctcatctgagttctgattcggccgggcaactgtaaattctgtagtgttcgagaaaaaactgtaaattctgtaatattgccaagaattatgaatttacatgaactttacaggtataagttgcccgcctcacttcaccggctcaccgtgcttcacctgctatcttccatggcggcggctcacctcttctgctccgcaccggccgcctatcgcgccgcgaacccacggccccttgctacccgtggccgcgccaaccccgccacgggaacgtatctggtgctcaaaggggtatggtgctcatgtgcacatttcccccgggccacaccatcgagaagattcttcccctgccgcgcgtcgctcagccccgatggatcgctggccatgctcggggctcccagtcccaggatggcgccaccgatgaggaagccgtacatgcgggagcactcttgcctcatcttcccgcccccgcgcggtcgacgcccgctggcggtcatcaagttcctcggcggcgccttcatcggcgccgtccccgaggtcacctacggctacctgctggagctcctggcgctggagggctttgtggtcgtgtgcgtaccatacaacgtcaccttcgaccacgaggccgccgcgcgggaggtattccagagtttccatgcctgctacgacgcgctgctcgcgtcggggctcccggaggccggcctcagcgccctggacatcgcggagctcccgctctactctgttggccacagcaacggggcactgcttcagctgctagtgggaagctacttctcagaaaggataccagaggctaatgccattgtctcattcaacaataggccggcatcggaggctgtgccttactttgaacaggttgtgggatattctgcaaggggtgcatctctcccctgaagtagatgatcaacatatttggaccccctcggcttctggtgtttattctgctaaatctgcttatgacagattgttagtgggtgctaccagttttgatccgacaaaacgtatatggaaatgttgggcgcctcctaggtgcaattattttcctctggttggcttctttaagccgatgttggacagcggaccgtcttgcaaggcatggtttggatcatccggagtactgccccctatgtgaccaggaaaaggaaacagtgcaacatctcctagtggcttgtgttgttgcttgacaagtgtgttttttccatcctgggtttgagtggcctccaactcctcactcctgggattgctgatgaagtattccaagattggtggaaagcagctgaagcaagagtttgtaaggagaagaaaaaaggctttaactcgctggtggcgctttcttcttggaggatttggaaacatcgaaatgcttgtgtctttgatggggtgcccccaagtgtatctaaagtcattcaggacattaaggaggaggccagaatatggtgcttggcgggtgctgctggcatggttcttaggcgataaggcaagataaggcgttggaccaccgcctagacgcctatcttttccaatacagacatctatcagtccagattaaagtggcagtggcaccaatactcaagccaacatctaatcgataagagggccactatcagccaaaaagggaaaacagaataatacttcttttctaagcatccaacaaacaatttgtgtttaaagctgattttggtctaattgtgctttcctactggcctttggaagttacactgtcttaatagtatatttgttttatgcagatagggcccctttttaggcaactgatgcctatgatggaggcctcgcctgtttactcgatggccagaaatgcatcaggatatgcatggaaagctctatttgatttagctggaggtcttttacgtgagtatgatcaagaagctacggtatctctgagcaaatttattgatcagttaccatcagtaatgaaccaggtttcagaaggtgtgtctgaatttaaaccaacaccacctgaaaaccgtgaattctgcaagaattcctacagtgtacccaatacattattggtcaaattcactgtagatgctattgatgatacagacatagttgaagatgtcctgagaccccgcgttgattcaatcggtggacaaataaagaaggtcatactgtcaggaacacatctaactccatgtatacaggcactcagctttgttgtattgcaggatgtcaaatggcaagttggttcagaatacactccagcagatgccattgcacaaggattgaaatcattggctcttagtgaaacaagagtcctctcaagaacaattgctgattggtttacatccctttaaattttgagttattcaatacatctgttgaagtttggagttcttcttacaaaggaatgccttcatcaggtctcaacttcccattttgttgaagcagtccactattgtaatgagatgtaaggatacaatgtattatgtatggcacataagagcagtgcatttttgggctgtgctgagctggtcatgctcacccgcaggccctagccgtactacaaatatctgatcaagattggtggtttggggccttacttggatcgtagttgcaagctataaaaagcatcgaacccaaaagtccaagcagctcgatcctgtttgaggtacggtgccagcaaggttaagttggccaaatctgttgcacgcagacagcccaatgggggtttctgcaggctggcgaaagtaaaggcgtgcgataggaaatctgggaatgttttatattgccacattgtaattccacgttataggcgtatagctcaaatacatttggacggtttggaggtatttcgttggtgtgctggcagttgtttctgtatcgtgcatgtctgttgcaagaaggcctggatgctgctgacctgagaactgattgatttcgctgacgcttacagttcttgcaagggcgtgcaagtagaacaacccgtatgcttcaggaattagtattacacgaggttaacaaatgtaataggcttgggactttcttt

SEQ ID NO: 217870 - DNA, 8175 bp, Zea Mays
atgccacacagccacagcaacgaactgcgggagctttacgctcgaaaagccgcgagccttcgttcgtccccgtcaacgtcgcgtttcctctttttcccggttccccgatcccctccgcgttttcctccaccacaccaccacttccctcgccgccactcgcgttcccgcccccaaggattacaccgtggcatctcgctacagccgccgctgatgcatctctccttccatccccctgctccgtcgcatctccctcgccggggcggcgtcgcaccaaccacaaccccatccttcgtcctccggaggaaccagcggaggcggcgccaccaccaccgcccgtaccgcctagccccccgcgcctctctctcagacctcatcgccaacctcccctcctccctcgcgctcgtaggtcccgcggcgctcgcggctgcggccgcggtcgccacctctttctcctcctggtcctcctcgtcccagaccagcctcccgccgccgccccaggaatccgaggactacaacgcgtgcggggatgtcgcgggcgagtgggttctcttcaccagcccggcgccattcaaccgctgcgtgctgctgcgttgcccgtccgtgtctttcgaggacgggctcgacggcgtcaacgagcgcctcctcaccgaggagcggcactacgtgaatctgagcaggggctgcatccccgtggtgcgcggcggggacggtgcctatgatatctcttaccagaggatttgcatcgccctggaggacggtggggtgatcgcgctcgattggcctgataatttgtacttggacaaagagcatggactggattccacggtgcttatggtgcctggtacgcacgaggggagcatggagaggaacattaaggtgttcgtgttagatgcactgaacaacgggtactttcctattgtaatgaaccccagagggtgcggcggctccccggtcactaccccaagtggtacagtttataaacagcaagagaccttggacaacactaatgggtgttggatggggctatggggcaaatatgcttacaaagtacctcgtggaagttggagagtcgactcctcttactgctgctgtttgtattgacaacccttttgatatagaagaagcaacgagatcatttcctcatcatataactcttgatgaaaagctcacagctggcctggttgatattttgcgttctaataaggaactctttcaaggtaaagctaaaggtttcaatgttcaaaaggctttatcagccagttgtttgcgtgacttcgatgttgctatatccatggtttcacatgggttcgatactcttcatgacttctatgctgaaattagtacaaggctgtcagttgcccatgttagaatacctctactttttatacagagtgatgatgggactgtgccgcttcttgcagtgccccgcagttcaatatcagaaaatcctttcacaagccttctcttttgttcttgtgtacactccactatgtccatgtttcagagatacagtgtgttatggtgccagaaccttgccttagagtggttatcagcagttgagtttgctcttctgaagggtcgccatccacttatcaaagatgtggacatcacaattaacccgtccaaaggtctagcatttgttgaacctcaagtgaatcaaaggaaatctccaaaaggaaatagttttcgtcaacattctgagcttattttgtataataatgttgcacatggaataaatggactgctagttgattctgcaaataagtactctggtgctcaaaacaaagaaaatgggcagttgaataataatggtgacataggaactgtagacaaagatctggaagaagagttagaagagagttctgaagatgttgagaaaggtcaggcactacaatcagcaagtcttgtgatgaatatgctagatgctacaatgcctggcactctcaatgatgatcagaagaagaaggttctggtagctgtggagcaaggggagactcttgtgaaggctctagaagaagctgtacctgaagacgtgcgcggaaaacttacagcttctgtaactgaaattttacattccaaacgagaaactttcagtttaggtgcattgaatcgacttggctggaacaatgtaagaccaaccactaccaagacattggcccaggaaaagctcaaagattcagatcatgaaagcgggcttaaggataccaaaatggttgatcagaacaggatttctgcaaccgcttttgagggggatctgaaagacattaatatgacaaatgatgataaacctggagaaagcatcgaatcgtcacagggaaagccttctcaaacttctgaacctgttggaacagcgacagaaattggaactgaacagccttataaatcagataaagctaattatggaaccaatgatagcagtgaagggcagcatataacagaacaggacaatgaaatgactccaaagcaagtttctgatgatcagtcagtggccaactgtaatgggccttctaaagaaagggagcaatcagcagatgctacaacagaccagaatctacaatctaacacaacaacagaaaaggaaggtgacacaagtcgcacaggtgaagataagactgctcataatgtgaatgatcaaagcacacaagtctctaaaacagaagaatcaaaaccttcccccattactgtgacccaggcattagatgcattaactgggtttgatgactcgactcaaatggctgtcaacagtgtttttggagttcttgaaaatatgattgatcagtttgagaaacaacaggactctgagaatggtgaaagtgctgatggaaatgatggtatcacttccgtggatgagacagaatctcatgtgaaagagaatacagagaatgtgtcaagtggagaagatataaaccactcatctaaacaaccagaaggtagcagtcctggaaaaactgattcaatcatgtccaaatatgattgtgcttttggtgaggaaaatcccaatttaagcattgtttcatatggtagaggaaaaatgagatattaccgaggaaacaaagttggtgatcatgtgggtgctgatggtatcgagcgagtcagtggcttgcctgactatttattagatatagctgtcaactcttacttgaaggcgcaatatgcaatgtatcttcgtgaatttctttacacagaattgcaactcaaatcaccagagtctaattcagcaactgatcttttccttgatccacaagagggtaaatggaaaattgaagaacagatgggcaatgtgcaaaatgacaattttgaatcctcacaagagtcatctaagatggacaatgctattgagccaccctactttataccaggaaaaaatccagacatcgcatacaagtccaataaatggaataatacagtagcaaccaggtcaaaacctggtaatgatttgaacgaggcacttacacactttgttagagatgaactatcaagtgcccttaaaattgaagttggtcgcaaaatagggataacagatactaagcaacttgaaaggagtcttgcaaatgatgtagaacagattgctgctgaagtttctaaaactgttgtccttgactgtgagttgtattcagccatacatgtgcaaagaagtccaacaactatcaagtttggttcaacacatggaaaaaatgttgttgaagctgtgtcgactgcagttcagcaatctcagcatctgaggaatattcttcctgtcggtgtcatagttggtgtaactttggcatgtttgagaaattacttccatgttggtgtctctaagcatggtgaccatatgatagccactatgaagtcagatatttttggtgaggaagttattgttcaggacagcagcaaagagaatgttcaggatagtggaaaagcaaatacaaacgataataatattgaaaaaaccagtggggagaaccagcaggatatgacgaagtcacagggtcaagatatgatggtcggggctgtgacggctgccctaggtgcttctgctttggtagcacatcaacaaaataaggatgaaaattgcaaggattttgttgagatagaaggtgccaaacatgaggaaactgcacaggaaaagagccagaacagtttgatgagcagttttgctgagaaagccatgtctgtggcaggacctgtagttcccacaaagggtgatggtgaggttgatcatgaaaggcttgttgcagttctagctgaactcggacaaaagggtgggtttttgaggttcattggaaaaattgctctactctggggcggaattcgtggtgctatgagcttaactgataggcttatctcattcttacgtatcagtgagcggcccttatttcagaggattatgggattttctttaatggttctcatcctatggtcccctgttgtgattcctctactgccaacgcttgttcaaagttggacaataagtgcttcaacggggattatcggatatgcttgcattgttggattgtacatttctataatgatacttgtcatgctgtggggcaaaaggatacgtggctatgaggatccagttgagcaatatgggatgaatatttggtcggcgtctaggctgcgagagttttttcaaggtttggttggaggcgtaacggtcgtagggttggtgcactcgataagcattctactcggttttgcagcgtttcggacagggttctcttcatctttagctagaccccttgatcttctcaagtcttctagtaatgtgtttctgctagctcttcgagggcttgccacagcaactagcattgctgttgtggaagaaatggttttcagatcatggcttccagaggaaattgcagttgatcttggttactacaatgccattctgatatctggacttgtgttttctctaattcatcggtcactaccctcagtaccaggtttcttgctactttctctggtactttttgggcttaggcagaggacacaaggaaagcttgctgcacccattggcctacgttctggaatcatgactgccagttatttaatacaaagcagtggtgttttaacatccaaacctgaaacaccgttttggatgattagcacttaccatctgcatccttttgatggtgttatcggcttaagtatctgctccttgcttgctatctttttcttccctcaaaagcctgttcagaaggatacatctgtgtgatgaggctcagaagagtaaaacataatgctggagtgagcttccaacaaggactaatcaccatgcgtatgctgcgagcaatgaagggtttttcctaccatacatgttaaaatgcaatgccctgcaacttgctggcagcaaagagtatgtgctcggttagcttcttgctcatctgactgagggtactgctgattggaatggcttttggatctataactagagtatccaggtcatttgtacttaggcaagtgtgtatactactctatactggattatcgaaatgggggatggtttcttccctacgttgtaaggtggcggaggaacagatgatatgcctaggaagaggaactagtagatgataagagtttgcccctgatattaggcttcctctgaaatgcaggaattctagaggaatatacaggaatttcacaggaatcagtccattctcacagaaaaaatgcaggaaactgaaaaaaaatccccgcattccaaagggggcatcatctaggatttcttcataccgaattatcgattgacttcgaccacataccgtgcttttgttcatgtctttgaacacaggcacacccaaatttcgaggtagcaaattttgcccacatacactgtatataaagtagttacagtgcaagaacaatgctaactgatcaggtgatgtctcgtcctccccccggttctattattgttactgtatagctgtaattagtccaagtgtacagctgaatctactaaggtttacaaggaaaatcgccaggcagtaaaccttcaatgcttttggctaggttttcattctgaaagtcatgtcttccgcgtcagcataatcctgtattcctgtataacctctgttcggacttcgtagtgctcatctgagttctgattcggccgggcaactgtaaattctgtagtgttcgagaaaaaactgtaaattctgtaatattgccaagaattatgaatttacatgaactttacaggtataagttgcccgcctcacttcaccggctcaccgtgcttcacctgctatcttccatggcggcggctcacctcttctgctccgcaccggccgcctatcgcgccgcgaacccacggccccttgctacccgtggccgcgccaaccccgccacgggaacgtatctggtgctcaaaggggtatggtgctcatgtgcacatttcccccgggccacaccatcgagaagattcttcccctgccgcgcgtcgctcagccccgatggatcgctggccatgctcggggctcccagtcccaggatggcgccaccgatgaggaagccgtacatgcgggagcactcttgcctcatcttcccgcccccgcgcggtcgacgcccgctggcggtcatcaagttcctcggcggcgccttcatcggcgccgtccccgaggtcacctacggctacctgctggagctcctggcgctggagggctttgtggtcgtgtgcgtaccatacaacgtcaccttcgaccacgaggccgccgcgcgggaggtattccagagtttccatgcctgctacgacgcgctgctcgcgtcggggctcccggaggccggcctcagcgccctggacatcgcggagctcccgctctactctgttggccacagcaacggggcactgcttcagctgctagtgggaagctacttctcagaaaggataccagaggctaatgccattgtctcattcaacaataggccggcatcggaggctgtgccttactttgaacagatagggcccctttttaggcaactgatgcctatgatggaggcctcgcctgtttactcgatggccagaaatgcatcaggatatgcatggaaagctctatttgatttagctggaggtcttttacgtgagtatgatcaagaagctacggtatctctgagcaaatttattgatcagttaccatcagtaatgaaccaggtttcagaaggtgtgtctgaatttaaaccaacaccacctgaaaaccgtgaattctgcaagaattcctacagtgtacccaatacattattggtcaaattcactgtagatgctattgatgatacagacatagttgaagatgtcctgagaccccgcgttgattcaatcggtggacaaataaagaaggtcatactgtcaggaacacatctaactccatgtatacaggatgtcaaatggcaagttggttcagaatacactccagcagatgccattgcacaaggattgaaatcattggctcttagtgaaacaagagtcctctcaagaacaattgctgattggtttacatccctttaaattttgagttattcaatacatctgttgaagtttggagttcttcttacaaaggaatgccttcatcaggtctcaacttcccattttgttgaagcagtccactattgtaatgagatgtaaggatacaatgtattatgtatggcacataagagcagtgcatttttgggctgtgctgagctggtcatgctcacccgcaggccctagccgtactacaaatatctgatcaagattggtggtttggggccttacttggatcgtagttgcaagctataaaaagcatcgaacccaaaagtccaagcagctcgatcctgtttgaggtacggtgccagcaaggttaagttggccaaatctgttgcacgcagacagcccaatgggggtttctgcaggctggcgaaagtaaaggcgtgcgataggaaatctgggaatgttttatattgccacattgtaattccacgttataggcgtatagctcaaatacatttggacggtttggaggtatttcgttggtgtgctggcagttgtttctgtatcgtgcatgtctgttgcaagaaggcctggatgctgctgacctgagaactgattgatttcgctgacgcttacagttcttgcaagggcgtgcaagtagaacaacccgtatgcttcaggaattagtattacacgaggttaacaaatgtaataggcttgggactttcttt

SEQ ID NO: 217871 - DNA, 8308 bp, Zea Mays
atgccacacagccacagcaacgaactgcgggagctttacgctcgaaaagccgcgagccttcgttcgtccccgtcaacgtcgcgtttcctctttttcccggttccccgatcccctccgcgttttcctccaccacaccaccacttccctcgccgccactcgcgttcccgcccccaaggattacaccgtggcatctcgctacagccgccgctgatgcatctctccttccatccccctgctccgtcgcatctccctcgccggggcggcgtcgcaccaaccacaaccccatccttcgtcctccggaggaaccagcggaggcggcgccaccaccaccgcccgtaccgcctagccccccgcgcctctctctcagacctcatcgccaacctcccctcctccctcgcgctcgtaggtcccgcggcgctcgcggctgcggccgcggtcgccacctctttctcctcctggtcctcctcgtcccagaccagcctcccgccgccgccccaggaatccgaggactacaacgcgtgcggggatgtcgcgggcgagtgggttctcttcaccagcccggcgccattcaaccgctgcgtgctgctgcgttgcccgtccgtgtctttcgaggacgggctcgacggcgtcaacgagcgcctcctcaccgaggagcggcactacgtgaatctgagcaggggctgcatccccgtggtgcgcggcggggacggtgcctatgatatctcttaccagaggatttgcatcgccctggaggacggtggggtgatcgcgctcgattggcctgataatttgtacttggacaaagagcatggactggattccacggtgcttatggtgcctggtacgcacgaggggagcatggagaggaacattaaggtgttcgtgttagatgcactgaacaacgggtactttcctattgtaatgaaccccagagggtgcggcggctccccggtcactaccccaagcagctgacagtgatgatatctgcacagtggtacagtttataaacagcaagagaccttggacaacactaatgggtgttggatggggctatggggcaaatatgcttacaaagtacctcgtggaagttggagagtcgactcctcttactgctgctgtttgtattgacaacccttttgatatagaagaagcaacgagatcatttcctcatcatataactcttgatgaaaagctcacagctggcctggttgatattttgcgttctaataaggaactctttcaaggtaaagctaaaggtttcaatgttcaaaaggctttatcagccagttgtttgcgtgacttcgatgttgctatatccatggtttcacatgggttcgatactcttcatgacttctatgctgaaattagtacaaggctgtcagttgcccatgttagaatacctctactttttatacagagtgatgatgggactgtgccgcttcttgcagtgccccgcagttcaatatcagaaaatcctttcacaagccttctcttttgttcttgtgtacactccactatgtccatgtttcagagatacagtgtgttatggtgccagaaccttgccttagagtggttatcagcagttgagtttgctcttctgaagggtcgccatccacttatcaaagatgtggacatcacaattaacccgtccaaaggtctagcatttgttgaacctcaagtgaatcaaaggaaatctccaaaaggaaatagttttcgtcaacattctgagcttattttgtataataatgttgcacatggaataaatggactgctagttgattctgcaaataagtactctggtgctcaaaacaaagaaaatgggcagttgaataataatggtgacataggaactgtagacaaagatctggaagaagagttagaagagagttctgaagatgttgagaaaggtcaggcactacaatcagcaagtcttgtgatgaatatgctagatgctacaatgcctggcactctcaatgatgatcagaagaagaaggttctggtagctgtggagcaaggggagactcttgtgaaggctctagaagaagctgtacctgaagacgtgcgcggaaaacttacagcttctgtaactgaaattttacattccaaacgagaaactttcagtttaggtgcattgaatcgacttggctggaacaatgtaagaccaaccactaccaagacattggcccaggaaaagctcaaagattcagatcatgaaagcgggcttaaggataccaaaatggttgatcagaacaggatttctgcaaccgcttttgagggggatctgaaagacattaatatgacaaatgatgataaacctggagaaagcatcgaatcgtcacagggaaagccttctcaaacttctgaacctgttggaacagcgacagaaattggaactgaacagccttataaatcagataaagctaattatggaaccaatgatagcagtgaagggcagcatataacagaacaggacaatgaaatgactccaaagcaagtttctgatgatcagtcagtggccaactgtaatgggccttctaaagaaagggagcaatcagcagatgctacaacagaccagaatctacaatctaacacaacaacagaaaaggaaggtgacacaagtcgcacaggtgaagataagactgctcataatgtgaatgatcaaagcacacaagtctctaaaacagaagaatcaaaaccttcccccattactgtgacccaggcattagatgcattaactgggtttgatgactcgactcaaatggctgtcaacagtgtttttggagttcttgaaaatatgattgatcagtttgagaaacaacaggactctgagaatggtgaaagtgctgatggaaatgatggtatcacttccgtggatgagacagaatctcatgtgaaagagaatacagagaatgtgtcaagtggagaagatataaaccactcatctaaacaaccagaaggtagcagtcctggaaaaactgattcaatcatgtccaaatatgattgtgcttttggtgaggaaaatcccaatttaagcattgtttcatatggtagaggaaaaatgagatattaccgaggaaacaaagttggtgatcatgtgggtgctgatggtatcgagcgagtcagtggcttgcctgactatttattagatatagctgtcaactcttacttgaaggcgcaatatgcaatgtatcttcgtgaatttctttacacagaattgcaactcaaatcaccagagtctaattcagcaactgatcttttccttgatccacaagagggtaaatggaaaattgaagaacagatgggcaatgtgcaaaatgacaattttgaatcctcacaagagtcatctaagatggacaatgctattgagccaccctactttataccaggaaaaaatccagacatcgcatacaagtccaataaatggaataatacagtagcaaccaggtcaaaacctggtaatgatttgaacgaggcacttacacactttgttagagatgaactatcaagtgcccttaaaattgaagttggtcgcaaaatagggataacagatactaagcaacttgaaaggagtcttgcaaatgatgtagaacagattgctgctgaagtttctaaaactgttgtccttgactgtgagttgtattcagccatacatgtgcaaagaagtccaacaactatcaagtttggttcaacacatggaaaaaatgttgttgaagctgtgtcgactgcagttcagcaatctcagcatctgaggaatattcttcctgtcggtgtcatagttggtgtaactttggcatgtttgagaaattacttccatgttggtgtctctaagcatggtgaccatatgatagccactatgaagtcagatatttttggtgaggaagttattgttcaggacagcagcaaagagaatgttcaggatagtggaaaagcaaatacaaacgataataatattgaaaaaaccagtggggagaaccagcaggatatgacgaagtcacagggtcaagatatgatggtcggggctgtgacggctgccctaggtgcttctgctttggtagcacatcaacaaaataaggatgaaaattgcaaggattttgttgagatagaaggtgccaaacatgaggaaactgcacaggaaaagagccagaacagtttgatgagcagttttgctgagaaagccatgtctgtggcaggacctgtagttcccacaaagggtgatggtgaggttgatcatgaaaggtctgttaatattgctattgttgtgttcctttgtctttacttctttttctttttttttccttttttgtgtgaaaatgtttatcatgttctgactttctgcaagcaggcttgttgcagttctagctgaactcggacaaaagggtgggtttttgaggttcattggaaaaattgctctactctggggcggaattcgtggtgctatgagcttaactgataggcttatctcattcttacgtatcagtgagcggcccttatttcagaggattatgggattttctttaatggttctcatcctatggtcccctgttgtgattcctctactgccaacgcttgttcaaagttggacaataagtgcttcaacggggattatcggatatgcttgcattgttggattgtacatttctataatgatacttgtcatgctgtggggcaaaaggatacgtggctatgaggatccagttgagcaatatgggatgaatatttggtcggcgtctaggctgcgagagttttttcaaggtttggttggaggcgtaacggtcgtagggttggtgcactcgataagcattctactcggttttgcagcgtttcggacagggttctcttcatctttagctagaccccttgatcttctcaagtcttctagtaatgtgtttctgctagctcttcgagggcttgccacagcaactagcattgctgttgtggaagaaatggttttcagatcatggcttccagaggaaattgcagttgatcttggttactacaatgccattctgatatctggacttgtgttttctctaattcatcggtcactaccctcagtaccaggtttcttgctactttctctggtactttttgggcttaggcagaggacacaaggaaagcttgctgcacccattggcctacgttctggaatcatgactgccagttatttaatacaaagcagtggtgttttaacatccaaacctgaaacaccgttttggatgattagcacttaccatctgcatccttttgatggtgttatcggcttaagtatctgctccttgcttgctatctttttcttccctcaaaagcctgttcagaaggatacatctgtgtgatgaggctcagaagagtaaaacataatgctggagtgagcttccaacaaggactaatcaccatgcgtatgctgcgagcaatgaagggtttttcctaccatacatgttaaaatgcaatgccctgcaacttgctggcagcaaagagtatgtgctcggttagcttcttgctcatctgactgagggtactgctgattggaatggcttttggatctataactagagtatccaggtcatttgtacttaggcaagtgtgtatactactctatactggattatcgaaatgggggatggtttcttccctacgttgtaaggtggcggaggaacagatgatatgcctaggaagaggaactagtagatgataagagtttgcccctgatattaggcttcctctgaaatgcaggaattctagaggaatatacaggaatttcacaggaatcagtccattctcacagaaaaaatgcaggaaactgaaaaaaaatccccgcattccaaagggggcatcatctaggatttcttcataccgaattatcgattgacttcgaccacataccgtgcttttgttcatgtctttgaacacaggcacacccaaatttcgaggtagcaaattttgcccacatacactgtatataaagtagttacagtgcaagaacaatgctaactgatcaggtgatgtctcgtcctccccccggttctattattgttactgtatagctgtaattagtccaagtgtacagctgaatctactaaggtttacaaggaaaatcgccaggcagtaaaccttcaatgcttttggctaggttttcattctgaaagtcatgtcttccgcgtcagcataatcctgtattcctgtataacctctgttcggacttcgtagtgctcatctgagttctgattcggccgggcaactgtaaattctgtagtgttcgagaaaaaactgtaaattctgtaatattgccaagaattatgaatttacatgaactttacaggtataagttgcccgcctcacttcaccggctcaccgtgcttcacctgctatcttccatggcggcggctcacctcttctgctccgcaccggccgcctatcgcgccgcgaacccacggccccttgctacccgtggccgcgccaaccccgccacgggaacgtatctggtgctcaaaggggtatggtgctcatgtgcacatttcccccgggccacaccatcgagaagattcttcccctgccgcgcgtcgctcagccccgatggatcgctggccatgctcggggctcccagtcccaggatggcgccaccgatgaggaagccgtacatgcgggagcactcttgcctcatcttcccgcccccgcgcggtcgacgcccgctggcggtcatcaagttcctcggcggcgccttcatcggcgccgtccccgaggtcacctacggctacctgctggagctcctggcgctggagggctttgtggtcgtgtgcgtaccatacaacgtcaccttcgaccacgaggccgccgcgcgggaggtattccagagtttccatgcctgctacgacgcgctgctcgcgtcggggctcccggaggccggcctcagcgccctggacatcgcggagctcccgctctactctgttggccacagcaacggggcactgcttcagctgctagtgggaagctacttctcagaaaggataccagaggctaatgccattgtctcattcaacaataggccggcatcggaggctgtgccttactttgaacagatagggcccctttttaggcaactgatgcctatgatggaggcctcgcctgtttactcgatggccagaaatgcatcaggatatgcatggaaagctctatttgatttagctggaggtcttttacgtgagtatgatcaagaagctacggtatctctgagcaaatttattgatcagttaccatcagtaatgaaccaggtttcagaaggtgtgtctgaatttaaaccaacaccacctgaaaaccgtgaattctgcaagaattcctacagtgtacccaatacattattggtcaaattcactgtagatgctattgatgatacagacatagttgaagatgtcctgagaccccgcgttgattcaatcggtggacaaataaagaaggtcatactgtcaggaacacatctaactccatgtatacaggatgtcaaatggcaagttggttcagaatacactccagcagatgccattgcacaaggattgaaatcattggctcttagtgaaacaagagtcctctcaagaacaattgctgattggtttacatccctttaaattttgagttattcaatacatctgttgaagtttggagttcttcttacaaaggaatgccttcatcaggtctcaacttcccattttgttgaagcagtccactattgtaatgagatgtaaggatacaatgtattatgtatggcacataagagcagtgcatttttgggctgtgctgagctggtcatgctcacccgcaggccctagccgtactacaaatatctgatcaagattggtggtttggggccttacttggatcgtagttgcaagctataaaaagcatcgaacccaaaagtccaagcagctcgatcctgtttgaggtacggtgccagcaaggttaagttggccaaatctgttgcacgcagacagcccaatgggggtttctgcaggctggcgaaagtaaaggcgtgcgataggaaatctgggaatgttttatattgccacattgtaattccacgttataggcgtatagctcaaatacatttggacggtttggaggtatttcgttggtgtgctggcagttgtttctgtatcgtgcatgtctgttgcaagaaggcctggatgctgctgacctgagaactgattgatttcgctgacgcttacagttcttgcaagggcgtgcaagtagaacaacccgtatgcttcaggaattagtattacacgaggttaacaaatgtaataggcttgggactttcttt

SEQ ID NO: 217872 - DNA, 6335 bp, Zea Mays
ccgcgtgggcccgtcgactagggcgcactcgcaccctccgccggtcctgaactcatcgatcgcagaagcgagagagagagagagaggaggccgtacccacgccgccgcttcgccgccgccgacctccgtctctcgcttccaccatctctctccttttcaccctctctcgcggccaccctcggtcccctccctgagccttacccttgactgagtggtttccaatttcagttccactccctcttccaccactattcacggggaggcgcggcgaatcctgcgagattcctcccggcccacgcgtgcgcacgttggcgatacagggctagagtttcgtctccggcgctttgcggagttaattaggagaaggaactggagaatgtgtaggtggtgggcgctgaaaccctagctgttcgggacgggcgtgcgtgcggggatggcaggggagctggggcagcagacggtggagctgggcgcggtggtgcggcgtgcggcggaggagtcttatctcgctctgcgggagctcgtggagaagtcgcaggcggaggccgaggggaagggcatcggcgccggagccaatggcagctggcagcggtccgacaccgagaagaagattgacttgctcaagttcatcacacgcacacgccagcgcatgcttcgtctccacgtccttgccaagtggtgtcagcaggttcctttggtccattattgtcaacagctcggatcaactctccacagccatgaaacatgcttcacccaaacagctgactcgctgttttatatgcacgagtgcttgcagcaggctcgggctcctatgttcgatgttccttctgctattgaagtcatgcttacagggggttatcagaggcttccaagatgcatagaagagataggaagtcaacataaactttccccagatgaagaaaagcgcgctctgcgaaaattagatgctagcgtgcggtacagagtacttgtgacaccaagacctaaagaagtatctaatgtttcagtaactgatgggatagctgttttccgtgtggatggagaatttaaaattcttcttacattaggttaccgtggtaatgtagacttatggaggatattgcatatggagttactggttggtgagaagaagggtcctattaaactggatgaaagtaggagatttgctcttggtgatgatatagaaagaagaatggcagcttctgagaatccctttgcagtgctatatgctatacttcatgaattctgcatctctcttgctatggacactattattaagcaagctaatgttcttcgacagggaaggtggaaagatgccataagatctgaactcatctctgacagtgccactgtacaaacgggaaatactcctctaatgcagcttgttcaagatgcggagttcgattcaagtggttttaagatacctggcctgaaagttaattactggctagatgagaaaagcactagcacagcagaacctgattcatctccatttattaaaattgaggcagggctggacatgcagataaagtgtcagcatagttcatttatacttgatccatttacagataaagaggcgagcctttctcttgatctaagttgcattgatgttgagcaacttattttgagagcagtttcttgcaataggcacacacgccttcttaatattcagagacaactgtgcaaaaatgtccaaatttttcagtccccaaaagatgttgtcttgacacgagatgttgcagcagcgaaggacccaatgatgaatgcggagaagggtttctcagattgttttgggaatgaagtgcttcaagtaagggcatgtggtcaggcatatgttagtcttggaataaatatcaggtttaccagcagtctcagggcactctgaagattcccaagaccttattacatggctcagatttgatggtcatggggtttccacattgtgcaaatgcctattatctgttgatgcaacttgataaggacttcaggcctgtttttcatttgcttgagacacagtgtgatgcaaatggtaatactaatgcaagtggagatgtgaaagaagctattagatataacaaaatcaatataggacagatgcaaatacttaaaaatgagatgaatgagaacccttttgatgtgaagctgcaggccctacaaagtttagtggactctgctgacatgatggagagtgatcttcctgtccaaaatgcaattgaacctcttccactacttcctgcttgttcaccatcattttcatctattgttgatgaggttttcgaatatgaacgtggttctactgctgcgcagaatcgttgtcttccagttgatattcaaggaataaatgctagggttgtctcaccaatgcatgatggatgcttatcttatacccaagctaataataacatgaatgttcatcctaatgtcagtttgaatagctatttcccaagtaactttagacatttacaaggtgcaaataaatcacttcagcttgtgccttcaagcaacgataacagcaatcaaatccctgctcaaagctcacattcagggaatcttgggaatgctacgcctggccatttgattggatcttcaactacaaccggaggattagggaagctcatcactgctggttctgatggtgcatctaggaaacactatctttcagatttcttatcaagtatcccttcattacgaggactgcaacctagtgagccaagaaagcggagaaaaaaaacagaatcagtgcagagtctcctgcctttgcaggcacactcttctaatttgcaatcaagaggcagtctcacctatggagatgttcttgctgaaagaaataattgtgttccggcaactatatatgcttctgtgctactacatgtcataagacactgttcattatgcatcaaacatgcccaactcactgctcagatggattcccttgcgattccatatgttgaagaagttggtctgcggagaccatcgtctaatctttggttgagattaccttttgcacaggatgattcttggaaccatatatgcttgcgccttggtaaggctggaagcatgtcttgggatgttaggataaatgatccacatttcagggaactttgggaacttaatggaggaagcaccaaaacacaatggggtgttggcattcgcattgcgaatagctcagaaatggattcacatatctcatttgattccagtggtgttgttttaacttacaacactgttgaggcagatagtgtccagaagcttgtgtcagatttacgccgactttcaaatgctcgttcttttgctcttggaatgaggagactgattggtgtgaaatttcaagacaagctagatgacaaccagttaaccatggaggtgaaatcacaatctgttaataaaggtaacagtgatgctgctgacaagctatctgagcaaatgagaaagacattcaggattgaagctgtcggtctaatgagcttatggtttagctacggcaccatgcctatggtacacatagttgttgaatgggagattgctaaggctggttgcacaatgcacgtttctccagatcagctttggccacacacaaagtttctggaggatttcgtgaatggtggagaggtagcatccttcttggattgcattcggcttacagcaggaccattacttgcccttggaggtgcaattcgtcctgcaaggatgcctgttgctgtctcatctggatatagctctatgccaaaacagccgaacatccccacacaagggcctttagtaaatggttcatcttcaactatacatcacgcacctggcccctcaaatgctgcatctgcccatttaggcagtcataaccttcatgctgctgccatgctttcagctgttggacgcggtggacctgggcttgttcccagttcattactgccttttgatgtttcggttgtacttcgtgggccatactggatacgcattatatatcgcaagaaattttctgttgacatgcgctgctttgctggggatcaggtttggctccagccagctactcctcctaaaggtggaccttcagttggtggatcgttgccatgcccacagttccggcctttcataatggaacatgttgctcagggtctaaatgctcttgaacccaacttcatgaatgctacacaggctagtggacacttaaataacaatgcaggagttccacaaactgctcctagtgcaaatcgtttaaatgctacccctggtgtttctatggtcaggccaacatctggtgttgctaaccatgtagcagccagtttgagtcgagcaggaaatgccatgttggcttcttcggctcttgcttctggtattagtggaacttctgtgcgacttactgctggagctggtctccctgttcacatgaaaggtgaactaaacacagctttcataggactgggggatgacggtggatatggtggtggctgggttcctttggcagctcttaaaaaggtgctgagagggatcctaaagtacctaggagttctatggttgtttgcacaattgcctgaacttttgaaagaaatactaggatcaatcttaaaggacaatgaaggtgctctcttgaatttggatcaagagcagcctgcactccggttctatgtcggaggatatgtatttgcagtaagtgtacatcgggttcaactgcttctacaagttttgagtgtgaaaagatttcaccaccagcaacagcagcagcaggctcaaagcaatgctcaggaagagctagcagcagttgaaatcaatgaaatatgtgactactttagcagacgtgttgcctccgaaccatatgatgcttctagagttgcttcttttatcactttgcttacattaccaattttggttctgcgcgagtttttaaagctgattacatggaagaaaggtctttccccggttcatggggacattgctactgcacagagggctcgcatcgagctttgtttggagaatcactcaggatcagcttcgtctgataacaccgagaacagcagtttagccaagagtaatattcatcatgatagagcccacagttcagtagaatttgccctgacatttgtacttgaccatgctcttattcctcacatgaatgtagctggaggagctgcctggcttccatattgtgtatctgtgaaacttcgctattcttttggggacaacaatcatatagctttccttgctatgaatgggagccatggtgggagagcctgctggttgcagtttgaggagtgggaaagatgtaagcagaaggtttcaagagctgtggaaactgtgaatgggtctggtgtagctggagaggtaggccaaggaaggctgcgaatggttgcagagatgatccaaaagcagcttcaactctgtctacaacagctaagagatgacccactttctgcaggctcgactgcatcatgaacttgcttggaatgagctctatcaaggccattgatgtctgtcatattcagcatggcctttggctttgttaacgtgtagatgtgaaggaatacacatttggtagcagtgacagtttcgcctgaggcttgctcagatgacaattttgtacagtataaatggtggcggttgactctgatggacctttagttagcccatttgaacgtggcctgtaacatagctagggtgggtaataatgtgccaaggtggaattgctcagggatgcaaaatgatcttcgggaattggttgtctgtatcatctactgtaatcgtgtcctttttctccctttctgatggatagttcatttttggattcgttatcatctttcttctgtctgtactatgttaatctagacattggtggatctggtatatgtgttgttgtacatgatatattggcactggacttgagactgacgcatttgacgtcttagtattagcaggacatctctagttgtgttcagagtgattggacacaaaaaatattgcttggagcttttctttagggctagtttgggaacttaaatctcgaccccatagattcctggagaagatttgagttcccaaactagttcttaatgtttcttttttttttctattgcatcttcttagtaaatgatgtttttgtaactgtaaaaaccgtgccggtcaagattgatacctggatggataagatgatgttgggtcagatttcttgctcatggttaggaaattgatgtgagcactctggccagtttgtttgaaactgatattcgtgagttgtgattggaagcgtatggataggctttttaatcgtgttaaccgtcatacgggtaggcctttttagttctcgtgcttctacgtttgggacacaggtgtcagtttttgtgctttaa

SEQ ID NO: 217873 - DNA, 6399 bp, Zea Mays
ctccggttccgcgtgggcccgtcgactagggcgcactcgcaccctccgccggtcctgaactcatcgatcgcagaagcgagagagagagagagaggaggccgtacccacgccgccgcttcgccgccgccgacctccgtctctcgcttccaccatctctctccttttcaccctctctcgcggccaccctcggtcccctccctgagccttacccttgactgagtggtttccaatttcagttccactccctcttccaccactattcacggggaggcgcggcgaatcctgcgagattcctcccggcccacgcgtgcgcacgttggcgatacagggctagagtttcgtctccggcgctttgcggagttaattaggagaaggaactggagaatgtgtaggtggtgggcgctgaaaccctagctgttcgggacgggcgtgcgtgcggggatggcaggggagctggggcagcagacggtggagctgggcgcggtggtgcggcgtgcggcggaggagtcttatctcgctctgcgggagctcgtggagaagtcgcaggcggaggccgaggggaagggcatcggcgccggagccaatggcagctggcagcggtccgacaccgagaagaagattgacttgctcaagttcatcacacgcacacgccagcgcatgcttcgtctccacgtccttgccaagtggtgtcagcaggttcctttggtccattattgtcaacagctcggatcaactctccacagccatgaaacatgcttcacccaaacagctgactcgctgttttatatgcacgagtgcttgcagcaggctcgggctcctatgttcgatgttccttctgctattgaagtcatgcttacagggggttatcagaggcttccaagatgcatagaagagataggaagtcaacataaactttccccagatgaagaaaagcgcgctctgcgaaaattagatgctagcgtgcggtacagagtacttgtgacaccaagacctaaagaagtatctaatgtttcagtaactgatgggatagctgttttccgtgtggatggagaatttaaaattcttcttacattaggttaccgtggtaatgtagacttatggaggatattgcatatggagttactggttggtgagaagaagggtcctattaaactggatgaaagtaggagatttgctcttggtgatgatatagaaagaagaatggcagcttctgagaatccctttgcagtgctatatgctatacttcatgaattctgcatctctcttgctatggacactattattaagcaagctaatgttcttcgacagggaaggtggaaagatgccataagatctgaactcatctctgacagtgccactgtacaaacgggaaatactcctctaatgcagcttgttcaagatgcggagttcgattcaagtggttttaagatacctggcctgaaagttaattactggctagatgagaaaagcactagcacagcagaacctgattcatctccatttattaaaattgaggcagggctggacatgcagataaagtgtcagcatagttcatttatacttgatccatttacagataaagaggcgagcctttctcttgatctaagttgcattgatgttgagcaacttattttgagagcagtttcttgcaataggcacacacgccttcttaatattcagagacaactgtgcaaaaatgtccaaatttttcagtccccaaaagatgttgtcttgacacgagatgttgcagcagcgaaggacccaatgatgaatgcggagaagggtttctcagattgttttgggaatgaagtgcttcaagtaagggcatgtggtcaggcatatgttagtcttggaataaatatcaggagtggccgctttctcctccaatcaccagaaaatatattaccccgtgctgcacttatggactgtgaggaagctctaaacaaagggagtacatcagctaccgaggttttttcaagccttaggaccaggagcattctccacctacttgctgcaactggaagtttttttggccttaaggtttaccagcagtctcagggcactctgaagattcccaagaccttattacatggctcagatttgatggtcatggggtttccacattgtgcaaatgcctattatctgttgatgcaacttgataaggacttcaggcctgtttttcatttgcttgagacacagtgtgatgcaaatggccctacaaagtttagtggactctgctgacatgatggagagtgatcttcctgtccaaaatgcaattgaacctcttccactacttcctgcttgttcaccatcattttcatctattgttgatgaggttttcgaatatgaacgtggttctactgctgcgcagaatcgttgtcttccagttgatattcaaggaataaatgctagggttgtctcaccaatgcatgatggatgcttatcttatacccaagctaataataacatgaatgttcatcctaatgtcagtttgaatagctatttcccaagtaactttagacatttacaaggtgcaaataaatcacttcagcttgtgccttcaagcaacgataacagcaatcaaatccctgctcaaagctcacattcagggaatcttgggaatgctacgcctggccatttgattggatcttcaactacaaccggaggattagggaagctcatcactgctggttctgatggtgcatctaggaaacactatctttcagatttcttatcaagtatcccttcattacgaggactgcaacctagtgagccaagaaagcggagaaaaaaaacagaatcagtgcagagtctcctgcctttgcaggcacactcttctaatttgcaatcaagaggcagtctcacctatggagatgttcttgctgaaagaaataattgtgttccggcaactatatatgcttctgtgctactacatgtcataagacactgttcattatgcatcaaacatgcccaactcactgctcagatggattcccttgcgattccatatgttgaagaagttggtctgcggagaccatcgtctaatctttggttgagattaccttttgcacaggatgattcttggaaccatatatgcttgcgccttggtaaggctggaagcatgtcttgggatgttaggataaatgatccacatttcagggaactttgggaacttaatggaggaagcaccaaaacacaatggggtgttggcattcgcattgcgaatagctcagaaatggattcacatatctcatttgattccagtggtgttgttttaacttacaacactgttgaggcagatagtgtccagaagcttgtgtcagatttacgccgactttcaaatgctcgttcttttgctcttggaatgaggagactgattggtgtgaaatttcaagacaagctagatgacaaccagttaaccatggaggtgaaatcacaatctgttaataaaggtaacagtgatgctgctgacaagctatctgagcaaatgagaaagacattcaggattgaagctgtcggtctaatgagcttatggtttagctacggcaccatgcctatggtacacatagttgttgaatgggagattgctaaggctggttgcacaatgcacgtttctccagatcagctttggccacacacaaagtttctggaggatttcgtgaatggtggagaggtagcatccttcttggattgcattcggcttacagcaggaccattacttgcccttggaggtgcaattcgtcctgcaaggatgcctgttgctgtctcatctggatatagctctatgccaaaacagccgaacatccccacacaagggcctttagtaaatggttcatcttcaactatacatcacgcacctggcccctcaaatgctgcatctgcccatttaggcagtcataaccttcatgctgctgccatgctttcagctgttggacgcggtggacctgggcttgttcccagttcattactgccttttgatgtttcggttgtacttcgtgggccatactggatacgcattatatatcgcaagaaattttctgttgacatgcgctgctttgctggggatcaggtttggctccagccagctactcctcctaaaggtggaccttcagttggtggatcgttgccatgcccacagttccggcctttcataatggaacatgttgctcagggtctaaatgctcttgaacccaacttcatgaatgctacacaggctagtggacacttaaataacaatgcaggagttccacaaactgctcctagtgcaaatcgtttaaatgctacccctggtgtttctatggtcaggccaacatctggtgttgctaaccatgtagcagccagtttgagtcgagcaggaaatgccatgttggcttcttcggctcttgcttctggtattagtggaacttctgtgcgacttactgctggagctggtctccctgttcacatgaaaggtgaactaaacacagctttcataggactgggggatgacggtggatatggtggtggctgggttcctttggcagctcttaaaaaggtgctgagagggatcctaaagtacctaggagttctatggttgtttgcacaattgcctgaacttttgaaagaaatactaggatcaatcttaaaggacaatgaaggtgctctcttgaatttggatcaagagcagcctgcactccggttctatgtcggaggatatgtatttgcagtaagtgtacatcgggttcaactgcttctacaagttttgagtgtgaaaagatttcaccaccagcaacagcagcagcaggctcaaagcaatgctcaggaagagctagcagcagttgaaatcaatgaaatatgtgactactttagcagacgtgttgcctccgaaccatatgatgcttctagagttgcttcttttatcactttgcttacattaccaattttggttctgcgcgagtttttaaagctgattacatggaagaaaggtctttccccggttcatggggacattgctactgcacagagggctcgcatcgagctttgtttggagaatcactcaggatcagcttcgtctgataacaccgagaacagcagtttagccaagagtaatattcatcatgatagagcccacagttcagtagaatttgccctgacatttgtacttgaccatgctcttattcctcacatgaatgtagctggaggagctgcctggcttccatattgtgtatctgtgaaacttcgctattcttttggggacaacaatcatatagctttccttgctatgaatgggagccatggtgggagagcctgctggttgcagtttgaggagtgggaaagatgtaagcagaaggtttcaagagctgtggaaactgtgaatgggtctggtgtagctggagaggtaggccaaggaaggctgcgaatggttgcagagatgatccaaaagcagcttcaactctgtctacaacagctaagagatgacccactttctgcaggctcgactgcatcatgaacttgcttggaatgagctctatcaaggccattgatgtctgtcatattcagcatggcctttggctttgttaacgtgtagatgtgaaggaatacacatttggtagcagtgacagtttcgcctgaggcttgctcagatgacaattttgtacagtataaatggtggcggttgactctgatggacctttagttagcccatttgaacgtggcctgtaacatagctagggtgggtaataatgtgccaaggtggaattgctcagggatgcaaaatgatcttcgggaattggttgtctgtatcatctactgtaatcgtgtcctttttctccctttctgatggatagttcatttttggattcgttatcatctttcttctgtctgtactatgttaatctagacattggtggatctggtatatgtgttgttgtacatgatatattggcactggacttgagactgacgcatttgacgtcttagtattagcaggacatctctagttgtgttcagagtgattggacacaaaaaatattgcttggagcttttctttagggctagtttgggaacttaaatctcgaccccatagattcctggagaagatttgagttcccaaactagttcttaatgtttcttttttttttctattgcatcttcttagtaaatgatgtttttgtaactgtaaaaaccgtgccggtcaagattgatacctggatggataagatgatgttgggtcagatttcttgctcatggttaggaaattgatgtgagcactctggccagtttgtttgaaactgatattcgtgagttgtgattggaagcgtatggataggctttttaatcgtgttaaccgtcatacgggtaggcctttttagttctcgtgcttctacgtttgggacacaggtgtcagtttttgtgctttaa

SEQ ID NO: 217874 - DNA, 6416 bp, Zea Mays
ctccggttccgcgtgggcccgtcgactagggcgcactcgcaccctccgccggtcctgaactcatcgatcgcagaagcgagagagagagagagaggaggccgtacccacgccgccgcttcgccgccgccgacctccgtctctcgcttccaccatctctctccttttcaccctctctcgcggccaccctcggtcccctccctgagccttacccttgactgagtggtttccaatttcagttccactccctcttccaccactattcacggggaggcgcggcgaatcctgcgagattcctcccggcccacgcgtgcgcacgttggcgatacagggctagagtttcgtctccggcgctttgcggagttaattaggagaaggaactggagaatgtgtaggtggtgggcgctgaaaccctagctgttcgggacgggcgtgcgtgcggggatggcaggggagctggggcagcagacggtggagctgggcgcggtggtgcggcgtgcggcggaggagtcttatctcgctctgcgggagctcgtggagaagtcgcaggcggaggccgaggggaagggcatcggcgccggagccaatggcagctggcagcggtccgacaccgagaagaagattgacttgctcaagttcatcacacgcacacgccagcgcatgcttcgtctccacgtccttgccaagtggtgtcagcaggttcctttggtccattattgtcaacagctcggatcaactctccacagccatgaaacatgcttcacccaaacagctgactcgctgttttatatgcacgagtgcttgcagcaggctcgggctcctatgttcgatgttccttctgctattgaagtcatgcttacagggggttatcagaggcttccaagatgcatagaagagataggaagtcaacataaactttccccagatgaagaaaagcgcgctctgcgaaaattagatgctagcgtgcggtacagagtacttgtgacaccaagacctaaagaagtatctaatgtttcagtaactgatgggatagctgttttccgtgtggatggagaatttaaaattcttcttacattaggttaccgtggtaatgtagacttatggaggatattgcatatggagttactggttggtgagaagaagggtcctattaaactggatgaaagtaggagatttgctcttggtgatgatatagaaagaagaatggcagcttctgagaatccctttgcagtgctatatgctatacttcatgaattctgcatctctcttgctatggacactattattaagcaagctaatgttcttcgacagggaaggtggaaagatgccataagatctgaactcatctctgacagtgccactgtacaaacgggaaatactcctctaatgcagcttgttcaagatgcggagttcgattcaagtggttttaagatacctggcctgaaagttaattactggctagatgagaaaagcactagcacagcagaacctgattcatctccatttattaaaattgaggcagggctggacatgcagataaagtgtcagcatagttcatttatacttgatccatttacagataaagaggcgagcctttctcttgatctaagttgcattgatgttgagcaacttattttgagagcagtttcttgcaataggcacacacgccttcttaatattcagagacaactgtgcaaaaatgtccaaatttttcagtccccaaaagatgttgtcttgacacgagatgttgcagcagcgaaggacccaatgatgaatgcggagaagggtttctcagattgttttgggaatgaagtgcttcaagtaagggcatgtggtcaggcatatgttagtcttggaataaatatcaggagtggccgctttctcctccaatcaccagaaaatatattaccccgtgctgcacttatggactgtgaggaagctctaaacaaagggagtacatcagctaccgaggttttttcaagccttaggaccaggagcattctccacctacttgctgcaactggaagtttttttggccttaaggtttaccagcagtctcagggcactctgaagattcccaagaccttattacatggctcagatttgatggtcatggggtttccacattgtgcaaatgcctattatctgttgatgcaacttgataaggacttcaggcctgtttttcatttgcttgagacacagtgtgatgcaaatggtaatactaatgcaagtggagatgtgaaagaagctattagatataacaaaatcaatataggacagatgcaaatacttaaaaatgagatgaatgagaacccttttgatgtgaagctgcaggccctacaaagtttagtggactctgctgacatgatggagagtgatcttcctgtccaaaatgcaattgaacctcttccactacttcctgcttgttcaccatcattttcatctattgttgatgaggttttcgaatatgaacgtggttctactgctgcgcagaatcgttgtcttccagttgatattcaaggaataaatgctagggttgtctcaccaatgcatgatggatgcttatcttatacccaagctaataataacatgaatgttcatcctaatgtcagtttgaatagctatttcccaagtaactttagacatttacaaggtgcaaataaatcacttcagcttgtgccttcaagattagggaagctcatcactgctggttctgatggtgcatctaggaaacactatctttcagatttcttatcaagtatcccttcattacgaggactgcaacctagtgagccaagaaagcggagaaaaaaaacagaatcagtgcagagtctcctgcctttgcaggcacactcttctaatttgcaatcaagaggcagtctcacctatggagatgttcttgctgaaagaaataattgtgttccggcaactatatatgcttctgtgctactacatgtcataagacactgttcattatgcatcaaacatgcccaactcactgctcagatggattcccttgcgattccatatgttgaagaagttggtctgcggagaccatcgtctaatctttggttgagattaccttttgcacaggatgattcttggaaccatatatgcttgcgccttggtaaggctggaagcatgtcttgggatgttaggataaatgatccacatttcagggaactttgggaacttaatggaggaagcaccaaaacacaatggggtgttggcattcgcattgcgaatagctcagaaatggattcacatatctcatttgattccagtggtgttgttttaacttacaacactgttgaggcagatagtgtccagaagcttgtgtcagatttacgccgactttcaaatgctcgttcttttgctcttggaatgaggagactgattggtgtgaaatttcaagacaagctagatgacaaccagttaaccatggaggtgaaatcacaatctgttaataaaggtaacagtgatgctgctgacaagctatctgagcaaatgagaaagacattcaggattgaagctgtcggtctaatgagcttatggtttagctacggcaccatgcctatggtacacatagttgttgaatgggagattgctaaggctggttgcacaatgcacgtttctccagatcagctttggccacacacaaagtttctggaggatttcgtgaatggtggagaggtagcatccttcttggattgcattcggcttacagcaggaccattacttgcccttggaggtgcaattcgtcctgcaaggatgcctgttgctgtctcatctggatatagctctatgccaaaacagccgaacatccccacacaagggcctttagtaaatggttcatcttcaactatacatcacgcacctggcccctcaaatgctgcatctgcccatttaggcagtcataaccttcatgctgctgccatgctttcagctgttggacgcggtggacctgggcttgttcccagttcattactgccttttgatgtttcggttgtacttcgtgggccatactggatacgcattatatatcgcaagaaattttctgttgacatgcgctgctttgctggggatcaggtttggctccagccagctactcctcctaaaggtggaccttcagttggtggatcgttgccatgcccacagttccggcctttcataatggaacatgttgctcagggtctaaatgctcttgaacccaacttcatgaatgctacacaggctagtggacacttaaataacaatgcaggagttccacaaactgctcctagtgcaaatcgtttaaatgctacccctggtgtttctatggtcaggccaacatctggtgttgctaaccatgtagcagccagtttgagtcgagcaggaaatgccatgttggcttcttcggctcttgcttctggtattagtggaacttctgtgcgacttactgctggagctggtctccctgttcacatgaaaggtgaactaaacacagctttcataggactgggggatgacggtggatatggtggtggctgggttcctttggcagctcttaaaaaggtgctgagagggatcctaaagtacctaggagttctatggttgtttgcacaattgcctgaacttttgaaagaaatactaggatcaatcttaaaggacaatgaaggtgctctcttgaatttggatcaagagcagcctgcactccggttctatgtcggaggatatgtatttgcagtaagtgtacatcgggttcaactgcttctacaagttttgagtgtgaaaagatttcaccaccagcaacagcagcagcaggctcaaagcaatgctcaggaagagctagcagcagttgaaatcaatgaaatatgtgactactttagcagacgtgttgcctccgaaccatatgatgcttctagagttgcttcttttatcactttgcttacattaccaattttggttctgcgcgagtttttaaagctgattacatggaagaaaggtctttccccggttcatggggacattgctactgcacagagggctcgcatcgagctttgtttggagaatcactcaggatcagcttcgtctgataacaccgagaacagcagtttagccaagagtaatattcatcatgatagagcccacagttcagtagaatttgccctgacatttgtacttgaccatgctcttattcctcacatgaatgtagctggaggagctgcctggcttccatattgtgtatctgtgaaacttcgctattcttttggggacaacaatcatatagctttccttgctatgaatgggagccatggtgggagagcctgctggttgcagtttgaggagtgggaaagatgtaagcagaaggtttcaagagctgtggaaactgtgaatgggtctggtgtagctggagaggtaggccaaggaaggctgcgaatggttgcagagatgatccaaaagcagcttcaactctgtctacaacagctaagagatgacccactttctgcaggctcgactgcatcatgaacttgcttggaatgagctctatcaaggccattgatgtctgtcatattcagcatggcctttggctttgttaacgtgtagatgtgaaggaatacacatttggtagcagtgacagtttcgcctgaggcttgctcagatgacaattttgtacagtataaatggtggcggttgactctgatggacctttagttagcccatttgaacgtggcctgtaacatagctagggtgggtaataatgtgccaaggtggaattgctcagggatgcaaaatgatcttcgggaattggttgtctgtatcatctactgtaatcgtgtcctttttctccctttctgatggatagttcatttttggattcgttatcatctttcttctgtctgtactatgttaatctagacattggtggatctggtatatgtgttgttgtacatgatatattggcactggacttgagactgacgcatttgacgtcttagtattagcaggacatctctagttgtgttcagagtgattggacacaaaaaatattgcttggagcttttctttagggctagtttgggaacttaaatctcgaccccatagattcctggagaagatttgagttcccaaactagttcttaatgtttcttttttttttctattgcatcttcttagtaaatgatgtttttgtaactgtaaaaaccgtgccggtcaagattgatacctggatggataagatgatgttgggtcagatttcttgctcatggttaggaaattgatgtgagcactctggccagtttgtttgaaactgatattcgtgagttgtgattggaagcgtatggataggctttttaatcgtgttaaccgtcatacgggtaggcctttttagttctcgtgcttctacgtttgggacacaggtgtcagtttttgtgctttaa

SEQ ID NO: 217875 - DNA, 3864 bp, Zea Mays
gtcaaatgctcgattgaaggcgcatgcatgaaaggcctctctagtaggacatctgcattgaacacagcatctgaatgtttacatatcctcaggttctggagcagggattatggaagaggcatttcattagctgaaagttcacattcactaacagtgctcgtctcgattgtatcattcttgcaagctgaactgaacatctctgataaaccagcaaatgccactggcatttcttcccgcaattctggatctgcgaatagtaaaaattccaatatttgggatatgaagatatcagcattttcgatgctcgaagatatattgagtaaggttgcatcaaatatgacagaaaatctgtggcagtctgtcatcgaggtcttgaggaaagttatggattttgtcacagcaaggaaccttgttatagagagtagcatcatgtcaagattttatacatcttttcttcgttgtctacatttggttcttgtggatcccaaaggaccactttcagggcatggtttgtagcaaatctgcagatatttttcgtatatgggctgaggtcatcttcacctcctacactagctccaaaagaaactagaacagattcaaaacccagagcttcacgtggacgatatagaccacctcatttgaggaacaaggagagaagagagaatgattcactggaaggtcaaaattcagatagtgagtattcttggtatgatatgagctcatcagactcagacctgagtgatagtgatggttatgcaaaaagtggagaccgcttccggagttcgaaggctagattagctgccattctttgtatacaggatatctgccatgctgatccaaagttacttacttcacaatggccagtacttttgcctgagaatgatgttctccaacaaaggaaatatcaagcaactctgatgacatgcttgctttttgatcctataacgaaggtacgtgttgaggcagcatcaaccattgctaccatgctggaacggcaagcattagttttgacacaagttgcagagtacaaggagtcgtctaagcgtggatcattcactacattatcttcctcacttggtcaaatattgatgcaactgcatacaggagcactgtacttgatacagcgtgaaactcaagctactttgcttgcggcattattcagagttctcattcttttgatatctgctacaccgtacgctcggatgccaaaggaattgttgccaacagtcattaaagtattgtgcagtagattactgaacaaacactcgaataagactgaacattatgccgtgctggttactgttctaagttgcttggagacagctttttcaaaagtgccacctactttggatgtctttgcggttctcactgaggattgctgtgctggaccatcacatgagcaggaagaatcaaatgttatagcttttcttcttcattgtatagaggaggaaatgcattacagtgttagacatggagccttccaggtgctgagatcagcggttcacaactacccaagctgtgcaaacatgatttgggaaaaacttcgagacaatgttcttaacttgttgcaaatacaaagttttgaagaccaaaagtatgatgctaactttgggcctcctggagctaaagaagaatcatcaatcaagggaagatgtcttgtagctggaataaaggtaatggatgaatgtctgcgtgtttcatctggattcacaggagcagatgacatcaaagaatgcagattactggatattcagcaaatttctgattgtaccataaataaaactattaagtctgcacctcactttgaaatggaagctgctggatcatcacagaattgcactttggacataacacttggaattaaccgttggatcgaggtgatagagactcatctccctcagggattatcccatggttctgctatggtcaggacagcatccctcacatgctttgctggcatgacttctgatgtattcttctccctgcctgaaaataagagagactatgtgacctcttcttctgttcatgcggcgttaaatgatatggttcctagtgtaagatcagctgcatgtcgagctattggcattgttgcatgttttcctcagatattgtcaagctctagcctaccaggcaagttcatagatgccattgagttcaatacacataactcatcaactccagttcgtgtcaccgctgcatgggctttggcaaatctctgttcttgtattcgttttagagcactggaagtgcatacagatccctatgcaggtgtaggtgtattgagcaaatcaagcatatctcttttggttgaagttgctttgcgtctggccaaagatagtgaaaaagtaaaatcaaacgctgttagagctcttggttatctttcaagatttatcagattcaattaccacgccggcacaataaatgacccaagtaacagtgattcagttttttatggagatcctgtgtggcttgaaagaatggtgcaggctttgatgtcttgtgtgacaactgggaatgtaaaggtccaatggaatgtttgccatgcccttagcaacttgttcatgaatgataccttgagacttcaagacatgccttgggcatcaagtgtttatagcatacttctacttctaatccgggactcaaacaattataagataaagatgcatgcagctgttgctctatcagtgccagtgtcaaggcttgattacggcagctcgtttccagatgttgttcgaggcctcgtccatgctctcgagtcattgaactcaaacaattcatcgttaccttcaaatttcaaacagagagacaacctcgagaagcagcttacgtttactgctctccatttgcttagttttgtgtcaccaaacgacgatccaagcctgaaagattttcttaccaagaaatcgtcgttcctagaagactggctgagatcactatgcgcatcgttcaacagctcggagcgccagcccttgccaacggaggccacaaacgacgaggacggcttcagcccaaacgtgactcagaaaggcatgctgtcttccgccctgcagtccttgctcggcgtgtacgcgggcaggacccagcaggtcatcacccagagatttgagcaactggctagaagcgtcgcttgaatggtgagcagcgacgagcagtcaggtgtggtctccactccagcctccattaacaagcagcgatatattggtcgtcgtctacccctcaggacggacagcgcgtcaggcagtggatccttaaattctgccgaatcccatgagctccaggcggcacttgtctcggatcttggctgtcatcatgcacaggctctgcaagcctggcttggtcggtgttttcgtcgttgtttacttgaaacatcgttactgtgagtacacacacatatatatatatatatatatatatatatatatatatatatatatatatatatatatatatatatatatatatatatataagttggcagtcttcaaagctcagcgtgaccggacctcagcagcactgggtatctcttaactacttttctggcgttcctgacaaacaggatggcgctgttatgtagatgggccttttccctggtcctggggcttcctgcttgcttgataaaaggttggtatcacccgaccacggtccacgtggacgatattacaagatgttcattgttcttggcaagaggggtcatgaatgccgtccaaatctgttggagtccgtcgctagtgccactgctgttattgagcccatgtgtgtgtgtgcgcgcgtgtgttttgttcatgtaccaaccttcataaattgcttgacgctctgcactgttcgacgatcacttccaatgctctagtccgtaacgttgctgaa

SEQ ID NO: 217876 - DNA, 1227 bp, Zea Mays
gaagagatccgtgtggccaaggtcttcctctcctatatattgactcgccgccacacagatagggttttctctccacgcagcgcgctcctcgatccccaacaggcaacagcccagccgctgtcgccctcgttccgtagtacggcgccgccagatcgtcagtcaccatgatcatctccaagaagaaccgccgcgagatctgcaaatacctcttccatgagggggtcttgtacgccaagaaggactacaacctggccaagcaccccaagcttgatgtgcccaacttggaggtgattaagctcatgcagagcttcaagtcgaaggagtatgtgagggaaaccttctcatggcagtactactactggtacctcaccaacgatggcattgagcacctccgcagcttcctcaacctgccatcagaggttgtgcctaataccctcaagaagtcttccaagcccccgtctcgccccttcggctctggcccacctggtgaccgccccaggggccctcctcgttatgaaggtgacaggcctaggtttggtgatagggatggttacagaggaggtccacgtggcgctccaggtgactttggtggtgataagggtggtgctcctgcagatttccaaccatcttttaggggtagcagacctggctttggccgcggtggcggcggtgctttcggtgctggtggatcttccatggagtgatgtgtcaacatgagctagcataacattcgtctttgaactatgagaacaatgagattttgttttgttttaccgagctgttgccgtgggttgacatggttttgtgatcgtttttgtttagatgaaattattgaaatcaagcagcgagttatcagtctatcgcgtgctgaattccttgtgctttctggtctatggttcgtgttgcaagttataacttttgcatggagaccaaaaagttacggtttcaagaaaaaaatttgtcaagacacacgataagtatggcaacgaagagctgacaaaaaaacattcctcctagccccgttggtgtgatgtcctcattaccttccaatgcagtgcaagaatttgcaacagccaacgttatgaattatatatatgaacatccataggaaaaaaatccatctacttttaaggcatgcatttattgcatgaatttgcaacagccaatgttatgctgaatttgttggatcaactagaaatcaaaatatcccatctacttttaaggcac

SEQ ID NO: 217877 - DNA, 2880 bp, Zea Mays
cttaactgccccgcaacctttctctctggggttcatcactggcaaggagacgaacctgagaagctgcctgaggtgaccgttcaggctttgggacatttactagaagaggagcatccagtcatggctgtatctgataacaaggaaagtgagaaacaaataccacgtccaccaccatgtccttcaggagaacagcaaaaacctaaggacgatggtgatctttcagatgattcccctagtaactctactaaccaaagtgatcatattgatggtgaacatcattacaacattccaatatatcgtccgtacaagtacgatccatatcgatttatgtgtagaagagagagaagaaaccactggaatgatgactatccatatatgtgtggctttcaaaacccatggaatcccaagacttcccttcatactgatgattattggagtccttggccctctcctgagcctgaccagagaatggaaagatacaattcagggagttgttggtcttggccctctccagaaccagactgtgagaaggaaaggtacactgtggctgctgggttatccaatcctcatttgtggacatgttttcttaattgtgtactccaatgtatggttcacactgttcctcttctattgaagcttcggaaagctgatcatccagatccatgtcctcgtgtttctattggattctgttgttattgctccctaaaacatcatgtcgatgaatgtatgaggctctctggtagttctttctaccctgagattttcgttaatcacctgaaatcaatttcatcaaattttaggagtggagtacaacaagatgcgcaggagttcctccgctgtttgcttgataaattggatgaggactccattgctcccaggttctctgaagaatcctcttcctctgaagaatcttcttctactgaagaaggtagtgtcgtaaaagaaatattcagtgggtgcctgaaaagccagctgcgatgcccagagtgcaatcattattcagataaatctgaaccttttctcgatctaagcttggatttgaacatggtggagactctaatggatgctttacaatcctttacaaatactgagttaatcaaagactttatgtgtgatggatgcaaatctcgtgttaacctggagaagcacttcaagatagagcaggcacctgaagtgcttgtaattcatctcaagcgattcactaattttgagtctaagattcgggacaaggttaagttcccaatagagctggatataaactcctttatgagttcttcggatgatacactgcagaagtacgatttgtatggagttgtagaacacctcggtgcatatggcagcggtcactatgtttgttatatccggtcatctgaagctgattggtacaaatttaatgatgacaaggtctgcaaatgttctgtggctagcgctttggacagcgcagcatatcttcttttctatgtgaagcaaggttcatccccgtggttctctaccttactcgagaaagaagacaagtgtccactggctggttctgtaagcttggaagaacaaggcgaaactgctcccttcaacaaagaagggcaggcccggtacaacaatgagagttgtcttgttgagtcaccgggtccacatttgtggagaaaagacttgcctcaatttatccattcctcagaccccactcatgcatctagcactgggtctgccaacaaagaagaggaggcggcatcttctcatgggcaaggcaaaattgctcgcaataacaaagaagaggcgacaacttctcttgagcaaagaaatggatctactttgctggacttatctgaacagttacaaaggaatggaaatgtcaataccttgtcggatgcatcagacaaactggaagaaggctgcaggatgggtgaaacgtcaacgggaacacaagggcctagctgtctgattggatcaggcgacaagaatggccatgccgatgggtgttgggagccatcaggtaagatgaaagatgtcagcccaggggggtcactgaacaagaaggaagcgaaaccaatgacatgtggatctgtagaagttgaagttgatcatgcagttacacagggaggctctcctcggaatgagaacaattgccactcacttcaactttcacataagcacaaagacaactgtgacttcttagaagttgatcatgcagttacacagggagtctctcctcagatcaatgagaacaattgccacgtactccaacttccacatgatcgcagagacaacttctgtcgcaggagtctctccttgcaagtagatgaaatcgggggttgctgtggagcaccatctacggggatgggcgcctcaaactcagagaacgaaagagtagagcccatatccaacgagttgagagacgacaacagagacactagtaagggcaagtgcaaacggctctaggttgtggggaagaacgcagaggaagaggaggcggcgagagtaagaagcggaagtctgccaatggtggtcggtccaaggcattaaggaagcgcatgaagaggacacaccgtaccgtagcaaggcatttcgctttctgtaggtggagagcagtggcaggtacagtatggaaatcgaagacgaggcgaaggtgacgtcggttggctggcgactgaccagcaactattccacggcgcctataggtagaagaaccggcaggggcttttgtaatgcacacaagtatctcggatagagtttagggataaaatgagcaagaacagagtggaggaatggggaagtcacggttgatgtccatgggactttgggcacttttttgcatcttttttgcattttagcttttttggtttttttttgcacaactataccctttgcagtttcatttcaaaaaat

SEQ ID NO: 217878 - DNA, 3256 bp, Zea Mays
gcgccatgccacatcgcgtccagcgtgtataagcgaggacgccctccgccgccgcctcgacttctcgctctcctcctccgccgccgctccagactccagtgcgcgtcgcgtcgcgtcgcgtcgcgctgcacttgtagctggattgcatgatccaccacagcaatcttcttcccctcgtctaaaccctcgcgccccgccctgtcctcaaaacccctcattagtcggtcgatggcagacgaggatgccgccgagaccgtcggcgccgcgtacatgacggtcccgccgccgctggttatgccggacgccgcagtgcctccgccggtggcggcagagaccgtcgccactctgccgcccgtttccgatgacgacacggaggccgccgtcgcggctatgttggtcgttctgcttcctccaccgccggagcaaatggtggcgattcctcaacctttctcctctgaatccaagctgcctgaggtgaccgttcaggctttgggacatttactagaagaggagcatccagtcatggctgtatctgataacaaggaaagtgagaaacaaataccacgtccaccaccatgtccttcaggagaacagcaaaaacctaaggacgatggtgatctttcagatgattcccctagtaactctactaaccaaagtgatcatattgatggtgaacatcattacaacattccaatatatcgtccgtacaagtacgatccatatcgatttatgtgtagaagagagagaagaaaccactggaatgatgactatccatatatgtgtggctttcaaaacccatggaatcccaagacttcccttcatactgatgattattggagtccttggccctctcctgagcctgaccagagaatggaaagatacaattcagggagttgttggtcttggccctctccagaaccagactgtgagaaggaaaggtacactgtggctgctgggttatccaatcctcatttgtggacatgttttcttaattgtgtactccaatgtatggttcacactgttcctcttctattgaagcttcggaaagctgatcatccagatccatgtcctcgtgtttctattggattctgttgttattgctccctaaaacatcatgtcgatgaatgtatgaggctctctggtagttctttctaccctgagattttcgttaatcacctgaaatcaatttcatcaaattttaggagtggagtacaacaagatgcgcaggagttcctccgctgtttgcttgataaattggatgaggactccattgctcccaggttctctgaagaatcctcttcctctgaagaatcttcttctactgaagaaggtagtgtcgtaaaagaaatattcagtgggtgcctgaaaagccagctgcgatgcccagagtgcaatcattattcagataaatctgaaccttttctcgatctaagcttggatttgaacatggtggagactctaatggatgctttacaatcctttacaaatactgagttaatcaaagactttatgtgtgatggatgcaaatctcgtgttaacctggagaagcacttcaagatagagcaggcacctgaagtgcttgtaattcatctcaagcgattcactaattttgagtctaagattcgggacaaggttaagttcccaatagagctggatataaactcctttatgagttcttcggatgatacactgcagaagtacgatttgtatggagttgtagaacacctcggtgcatatggcagcggtcactatgtttgttatatccggtcatctgaagctgattggtacaaatttaatgatgacaaggtctgcaaatgttctgtggctagcgctttggacagcgcagcatatcttcttttctatgtgaagcaaggttcatccccgtggttctctaccttactcgagaaagaagacaagtgtccactggctggttctgtaagcttggaagaacaaggcgaaactgctcccttcaacaaagaagggcaggcccggtacaacaatgagagttgtcttgttgagtcaccgggtccacatttgtggagaaaagacttgcctcaatttatccattcctcagaccccactcatgcatctagcactgggtctgccaacaaagaagaggaggcggcatcttctcatgggcaaggcaaaattgctcgcaataacaaagaagaggcgacaacttctcttgagcaaagaaatggatctactttgctggacttatctgaacagttacaaaggaatggaaatgtcaataccttgtcggatgcatcagacaaactggaagaaggctgcaggatgggtgaaacgtcaacgggaacacaagggcctagctgtctgattggatcaggcgacaagaatggccatgccgatgggtgttgggagccatcaggtaagatgaaagatgtcagcccaggggggtcactgaacaagaaggaagcgaaaccaatgacatgtggatctgtagaagttgaagttgatcatgcagttacacagggaggctctcctcggaatgagaacaattgccactcacttcaactttcacataagcacaaagacaactgtgacttcttagaagttgatcatgcagttacacagggagtctctcctcagatcaatgagaacaattgccacgtactccaacttccacatgatcgcagagacaacttctgtcgcaggagtctctccttgcaagtagatgaaatcgggggttgctgtggagcaccatctacggggatgggcgcctcaaactcagagaacgaaagagtagagcccatatccaacgagttgagagacgacaacagagacactagttgtggggaagaacgcagaggaagaggaggcggcgagagtaagaagcggaagtctgccaatggtggtcggtccaaggcattaaggaagcgcatgaagaggacacaccgtaccgtagcaaggcatttcgctttctgtaggtggagagcagtggcaggtacagtatggaaatcgaagacgaggcgaaggtgacgtcggttggctggcgactgaccagcaactattccacggcgcctataggtagaagaaccggcaggggcttttgtaatgcacacaagtatctcggatagagtttagggataaaatgagcaagaacagagtggaggaatggggaagtcacggttgatgtccatgggactttgggcacttttttgcatcttttttgcattttagcttttttggtttttttttgcacaactataccctttgcagtttcatttcaaaaaat

SEQ ID NO: 217879 - DNA, 1652 bp, Zea Mays
cacggcctcaacacccagccgccgccgcccggcagttccgtctcccttcttcgccttctcagtcaagctaaaacctcgctcgcctcgtccagtcagacatggcatgaaaccctagggcgcccgcctcccctccgcaatttgccattgcgctccgcgatgcaggcatccgcgcgcctctcctactccgtggcctccaggaaagtgatcgcgggtgtctctatcgcgcccccacggtcgtgctatcggacctcccgagggaaggcgcatgcggcgccgctgcctgcgcaggagccgccaccgaaggggctgaagaggattacaaagcaggagcggagggttcgaatagtggaatttgttgagaatgcagttatagggcttcaaacgaaggcaagtttcctactgtaaaaaatatctgtcagcaaattggaggtggttactatgcagtgcgtgagttacttcaagaaatgaaatataatcatgcaaaattaccactgggtaatgctaaggcagctccacttcaaacaacagttgaagtcactgaacaccccatgcctaaggatgaagctagagtggttgaaagtcaaggaatactagaagtttctgagcactccatggccaaggatgatgctgaagtggctcaacctcaaggaacagctgaagtttttgagcacttcttatctaaagatgaaggtaaggtggctcagtgtcaaggaacgtttcactttcctgagcactcaagacctaaggatgacagtggaaagactgctcgacatgatatggacacttcagaaacctgtaagactgcagatgccccagctttatctgatctaacagagaatgagggaattttatctgaccaaacagagagtgaggacaaaccagatcctggaaatcagcaaagagaaatagaagctaacaaatttgatttgaagaatttcgaaaaaaatctgaatgcaaatgattcaaacgcatcagatcaaagtggaagtgatacggtgaatgaggcaaagacacatgccaggggagacaacccaaagcttgaggaatccgcgaacacgggtcttttgggcagcctgagatcttttgcttatggcatcagaaacttctggaaaaatatgtaaatctgttgtttttttgccgtgagtcacctaaaattgaaaaggctacagaatcgagaacttgcctctttgtcacgggcttttggttgcataggatcggagaggagagggcttttggttggagaggattgatggtttgtttgggagcaaggggagagcctctccaattcacttgctcccaaacaaaacaagccatgagacaatcccttgctattactagtaagagattatgtctctaaattcccttcaatccttatgcaataaaagccccaagcgtttgtgatactggatcaatttgtaaagttctttttgtgtcacaccaaatggtcatgttccgctatgacgtttcgataaagctagataggagtattattagtactgcccctgttgtggcccaagttcacatggtatttaagtgttggtggtatctaactgtgtttgtcaattgttgtgcacacattgaaggccctatttagaagtaaaatattttttatagtttttaggaaatattacagtttattatagaaatacaag

SEQ ID NO: 217880 - DNA, 2474 bp, Zea Mays
cgcggtctgctagatacagtgacagaaacgatccgcaacgcaggcaggcccgccgcgcagcccaggatccatccatccacctcacaccgcgtcgtcgtccagctcacactccccggccgcgcccccgctgctcctcgccgcggggtcacgcgcgcaggcaggcgagcgaccagtaactgacgtctctccttcctcccccccctgctccggcccctctacaaatccccgattaaaccctagacttccctccccacccaaatgcgcgccccctcctaggcggcgcccctcgaattcggcaccggctccgccgaagggtgcgtataatgagtgcgggtttcgacaagcagatattggctcagaagctttcgaagcttaatagctcacagcagaccatagagactttatcacattggtgtgtctttcatcatcgttgctgccaacaagttgtagaaacatgggattctgagttccatgcagctcctgtagagaggagggtatctttgctgtaccttgcgaatgatattatgcagaatagcagaaaagaaggtaatggatatatagctgaattcatgagggtcatccctgctgccttgaatggagtgttgactgtaagagatgattttgggcggaatgtcccaaaaagactgattgacatatgggaagaccgtaaaatatttgatacccaggcacaaagcctgaaagatgattttttcaggaggttaaaggacattagaaaccagttgaaaaatacaggcagtgagcagctggagaaggttgtctctagctacaaacatgtcctgaatgctcctatggatgaggatactctgatgcgaaaatgccaagcagctcttatcaattttgatgaactcaataaaacatatggaaataactccattttaggtagtagcaatcgttcgggctttatgcaggagctgcaggaacaacatagcattctcagaaactccatcgaacaacttaaagtgtcagaatcactcagggccaccctgatttttcatttgaaggaagcgttgaatgagcaggagctcaaagtggaacacctcagaagccagcttcaggcagctcagccccgattcaagagagcttctgagctctgcgtggggcttggaagcaacatggaaaggcgtcagccatcaaatcaagggcttaagagtgctgtattcacaggagggaaatggtgttgagcacagcgtgacagagacaaagcttgctgcaggtgctgcttcagatgatatacgtggtggtgctttgtcttcacgagtcaatgggggcaacactatgctgaaaatagaagagcacacttctggtaacaagaggcagaagctagaggatgacgcacatatttctcagcctcggtcagagtcaccgccgccgccgccacccccattccctcatcctgatacatttcaaccgcctccgccaccacctgagtatcctcgatcgccagatcctagcccaccaccgccacggacttcactgccaccccatataatccccccaccgccgccgccaccacccgcaatgccactccatatgttctcacatctaccacctccagctggtacatttgtaccttttcctgctggaccacctggcccaatgtattgcacttatccatcttttactcctgttgtcaactttcccatgaccagcccacctggtttccgtaatctaaccccgcctccatcttttcgaggattagctggtacattctatggccctcggttccccaccgcgcccccaccagcagacaggaaataagagtagtaacttacctgcagacttacagtgccagcagctttggcaagtatcataccagtttttttctgtttcaacagaggatacaaactcgtggggatgcgtcaccatgtgttgtagagctcaggaaactgttctattgttgtacattcagccagtcagcgtgcaacagtcaattttctgaactagttctggtcttggtcccagagtagaaagtgtagagcctgtacatgtcggctgctagagggaatttggaattccgagagcccggacccggagcaaatggctgcgtcagtttaatgatcgactgatccagtagttcctggtctaggcggtggagtaaaaactgtagattccgacagcttagggagaagatatggaacccaatagccgaagacagatgttgtagcatgacatgttgtaactcatcacagttgtgctcttcgctagatcatccgagaacacgtagatgttcttgtgatgtcttgagcgtgtaatcctgctgtttggtgtaagatatggcttcagctgctgtcgatggtcgaatctcttgctctgtttttaattacccttttttgctctcggctattctagcgccaataccttttgcgtctactttcgcatgtgttcccaaggaatttagtggtctgtcttggtttccatgtgtacaggaaagatatatcctgtcatggtgcttc

SEQ ID NO: 217881 - DNA, 2522 bp, Zea Mays
cgcggtctgctagatacagtgacagaaacgatccgcaacgcaggcaggcccgccgcgcagcccaggatccatccatccacctcacaccgcgtcgtcgtccagctcacactccccggccgcgcccccgctgctcctcgccgcggggtcacgcgcgcaggcaggcgagcgaccagtaactgacgtctctccttcctcccccccctgctccggcccctctacaaatccccgattaaaccctagacttccctccccacccaaatgcgcgccccctcctaggcggcgcccctcgaattcggcaccggctccgccgaagggtgcgtataatgagtgcgggtttcgacaagcagatattggctcagaagctttcgaagcttaatagctcacagcagaccatagagactttatcacattggtgtgtctttcatcatcgttgctgccaacaagttgtagaaacatgggattctgagttccatgcagctcctgtagagaggagggtatctttgctgtaccttgcgaatgatattatgcagaatagcagaaaagaaggtaatggatatatagctgaattcatgagggtcatccctgctgccttgaatggagtgttgactgtaagagatgattttgggcggaatgtcccaaaaagactgattgacatatgggaagaccgtaaaatatttgatacccaggcacaaagcctgaaagatgattttttcaggaggttaaaggacattagaaaccagttgaaaaatacaggcagtgagcagctggagaaggttgtctctagctacaaacatgtcctgaatgctcctatggatgaggatactctgatgcgaaaatgccaagcagctcttatcaattttgatgaactcaataaaacatatggaaataactccattttaggagctgcaggaacaacatagcattctcagaaactccatcgaacaacttaaagtgtcagaatcactcagggccaccctgatttttcatttgaaggaagcgttgaatgagcaggagctcaaagtggaacacctcagaagccagcttcaggcagctcagccccgattcaagagagcttctgagctctgcgtggggcttggaagcaacatggaaaggcgtcagccatcaaatcaagggcttaagaggtccagtctctccgatccacttagcactgttgctccagaagctgtgaaatctcttcaaaagggacaatcaagtgcagtgctgtattcacaggagggaaatggtgttgagcacagcgtgacagagacaaagcttgctgcaggtgctgcttcagatgatatacgtggtggtgctttgtcttcacgagtcaatgggggcaacactatgctgaaaatagaagagcacacttctggtaacaagaggcagaagctagaggatgacgcacatatttctcagcctcggtcagagtcaccgccgccgccgccacccccattccctcatcctgatacatttcaaccgcctccgccaccacctgagtatcctcgatcgccagatcctagcccaccaccgccacggacttcactgccaccccatataatccccccaccgccgccgccaccacccgcaatgccactccatatgttctcacatctaccacctccagctggtacatttgtaccttttcctgctggaccacctggcccaatgtattgcacttatccatcttttactcctgttgtcaactttcccatgaccagcccacctggtttccgtaatctaaccccgcctccatcttttcgaggattagctggtacattctatggccctcggttccccaccgcgcccccaccagcagacaggaaataagagtagtaacttacctgcagacttacagtgccagcagctttggcaagtatcataccagtttttttctgtttcaacagaggatacaaactcgtggggatgcgtcaccatgtgttgtagagctcaggaaactgttctattgttgtacattcagccagtcagcgtgcaacagtcaattttctgaactagttctggtcttggtcccagagtagaaagtgtagagcctgtacatgtcggctgctagagggaatttggaattccgagagcccggacccggagcaaatggctgcgtcagtttaatgatcgactgatccagtagttcctggtctaggcggtggagtaaaaactgtagattccgacagcttagggagaagatatggaacccaatagccgaagacagatgttgtagcatgacatgttgtaactcatcacagttgtgctcttcgctagatcatccgagaacacgtagatgttcttgtgatgtcttgagcgtgtaatcctgctgtttggtgtaagatatggcttcagctgctgtcgatggtcgaatctcttgctctgtttttaattacccttttttgctctcggctattctagcgccaataccttttgcgtctactttcgcatgtgttcccaaggaatttagtggtctgtcttggtttccatgtgtacaggaaagatatatcctgtcatggtgcttc

SEQ ID NO: 217882 - DNA, 2555 bp, Zea Mays
cgcggtctgctagatacagtgacagaaacgatccgcaacgcaggcaggcccgccgcgcagcccaggatccatccatccacctcacaccgcgtcgtcgtccagctcacactccccggccgcgcccccgctgctcctcgccgcggggtcacgcgcgcaggcaggcgagcgaccagtaactgacgtctctccttcctcccccccctgctccggcccctctacaaatccccgattaaaccctagacttccctccccacccaaatgcgcgccccctcctaggcggcgcccctcgaattcggcaccggctccgccgaagccagggtgcgtataatgagtgcgggtttcgacaagcagatattggctcagaagctttcgaagcttaatagctcacagcagaccatagagactttatcacattggtgtgtctttcatcatcgttgctgccaacaagttgtagaaacatgggattctgagttccatgcagctcctgtagagaggagggtatctttgctgtaccttgcgaatgatattatgcagaatagcagaaaagaaggtaatggatatatagctgaattcatgagggtcatccctgctgccttgaatggagtgttgactgtaagagatgattttgggcggaatgtcccaaaaagactgattgacatatgggaagaccgtaaaatatttgatacccaggcacaaagcctgaaagatgattttttcaggaggttaaaggacattagaaaccagttgaaaaatacaggcagtgagcagctggagaaggttgtctctagctacaaacatgtcctgaatgctcctatggatgaggatactctgatgcgaaaatgccaagcagctcttatcaattttgatgaactcaataaaacatatggaaataactccattttaggtagtagcaatcgttcgggctttatgcaggagctgcaggaacaacatagcattctcagaaactccatcgaacaacttaaagtgtcagaatcactcagggccaccctgatttttcatttgaaggaagcgttgaatgagcaggagctcaaagtggaacacctcagaagccagcttcaggcagctcagccccgattcaagagagcttctgagctctgcgtggggcttggaagcaacatggaaaggcgtcagccatcaaatcaagggcttaagaggtccagtctctccgatccacttagcactgttgctccagaagctgtgaaatctcttcaaaagggacaatcaagtgcagtgctgtattcacaggagggaaatggtgttgagcacagcgtgacagagacaaagcttgctgcaggtgctgcttcagatgatatacgtggtggtgctttgtcttcacgagtcaatgggggcaacactatgctgaaaatagaagagcacacttctggtaacaagaggcagaagctagaggatgacgcacatatttctcagcctcggtcagagtcaccgccgccgccgccacccccattccctcatcctgatacatttcaaccgcctccgccaccacctgagtatcctcgatcgccagatcctagcccaccaccgccacggacttcactgccaccccatataatccccccaccgccgccgccaccacccgcaatgccactccatatgttctcacatctaccacctccagctggtacatttgtaccttttcctgctggaccacctggcccaatgtattgcacttatccatcttttactcctgttgtcaactttcccatgaccagcccacctggtttccgtaatctaaccccgcctccatcttttcgaggattagctggtacattctatggccctcggttccccaccgcgcccccaccagcagacaggaaataagagtagtaacttacctgcagacttacagtgccagcagctttggcaagtatcataccagtttttttctgtttcaacagaggatacaaactcgtggggatgcgtcaccatgtgttgtagagctcaggaaactgttctattgttgtacattcagccagtcagcgtgcaacagtcaattttctgaactagttctggtcttggtcccagagtagaaagtgtagagcctgtacatgtcggctgctagagggaatttggaattccgagagcccggacccggagcaaatggctgcgtcagtttaatgatcgactgatccagtagttcctggtctaggcggtggagtaaaaactgtagattccgacagcttagggagaagatatggaacccaatagccgaagacagatgttgtagcatgacatgttgtaactcatcacagttgtgctcttcgctagatcatccgagaacacgtagatgttcttgtgatgtcttgagcgtgtaatcctgctgtttggtgtaagatatggcttcagctgctgtcgatggtcgaatctcttgctctgtttttaattacccttttttgctctcggctattctagcgccaataccttttgcgtctactttcgcatgtgttcccaaggaatttagtggtctgtcttggtttccatgtgtacaggaaagatatatcctgtcatggtgcttc

SEQ ID NO: 217883 - DNA, 642 bp, Zea Mays
gccaataagactccaccagtgttccgacgaccccccctcagggtggcagtgacggtcatggcggcggccggtcactgctactaccatgacgactatggcgacgatgaccacaacccatggtcaccattcatgcaatccgaagctcaaatttccccgctacgacagcaagtccaatcccttgcattgattgacatatgggaagaccgtaaaatatttgatacccaggcacaaagcctgaaagatgattttttcaggaggttaaaggacattagaaaccagttgaaaaatacaggcagtgagcagctggagaaggttgtctctagctacaaacatgtcctgaatgctcctatggatgaggatactctgatgcgaaaatgccaagcagctcttatcaattttgatgaactcaataaaacatatggaaataactccattttaggtagtagcaatcgttcgggctttatgcaggagctgcaggaacaacatagcattctcagaaactccatcgaacaacttaaagtgtcagaatcactcagggccaccctgatttttcatttgaaggaagcgttgaatgagcaggagctcaaagtggaacacctcagaagccagcttcaggaaagatatatcctgtcatggtgcttc

SEQ ID NO: 217884 - DNA, 2004 bp, Zea Mays
atggcggcggccggtcactgctactaccatgacgactatggcgacgatgaccacaacccatggtcaccattcatgcaatccgaagctcaaatttccccgctacgacagcaagtccaatcccttgcattgattgacatatgggaagaccgtaaaatatttgatacccaggcacaaagcctgaaagatgattttttcaggaggttaaaggacattagaaaccagttgaaaaatacaggcagtgagcagctggagaaggttgtctctagctacaaacatgtcctgaatgctcctatggatgaggatactctgatgcgaaaatgccaagcagctcttatcaattttgatgaactcaataaaacatatggaaataactccattttaggagctgcaggaacaacatagcattctcagaaactccatcgaacaacttaaagtgtcagaatcactcagggccaccctgatttttcatttgaaggaagcgttgaatgagcaggagctcaaagtggaacacctcagaagccagcttcaggcagctcagccccgattcaagagagcttctgagctctgcgtggggcttggaagcaacatggaaaggcgtcagccatcaaatcaagggcttaagaggtccagtctctccgatccacttagcactgttgctccagaagctgtgaaatctcttcaaaagggacaatcaagtgcagtgctgtattcacaggagggaaatggtgttgagcacagcgtgacagagacaaagcttgctgcaggtgctgcttcagatgatatacgtggtggtgctttgtcttcacgagtcaatgggggcaacactatgctgaaaatagaagagcacacttctggtaacaagaggcagaagctagaggatgacgcacatatttctcagcctcggtcagagtcaccgccgccgccgccacccccattccctcatcctgatacatttcaaccgcctccgccaccacctgagtatcctcgatcgccagatcctagcccaccaccgccacggacttcactgccaccccatataatccccccaccgccgccgccaccacccgcaatgccactccatatgttctcacatctaccacctccagctggtacatttgtaccttttcctgctggaccacctggcccaatgtattgcacttatccatcttttactcctgttgtcaactttcccatgaccagcccacctggtttccgtaatctaaccccgcctccatcttttcgaggattagctggtacattctatggccctcggttccccaccgcgcccccaccagcagacaggaaataagagtagtaacttacctgcagacttacagtgccagcagctttggcaagtatcataccagtttttttctgtttcaacagaggatacaaactcgtggggatgcgtcaccatgtgttgtagagctcaggaaactgttctattgttgtacattcagccagtcagcgtgcaacagtcaattttctgaactagttctggtcttggtcccagagtagaaagtgtagagcctgtacatgtcggctgctagagggaatttggaattccgagagcccggacccggagcaaatggctgcgtcagtttaatgatcgactgatccagtagttcctggtctaggcggtggagtaaaaactgtagattccgacagcttagggagaagatatggaacccaatagccgaagacagatgttgtagcatgacatgttgtaactcatcacagttgtgctcttcgctagatcatccgagaacacgtagatgttcttgtgatgtcttgagcgtgtaatcctgctgtttggtgtaagatatggcttcagctgctgtcgatggtcgaatctcttgctctgtttttaattacccttttttgctctcggctattctagcgccaataccttttgcgtctactttcgcatgtgttcccaaggaatttagtggtctgtcttggtttccatgtgtacaggaaagatatatcctgtcatggtgcttc

SEQ ID NO: 217885 - DNA, 3657 bp, Zea Mays
cacggcgagggcccccggtaggccgggacacaggaccttgacgcgagtacacgacacagctgaaggctgcgctcccctcgacccctcctccccttcgctccccagctccacaccaactcgctcaccgcctgcccgcctcgccggccaagccaagcgacccccttctcatcccctctctcgctgtcgatgggccctgcggcgctcctctgctccggccctccccgcaattaatcctcggcgtccgtgctctccccactctccgcgcacgccccgcccgtgagtcgtgatctcgccgtctccctcactcccatcctctgcctcaccgcacgagccccgtgcggtggcggtggtaaatggcgagcagcggggtgaggaacggggtggggtccaggatgagcgcgaagccggaccggcagggcgccggcgccacgcccaagacggccgcggggaagcaccgcctctcctcggcggcggcggggggcggcgcgtaccggcggaccagctcgggcccgctccacgcggcggcgggcggccgcgcggcgtcggatggagtttctagtagagtaagggttgctgtaaggcttaggcctaggaatgcagaagagttggtggcagatgcagattttggtgattgtgttgaacttcagccagagctcaaaaggttaaagcttcgtaaaaataattgggagtcagaaacatacgaattcgatgaactgctcactgagttttcttcacaaaagcgagtgtatgaagttgttgcaaaaccagttgtggagagtgttatggagggatataatggtacagttatggcatatggccagactggtactgggaaaacttttactctgggaagacttggtgaagaagacaccgctgctaggggaatcatggttcgtgcaatggaggatattctagcagacataacacctgggactgattctgtctcagtatcatatcttcagttgtacatggagatgatacaagatctccttgatcctgtaaatgataatatagccattgtagaagacccaaggactggggatgtttcattgcctggagccacagtagttgaagttagagatcaaaaaagctttgtggaccttctaagggtgggtgaggctcaccgtgttgctgcaaatacaaagttaaacactgagtcatctcgaagtcatgcgatcctcatggtgaatgtcaggaggtctgtaaaaggtagaactgaaatggatgtcagcatttctggtgaaaatgggcattcattgtccatgatggggtctttgagaccacctgttgttaggaaaagtaagcttgtagttgtcgacttggctggatcagagcgcatagacaagtcaggaagcgagggtcatacgttagaagaggcaaagtctatcaacttgtccttaagtgctctgggaaaatgcatcaatgcgcttgctgaaagcagtcctcatgtacctgttcgtgattctaagcttacaagattgcttaaagattcatttggaggtactgcaagaacatcattggttgtaacaattggtccatctccaagacatcggggggaaactaccagtacaataatgtttggacaaagagcaatgaaagttgagaacatggtgaaattgaaggaagagttcgattacaagagtttatgtaggagacttgatattgagctggataaattaattgcagaaaatgaaaggcaaaggaagtattttgacgatgaagttgagagaataagagatgaagctcagtgccgcattgctgaggccgaaagggaatgcaaaatcacattagagaatgagaaaacgaagtgccatcaagaatacttagactcaatcagaatactggaggagaagtggaaagtacatcaacaatcacccaagaaacaaaatgaagaggccgagtctacatccaatgataccagagaagtgcataacttactgcagaatgagaaaatgctacgtcaatcggctgaagatgaggccagtgacctcaagaatcaagtatcacactggaaaaaactggaggctacagctacagctgaggtagtaaaactacggaaaatgctagatactgaagctagccagaaagagaaacttgaagcagaaatagatattttgagaagtcagttattgcagatgagtatggaagcagatgagacagggagtcttgataaaggaaatggaccaggaaaaatatttcctggtttagattcattggtgtctcagactcgaagctcacaattcagagagcagagcaatggaccaaagcaaccaattgccaaactctttgaacaagttgggttacaaaagatattgtcattgctcgaatctgaagaacctgatgtccgcgttcatgcagtgaaagttgttgcaaatctggcagctgaagaggcaaatcaggaaaagattgtagaagcaggtggcctcacttccctccttatgctacttaggagctctgaggatgagacaattcgtagagtagcagcaggagcaattgctaatcttgcaatgaatgaaacaaatcaagatcttatcatggcagaaggaggtgtaaccttgttgtctatgacagcatctgatgcagaggatccacaaactcttagaatggtggctggagcaatagctaacctttgtggcaatgacaaactgcaaatacggttgaggggagaaggtggaatcaaagcattgcttgggatggttaggtgtgggcaccctgatgtccttgctcaagttgcacgtggcattgcaaattttgcaaaatgtgaatctagagcagctactcaaggaaataaggtgggaaaatcactattaatcgacgatggatcgctcccttggattgtaaaaaatgccaataacgaagctgccccaattaggcggcacatagagctcgcactgtgtcatttggcacagcatgaagtaaattcgaacgacattatcaatgaaggagccctatgggagcttgtacggatttcaagggactgttctcgagaagatataaggaagttggcataccggacactgacatccagccccactcttcaagcggagatgaggagactgggaataaaactgtgatgacagagcaacaaagtgcagctggggctggcactatgaagttccatttctcgtgcactttatagaggtacccgttgctctgagtgctggtaatcgacttacctggtttcggcaggcaggcatacacgggcaccacaccgactaatcacaagaggcagtggagcaactttctcctcgagagttcatttttctttgttctgaggggggcagttgaaagcctggacaacactagcaattcatttatttgtaatgatcctagcatagcagatgttgttacctacccaatgcagcgtttgtaatttttttgctgtaaaaatatcaaaggcagaaaaaagtactttcgcagtatacctgttttccgtgaacactagaaagtttttttgtttttgttttattcatatactgcagacgagtcatgtttgctagccgtgattttcttgctttcttaatgcgcgttgacgctttcgtttcttttaccatgtatgctctcagataatctttgtgaggcacaactttttagaatgataagcgatattagttttttttataaattgttaaagacagctgtggcggtctggctgga

SEQ ID NO: 217886 - DNA, 3649 bp, Zea Mays
cacggcgagggcccccggtaggccgggacacaggaccttgacgcgagtacacgacacagctgaaggctgcgctcccctcgacccctcctccccttcgctccccagctccacaccaactcgctcaccgcctgcccgcctcgccggccaagccaagcgacccccttctcatcccctctctcgctgtcgatgggccctgcggcgctcctctgctccggccctccccgcaattaatcctcggcgtccgtgctctccccactctccgcgcacgccccgcccgtgagtcgtgatctcgccgtctccctcactcccatcctctgcctcaccgcacgagccccgtgcggtggcggtggtaaatggcgagcagcggggtgaggaacggggtggggtccaggatgagcgcgaagccggaccggcagggcgccggcgccacgcccaagacggccgcggggaagcaccgcctctcctcggcggcggcggggggcggcgcgtaccggcggaccagctcgggcccgctccacgcggcggcgggcggccgcgcggcgtcggatggagtttctagtagagtaagggttgctgtaaggcttaggcctaggaatgcagaagagttggtggcagatgcagattttggtgattgtgttgaacttcagccagaggttaaagcttcgtaaaaataattgggagtcagaaacatacgaattcgatgaactgctcactgagttttcttcacaaaagcgagtgtatgaagttgttgcaaaaccagttgtggagagtgttatggagggatataatggtacagttatggcatatggccagactggtactgggaaaacttttactctgggaagacttggtgaagaagacaccgctgctaggggaatcatggttcgtgcaatggaggatattctagcagacataacacctgggactgattctgtctcagtatcatatcttcagttgtacatggagatgatacaagatctccttgatcctgtaaatgataatatagccattgtagaagacccaaggactggggatgtttcattgcctggagccacagtagttgaagttagagatcaaaaaagctttgtggaccttctaagggtgggtgaggctcaccgtgttgctgcaaatacaaagttaaacactgagtcatctcgaagtcatgcgatcctcatggtgaatgtcaggaggtctgtaaaaggtagaactgaaatggatgtcagcatttctggtgaaaatgggcattcattgtccatgatggggtctttgagaccacctgttgttaggaaaagtaagcttgtagttgtcgacttggctggatcagagcgcatagacaagtcaggaagcgagggtcatacgttagaagaggcaaagtctatcaacttgtccttaagtgctctgggaaaatgcatcaatgcgcttgctgaaagcagtcctcatgtacctgttcgtgattctaagcttacaagattgcttaaagattcatttggaggtactgcaagaacatcattggttgtaacaattggtccatctccaagacatcggggggaaactaccagtacaataatgtttggacaaagagcaatgaaagttgagaacatggtgaaattgaaggaagagttcgattacaagagtttatgtaggagacttgatattgagctggataaattaattgcagaaaatgaaaggcaaaggaagtattttgacgatgaagttgagagaataagagatgaagctcagtgccgcattgctgaggccgaaagggaatgcaaaatcacattagagaatgagaaaacgaagtgccatcaagaatacttagactcaatcagaatactggaggagaagtggaaagtacatcaacaatcacccaagaaacaaaatgaagaggccgagtctacatccaatgataccagagaagtgcataacttactgcagaatgagaaaatgctacgtcaatcggctgaagatgaggccagtgacctcaagaatcaagtatcacactggaaaaaactggaggctacagctacagctgaggtagtaaaactacggaaaatgctagatactgaagctagccagaaagagaaacttgaagcagaaatagatattttgagaagtcagttattgcagatgagtatggaagcagatgagacagggagtcttgataaaggaaatggaccaggaaaaatatttcctggtttagattcattggtgtctcagactcgaagctcacaattcagagagcagagcaatggaccaaagcaaccaattgccaaactctttgaacaagttgggttacaaaagatattgtcattgctcgaatctgaagaacctgatgtccgcgttcatgcagtgaaagttgttgcaaatctggcagctgaagaggcaaatcaggaaaagattgtagaagcaggtggcctcacttccctccttatgctacttaggagctctgaggatgagacaattcgtagagtagcagcaggagcaattgctaatcttgcaatgaatgaaacaaatcaagatcttatcatggcagaaggaggtgtaaccttgttgtctatgacagcatctgatgcagaggatccacaaactcttagaatggtggctggagcaatagctaacctttgtggcaatgacaaactgcaaatacggttgaggggagaaggtggaatcaaagcattgcttgggatggttaggtgtgggcaccctgatgtccttgctcaagttgcacgtggcattgcaaattttgcaaaatgtgaatctagagcagctactcaaggaaataaggtgggaaaatcactattaatcgacgatggatcgctcccttggattgtaaaaaatgccaataacgaagctgccccaattaggcggcacatagagctcgcactgtgtcatttggcacagcatgaagtaaattcgaacgacattatcaatgaaggagccctatgggagcttgtacggatttcaagggactgttctcgagaagatataaggaagttggcataccggacactgacatccagccccactcttcaagcggagatgaggagactgggaataaaactgtgatgacagagcaacaaagtgcagctggggctggcactatgaagttccatttctcgtgcactttatagaggtacccgttgctctgagtgctggtaatcgacttacctggtttcggcaggcaggcatacacgggcaccacaccgactaatcacaagaggcagtggagcaactttctcctcgagagttcatttttctttgttctgaggggggcagttgaaagcctggacaacactagcaattcatttatttgtaatgatcctagcatagcagatgttgttacctacccaatgcagcgtttgtaatttttttgctgtaaaaatatcaaaggcagaaaaaagtactttcgcagtatacctgttttccgtgaacactagaaagtttttttgtttttgttttattcatatactgcagacgagtcatgtttgctagccgtgattttcttgctttcttaatgcgcgttgacgctttcgtttcttttaccatgtatgctctcagataatctttgtgaggcacaactttttagaatgataagcgatattagttttttttataaattgttaaagacagctgtggcggtctggctgga

SEQ ID NO: 217887 - DNA, 3543 bp, Zea Mays
gtaggccgggacacaggaccttgacgcgagtacacgacacagctgaaggctgcgctcccctcgacccctcctccccttcgctccccagctccacaccaactcgctcaccgcctgcccgcctcgccggccaagccaagcgacccccttctcatcccctctctcgctgtcgatgggccctgcggcgctcctctgctccggccctccccgcaattaatcctcggcgtccgtgctctccccactctccgcgcacgccccgcccgtgagtcgtgatctcgccgtctccctcactcccatcctctgcctcaccgcacgagccccgtgcggtggcggtggtaaatggcgagcagcggggtgaggaacggggtggggtccaggatgagcgcgaagccggaccggcagggcgccggcgccacgcccaagacggccgcggggaagcaccgcctctcctcggcggcggcggggggcggcgcgtaccggcggaccagctcgggcccgctccacgcggcggcgggcggccgcgcggcgtcggatggagtttctagtagagtaagggttgctgtaaggcttaggcctaggaatgcagaagagttggtggcagatgcagattttggtgattgtgttgaacttcagccagagctcaaaaggttaaagcttcgtaaaaataattgggagtcagaaacatacgaattcgatgaactgctcactgagttttcttcacaaaagcgagtgtatgaagttgttgcaaaaccagttgtggagagtgttatggagggatataatggtacagttatggcatatggccagactggtactgggaaaacttttactctgggaagacttggtgaagaagacaccgctgctaggggaatcatggttcgtgcaatggaggatattctagcagacataacacctgggactgattctgtctcagtatcatatcttcagttgtacatggagatgatacaagatctccttgatcctgtaaatgataatatagccattgtagaagacccaaggactggggatgtttcattgcctggagccacagtagttgaagttagagatcaaaaaagctttgtggaccttctaagggtgggtgaggctcaccgtgttgctgcaaatacaaagttaaacactgagtcatctcgaagtcatgcgatcctcatggtgaatgtcaggaggtctgtaaaaggtagaactgaaatggatgtcagcatttctggtgaaaatgggcattcattgtccatgatggggtctttgagaccacctgttgttaggaaaagtaagcttgtagttgtcgacttggctggatcagagcgcatagacaagtcaggaagcgagggtcatacgttagaagaggcaaagtctatcaacttgtccttaagtgctctgggaaaatgcatcaatgcgcttgctgaaagcagtcctcatgtacctgttcgtgattctaagcttacaagattgcttaaagattcatttggaggtactgcaagaacatcattggttgtaacaattggtccatctccaagacatcggggggaaactaccagtacaataatgtttggacaaagaaaaatgaaaggcaaaggaagtattttgacgatgaagttgagagaataagagatgaagctcagtgccgcattgctgaggccgaaagggaatgcaaaatcacattagagaatgagaaaacgaagtgccatcaagaatacttagactcaatcagaatactggaggagaagtggaaagtacatcaacaatcacccaagaaacaaaatgaagaggccgagtctacatccaatgataccagagaagtgcataacttactgcagaatgagaaaatgctacgtcaatcggctgaagatgaggccagtgacctcaagaatcaagtatcacactggaaaaaactggaggctacagctacagctgaggtagtaaaactacggaaaatgctagatactgaagctagccagaaagagaaacttgaagcagaaatagatattttgagaagtcagttattgcagatgagtatggaagcagatgagacagggagtcttgataaaggaaatggaccaggaaaaatatttcctggtttagattcattggtgtctcagactcgaagctcacaattcagagagcagagcaatggaccaaagcaaccaattgccaaactctttgaacaagttgggttacaaaagatattgtcattgctcgaatctgaagaacctgatgtccgcgttcatgcagtgaaagttgttgcaaatctggcagctgaagaggcaaatcaggaaaagattgtagaagcaggtggcctcacttccctccttatgctacttaggagctctgaggatgagacaattcgtagagtagcagcaggagcaattgctaatcttgcaatgaatgaaacaaatcaagatcttatcatggcagaaggaggtgtaaccttgttgtctatgacagcatctgatgcagaggatccacaaactcttagaatggtggctggagcaatagctaacctttgtggcaatgacaaactgcaaatacggttgaggggagaaggtggaatcaaagcattgcttgggatggttaggtgtgggcaccctgatgtccttgctcaagttgcacgtggcattgcaaattttgcaaaatgtgaatctagagcagctactcaaggaaataaggtgggaaaatcactattaatcgacgatggatcgctcccttggattgtaaaaaatgccaataacgaagctgccccaattaggcggcacatagagctcgcactgtgtcatttggcacagcatgaagtaaattcgaacgacattatcaatgaaggagccctatgggagcttgtacggatttcaagggactgttctcgagaagatataaggaagttggcataccggacactgacatccagccccactcttcaagcggagatgaggagactgggaataaaactgtgatgacagagcaacaaagtgcagctggggctggcactatgaagttccatttctcgtgcactttatagaggtacccgttgctctgagtgctggtaatcgacttacctggtttcggcaggcaggcatacacgggcaccacaccgactaatcacaagaggcagtggagcaactttctcctcgagagttcatttttctttgttctgaggggggcagttgaaagcctggacaacactagcaattcatttatttgtaatgatcctagcatagcagatgttgttacctacccaatgcagcgtttgtaatttttttgctgtaaaaatatcaaaggcagaaaaaagtactttcgcagtatacctgttttccgtgaacactagaaagtttttttgtttttgttttattcatatactgcagacgagtcatgtttgctagccgtgattttcttgctttcttaatgcgcgttgacgctttcgtttcttttaccatgtatgctctcagataatctttgtgaggcacaactttttagaatgataagcgatattagttttttttataaattgttaaagacagctgtggcggtctggctgga

SEQ ID NO: 217888 - DNA, 2957 bp, Zea Mays
cctaattctctacatggtatcacaattctggccctaacctggctagctggctcctccctttcgctgtcgttggcccttgccctagggcgtcgacaacctctccctccctccctgctatatctctggtcgaagccatcaatctcctctcctgggtattgatcgccgccgccgccgccgccgctcctggttgtcgtcacccttgttttgatggcgcctcccattgactcatcccacaactccattctagatttctcagtcatcctccttcgtctttcctgcccttaggctatctccagcagcttacccatctccatccccatattcaaactccactttgcgaacaatgcggtctacagtgcaaaacaatgttttaggtgaccatatgggtgaactactggagacggtcttatacatcaccacagaatgataaagcagaccgtctcattcgctccctggacaatgtctgtcgtatcctcctgatccatgctcacatgtcaacccatactaggtcgagattgtccttactgctacctatctcctcaaaggcgctcctacttggtcatcggtaactctgttccttttgagccttcacaccgccacctacttgctcaatcgcctcccgattaaggcgagtcatgctcccacaccccactttgccctctttcatgccactccatcctacgaccatcttcgcatcttcgtcctactattctgtactaaaaagaatcttgtaataactttaggaaacaacatgtataaaacttttgattggttctcctgaagtttgacagcgtcatgaggtactgcaagaacatcattggttgtaacaattggtccatctccaagacatcggggggaaactaccagtacaataatgtttggacaaagagcaatgaaagttgagaacatggtgaaattgaaggaagagttcgattacaagagtttatgtaggagacttgatattgagctggataaattaattgcagaaaatgaaaggcaaaggaagtattttgacgatgaagttgagagaataagagatgaagctcagtgccgcattgctgaggccgaaagggaatgcaaaatcacattagagaatgagaaaacgaagtgccatcaagaatacttagactcaatcagaatactggaggagaagtggaaagtacatcaacaatcacccaagaaacaaaatgaagaggccgagtctacatccaatgataccagagaagtgcataacttactgcagaatgagaaaatgctacgtcaatcggctgaagatgaggccagtgacctcaagaatcaagtatcacactggaaaaaactggaggctacagctacagctgaggtagtaaaactacggaaaatgctagatactgaagctagccagaaagagaaacttgaagcagaaatagatattttgagaagtcagttattgcagatgagtatggaagcagatgagacagggagtcttgataaaggaaatggaccaggaaaaatatttcctggtttagattcattggtgtctcagactcgaagctcacaattcagagagcagagcaatggaccaaagcaaccaattgccaaactctttgaacaagttgggttacaaaagatattgtcattgctcgaatctgaagaacctgatgtccgcgttcatgcagtgaaagttgttgcaaatctggcagctgaagaggcaaatcaggaaaagattgtagaagcaggtggcctcacttccctccttatgctacttaggagctctgaggatgagacaattcgtagagtagcagcaggagcaattgctaatcttgcaatgaatgaaacaaatcaagatcttatcatggcagaaggaggtgtaaccttgttgtctatgacagcatctgatgcagaggatccacaaactcttagaatggtggctggagcaatagctaacctttgtggcaatgacaaactgcaaatacggttgaggggagaaggtggaatcaaagcattgcttgggatggttaggtgtgggcaccctgatgtccttgctcaagttgcacgtggcattgcaaattttgcaaaatgtgaatctagagcagctactcaaggaaataaggtgggaaaatcactattaatcgacgatggatcgctcccttggattgtaaaaaatgccaataacgaagctgccccaattaggcggcacatagagctcgcactgtgtcatttggcacagcatgaagtaaattcgaacgacattatcaatgaaggagccctatgggagcttgtacggatttcaagggactgttctcgagaagatataaggaagttggcataccggacactgacatccagccccactcttcaagcggagatgaggagactgggaataaaactgtgatgacagagcaacaaagtgcagctggggctggcactatgaagttccatttctcgtgcactttatagaggtacccgttgctctgagtgctggtaatcgacttacctggtttcggcaggcaggcatacacgggcaccacaccgactaatcacaagaggcagtggagcaactttctcctcgagagttcatttttctttgttctgaggggggcagttgaaagcctggacaacactagcaattcatttatttgtaatgatcctagcatagcagatgttgttacctacccaatgcagcgtttgtaatttttttgctgtaaaaatatcaaaggcagaaaaaagtactttcgcagtatacctgttttccgtgaacactagaaagtttttttgtttttgttttattcatatactgcagacgagtcatgtttgctagccgtgattttcttgctttcttaatgcgcgttgacgctttcgtttcttttaccatgtatgctctcagataatctttgtgaggcacaactttttagaatgataagcgatattagttttttttataaattgttaaagacagctgtggcggtctggctgga

SEQ ID NO: 217889 - DNA, 2955 bp, Zea Mays
ttctggccctaacctggctagctggctcctccctttcgctgtcgttggcccttgccctagggcgtcgacaacctctccctccctccctgctatatctctggtcgaagccatcaatctcctctcctgggtattgatcgccgccgccgccgccgccgctcctggttgtcgtcacccttgttttgatggcgcctcccattgactcatcccacaactccattctagatttctcagtcatcctccttcgtctttcctgcccttaggctatctccagcagcttacccatctccatccccatattcaaactccactttgcgaacaatgcggtctacagtgcaaaacaatgttttaggtgaccatatgggtgaactactggagacggtcttatacatcaccacagaatgataaagcagaccgtctcattcgctccctggacaatgtctgtcgtatcctcctgatccatgctcacatgtcaacccatactaggtcgagattgtccttactgctacctatctcctcaaaggcgctcctacttggtcatcggtaactctgttccttttgagccttcacaccgccacctacttgctcaatcgcctcccgattaaggcgagtcatgctcccacaccccactttgccctctttcatgccactccatcctacgaccatcttcgcatcttcgtcctactattctgtactaaaaagaatcttgtaataactttaggaaacaacatgtataaaacttttgattggttctcctgaagtttgacagcgtcatgaggtcaacctggtgttaactcataggtactgcaagaacatcattggttgtaacaattggtccatctccaagacatcggggggaaactaccagtacaataatgtttggacaaagagcaatgaaagttgagaacatggtgaaattgaaggaagagttcgattacaagagtttatgtaggagacttgatattgagctggataaattaattgcagaaaatgaaaggcaaaggaagtattttgacgatgaagttgagagaataagagatgaagctcagtgccgcattgctgaggccgaaagggaatgcaaaatcacattagagaatgagaaaacgaagtgccatcaagaatacttagactcaatcagaatactggaggagaagtggaaagtacatcaacaatcacccaagaaacaaaatgaagaggccgagtctacatccaatgataccagagaagtgcataacttactgcagaatgagaaaatgctacgtcaatcggctgaagatgaggccagtgacctcaagaatcaagtatcacactggaaaaaactggaggctacagctacagctgaggtagtaaaactacggaaaatgctagatactgaagctagccagaaagagaaacttgaagcagaaatagatattttgagaagtcagttattgcagatgagtatggaagcagatgagacagggagtcttgataaaggaaatggaccaggaaaaatatttcctggtttagattcattggtgtctcagactcgaagctcacaattcagagagcagagcaatggaccaaagcaaccaattgccaaactctttgaacaagttgggttacaaaagatattgtcattgctcgaatctgaagaacctgatgtccgcgttcatgcagtgaaagttgttgcaaatctggcagctgaagaggcaaatcaggaaaagattgtagaagcaggtggcctcacttccctccttatgctacttaggagctctgaggatgagacaattcgtagagtagcagcaggagcaattgctaatcttgcaatgaatgaaacaaatcaagatcttatcatggcagaaggaggtgtaaccttgttgtctatgacagcatctgatgcagaggatccacaaactcttagaatggtggctggagcaatagctaacctttgtggcaatgacaaactgcaaatacggttgaggggagaaggtggaatcaaagcattgcttgggatggttaggtgtgggcaccctgatgtccttgctcaagttgcacgtggcattgcaaattttgcaaaatgtgaatctagagcagctactcaaggaaataaggtgggaaaatcactattaatcgacgatggatcgctcccttggattgtaaaaaatgccaataacgaagctgccccaattaggcggcacatagagctcgcactgtgtcatttggcacagcatgaagtaaattcgaacgacattatcaatgaaggagccctatgggagcttgtacggatttcaagggactgttctcgagaagatataaggaagttggcataccggacactgacatccagccccactcttcaagcggagatgaggagactgggaataaaactgtgatgacagagcaacaaagtgcagctggggctggcactatgaagttccatttctcgtgcactttatagaggtacccgttgctctgagtgctggtaatcgacttacctggtttcggcaggcaggcatacacgggcaccacaccgactaatcacaagaggcagtggagcaactttctcctcgagagttcatttttctttgttctgaggggggcagttgaaagcctggacaacactagcaattcatttatttgtaatgatcctagcatagcagatgttgttacctacccaatgcagcgtttgtaatttttttgctgtaaaaatatcaaaggcagaaaaaagtactttcgcagtatacctgttttccgtgaacactagaaagtttttttgtttttgttttattcatatactgcagacgagtcatgtttgctagccgtgattttcttgctttcttaatgcgcgttgacgctttcgtttcttttaccatgtatgctctcagataatctttgtgaggcacaactttttagaatgataagcgatattagttttttttataaattgttaaagacagctgtggcggtctggctgga

SEQ ID NO: 217890 - DNA, 2550 bp, Zea Mays
cacaactccattctagatttctcagtcatcctccttcgtctttcctgcccttaggctatctccagcagcttacccatctccatccccatattcaaactccactttgcgaacaatgcggtctacagtgcaaaacaatgttttaggtgaccatatgggtgaactactggagacggtcttatacatcaccacagaatgataaagcagaccgtctcattcgctccctggacaatgtctgtcgtatcctcctgatccatgctcacatgtcaacccatactaggtcgagattgtccttactgctacctatctcctcaaaggcgctcctacttggtcatcggtaactctgttccttttgagccttcacaccgccacctacttgctcaatcgcctcccgattaaggaaacaacatgtataaaacttttgattggttctcctgaagtttgacagcgtcatgaggtactgcaagaacatcattggttgtaacaattggtccatctccaagacatcggggggaaactaccagtacaataatgtttggacaaagagcaatgaaagttgagaacatggtgaaattgaaggaagagttcgattacaagagtttatgtaggagacttgatattgagctggataaattaattgcagaaaatgaaaggcaaaggaagtattttgacgatgaagttgagagaataagagatgaagctcagtgccgcattgctgaggccgaaagggaatgcaaaatcacattagagaatgagaaaacgaagtgccatcaagaatacttagactcaatcagaatactggaggagaagtggaaagtacatcaacaatcacccaagaaacaaaatgaagaggccgagtctacatccaatgataccagagaagtgcataacttactgcagaatgagaaaatgctacgtcaatcggctgaagatgaggccagtgacctcaagaatcaagtatcacactggaaaaaactggaggctacagctacagctgaggtagtaaaactacggaaaatgctagatactgaagctagccagaaagagaaacttgaagcagaaatagatattttgagaagtcagttattgcagatgagtatggaagcagatgagacagggagtcttgataaaggaaatggaccaggaaaaatatttcctggtttagattcattggtgtctcagactcgaagctcacaattcagagagcagagcaatggaccaaagcaaccaattgccaaactctttgaacaagttgggttacaaaagatattgtcattgctcgaatctgaagaacctgatgtccgcgttcatgcagtgaaagttgttgcaaatctggcagctgaaggagctctgaggatgagacaattcgtagagtagcagcaggagcaattgctaatcttgcaatgaatgaaacaaatcaagatcttatcatggcagaaggaggtgtaaccttgttgtctatgacagcatctgatgcagaggatccacaaactcttagaatggtggctggagcaatagctaacctttgtggcaatgacaaactgcaaatacggttgaggggagaaggtggaatcaaagcattgcttgggatggttaggtgtgggcaccctgatgtccttgctcaagttgcacgtggcattgcaaattttgcaaaatgtgaatctagagcagctactcaaggaaataaggtgggaaaatcactattaatcgacgatggatcgctcccttggattgtaaaaaatgccaataacgaagctgccccaattaggcggcacatagagctcgcactgtgtcatttggcacagcatgaagtaaattcgaacgacattatcaatgaaggagccctatgggagcttgtacggatttcaagggactgttctcgagaagatataaggaagttggcataccggacactgacatccagccccactcttcaagcggagatgaggagactgggaataaaactgtgatgacagagcaacaaagtgcagctggggctggcactatgaagttccatttctcgtgcactttatagaggtacccgttgctctgagtgctggtaatcgacttacctggtttcggcaggcaggcatacacgggcaccacaccgactaatcacaagaggcagtggagcaactttctcctcgagagttcatttttctttgttctgaggggggcagttgaaagcctggacaacactagcaattcatttatttgtaatgatcctagcatagcagatgttgttacctacccaatgcagcgtttgtaatttttttgctgtaaaaatatcaaaggcagaaaaaagtactttcgcagtatacctgttttccgtgaacactagaaagtttttttgtttttgttttattcatatactgcagacgagtcatgtttgctagccgtgattttcttgctttcttaatgcgcgttgacgctttcgtttcttttaccatgtatgctctcagataatctttgtgaggcacaactttttagaatgataagcgatattagttttttttataaattgttaaagacagctgtggcggtctggctgga

SEQ ID NO: 217891 - DNA, 1255 bp, Zea Mays
ggacgtgaaacctccagccatggccatacccataccacaggtgtgcacccctctcccctcgaacttctctcccccacgctatccctcccagccttccgagagccgtcgtcgtgagtcgctcgcccatgttccttctccccctccggtgctcatgttccttcccccctccggtcccgcctcatcgtccaatgagacctaggcccctgacctccgcggcggcggatcgggggccggcgacggtgcgcgaggctgcggaggcgatagcggctccccctcctccgacgtcgcatctccactctccccatccttcgtcaccgcggccgcgtctcagactgatggccacccattgggtccaacccaaggtgtacccgctgttcgtgacgatgggtgttgctatgggcatatgcggacttcagctctttcggaacatcaccggcaacctggaagtcagagggtaggcaattgagtgggttggcagagaagctagaaaagaaacaaaggaaggcccaacaagagcaacaacagaaacaagaaaataagtcggaagagaagaaacagaaaccagacgatgagctgtaaagtacttgaattgcagcttcctttgtttttcagcgattttttaccctcgatctactcctgctagcctcctttcagttgcatggatatcagtacagtatgagactccttttgattgaaaagaaagaatgggtaacaaacttttaaggactcggtcaagtgatgacgtggagagaggagatattgaagagggagcatgcggcacatctgaatgctatatcagagtatgaaaggcgggaggagaacatgaatatcactaataaagaaaatgtcaccattggaccatggcgctctaattctatgagatgctagcgagccaacgcaacttgatctcttctcgtgctagccaacacaacttgatctctgcttctaaccatgactgtggaccttcctcccttctcgtgctagccaacacaacttgatctctgcatgtaaatatcttactgcagttcccacgtgcagtggctgctctgatgaagcccactgtaggttaatatggttcttagaattttctagccgcaaattgtgttgtttagttacttggatagctgacgtcttttgatcaccaaaatatgtaattgatttcgtagtgtccaggtccaacatgctaatgctaaattcgtatgtatgaatttgtcgcttattttcgtactgtatatgttatatctccttatctcaa

SEQ ID NO: 217892 - DNA, 1498 bp, Zea Mays
aaaaagcacaccggaaacacaaggcaaaaaagatatccatctcccctccgttctcaccaccgacagccggacacgcctcgtctcgtccccgctcccataaacgcagaggctcacgcagacgcctcgctcccgtgccaacgagccaagcccaaacccaccaccaattcaaccgcgacccagcccaccgccccgcacgccattcccacctcctcccccctcaccactcagatctccccgcgcgcccgcgcgcgagctcgagccatggctgccaagggcggcgccacgccgtcccccggcggcacggggcccgcggcggggaacggccgcctcttcacgctcgtgcgctcccgcgtccagctcgccaagatcgccgcgctcagcctcgtcttctgcggctccgtcgtctccgggaacgtctcgctgcgctacctccccgtctccttcaaccaggccgtcggcgccaccacgcccttctttaccgccgtcttcgcgtacatcatgaccgtcaagcgcgagtcgtggatcacctacctcaccctcgtgcccgtcgttactggagtcatcatcgccagcggcggcgagcctagctttcatctgtttggattcatcatgtgcataggagcaactgcagcaagggcgttgaagacagtactgcaaggaattcttctgtcttctgatggggagaagcttaattctatgaatctgttattgtacatggctccaattgctgttattttcttgcttcctgcaactatctttatggaggataatgttgttggcatcacaattcagcttgcaaagaaggatttcacgattgtttggttgctactgttcaattcttgcttgtcatattttgtcaatttgaccaatttcttggtgaccaaacatactagcgcactgactctacaggttctcggaaatgcaaagggtgccgtggcagtcgtcatctcaatcatgatattcaggaatcctgtgtccataacaggaatgctcggttacactctcacagtttttggcgtcattctttacagtgaatccaaaaagcgcagcaacaagccgtgaccaccctagaagacagtaaatacggccatcatttctttgtcctgccagcgcctagagctaatatatgatgagaaactacaccggtggcgatcacaacaaatccaatgccgtaccgcctcagcaattggacatcaagggtagaagtccaataatacctgtagtattaaattggcatgtgggaggcattttttttaatggcattgatggatagaatatatatattttttgtgttagagaagtgtggctcagactgccagcattgtttagtacgtttagctcttgggatattgcctcttctattcatcggctactgtaacttccattttcttttgttctgaagactacctgtaccagactttgatccaggttccagggcctaattaatatattgacactgaatttaagcacaaatgactgacttttagtgaaactgttg

SEQ ID NO: 217893 - DNA, 4914 bp, Zea Mays
cctgagcgcgcagcgcagcctgtggaccatacactttcacccgccccgacccgtcagtaatcgtgccatgattgcttttcgacctgttcccagggccgatccaagccgtccgtctcctcaccaagcggcccggatccctcctctccggccaccccaaaacacgcccgacgccagcgccaccgaaatcccccaacccatgcagcgcaagcattaccataacctcctcgcatatcggcccgcgctgctgccggaagcagatcggagcagcctcttcggctcttggcgacggatgttgctcgcttcgtttaccacgaccagatctgcgatggcttctgctcgcctcgctcgctacccaccagatcccggcgcctcccccctcgtcgctcaattctgctccgccgcgctgcgatcgatccgctcccagacgacgatcgcccggcgcggatcagcagccgccggggctgctccggcgtcgcgaatggccgcgctcgccgggccgacaagcagcgcagatcgtggggctcgccggcggcaccggcttcggcctcgtcttccgtggggacggcaggcgcgaggcggtgccctgcccgccgcggactgcctctgggagttcgcttccgttacggcacctgccatcctggccgtcggtcgggggctggcgttctcgtgaatcccgtggtgggccgggggcagaagcggtaactcgccgggccagcacctgaagataaatcatgtgaaatgacaccaaatacggtcactaactctactaaagatgtcttggaagctgatggtaaaactttcaataatgaattttccatcaagttagatcagctcggtgatgatcctattaatggccttacaaacattctcgttgaacttatgcaacataatgattcttgttctggggattcaaacggcccgaccagtacatgtaagctgctccaactgaaggaaagcatttccaaggagattgaaaagactgaactccagattgattcattggaaggcgaacttaaatctgtgaatactgaggctgtaactactcttgaaagttctcccacaggggtgacacatacagaaaatctgtcaccttctggtgggacatcaaaggttcctggaagtgccgagatctgtgatacatttgatatgataaaagaaccgggggagctcattgtttctcctaaggtacctgtggtgcaggatgctgatgtcaaaggggtcgatatgatggaggttgaaacagctccagttcgcaatgcaaaaacagttccttcagaagagagtgctgtaactcctggagttgctgagggtaaggcatgtgcagctgctgatcttagctcattgatagcttctgaagaagctgggtctcaaaatgatattgacaatgacaggccgaaaacttctttgtgccatgctgattccatgaaaattaaagttagtgatgaactaccagtgaagcaatggacatactgtgatcatatgtctgatttacacagttctttcacatctgcaaataatgatatagccaaagaaatgaatgaggtgctatttaaatcattgcctgctggtacatctgcccttgatttgttggcatcaagtgatcttcttagccaacggaagattgatttgattgtcaaagaaagacttggagtacgtaaaaccaggctgaggttgaaagagcagattcttacaatgaagttcaaggcatatcgtcacttgtggaaagaggatgtacggctactttctgcaaagaaacagcgattgaagtctaataagcgcattgatcagaataaccgaacatctcaaattggatctcagaggcaacgcttttctaaccgctcacgattagccatgcctgctgggaatttaagtacattctcaactccggaaatgtcagatgttgcaagaaagttgttttcagaatctcaaattaagcgctgcagaaactacttgaaaatgcctgcactgattattgatgagaaagagaaggaacacctgaggtttctgaccaagaatggactggttgtggatcctgttttagttgagaaggaacggatcatgataaatccgtggactcaagacgaaaaggaaatttttatggagatgcttgctaaatttggcaaggatttctccaaaatttccagtttcatcacacataaaactactgcagactgtgtggagttctactacaagcatcataaatcagacagcttccgagaagtgaagaaactgttggaccttcatcaacagctgcctgccagcaattaccttggagcgaaatcaggacagaaatggaatcctgagtcaaatgctgcttctcttgatatgcttggggtagcatcagctgaagcagcccatgaccttgaatatgcaaacaaagtggagaaaatttctgtgaaatccctcatccggactgcatatgggtccaatgtttcatttgtgaccaaaaaatcttctgataaggagtgcattgacaatgtgcctttgcatgagagagaatctgtagcagctgatgtactagcaggcatatgcggcactccttctcctgatggaatgggctcatgcattactagttctgctgatcctggcctgaagatcagcatgaaaagagtggagcatgtcttatcccaagaaaatgacaaaaatgttaatgaggaagaatctctctctgatcaagagtgtgaatttgatccagttgattggaatgatgatgagaagtcaattttcattgaggcaatgaataactacggaaaggatttttctcggatctcgtcttgtgtgaagagcaagtcatatgaacaatgcaaagtgttctttagtaaggctcggaaatcacttggtttggatttgatccatcaaggggcagccgatgttagtatgccagctagtgataccaatggagggaggagcgatactgacgaggcctgtgctgtggaaatggattcagctatctgtaggaagcagtcttgttcaaagattgtgcaagatgtttgtcctactgaaggagccattttagggcctgactctgttttaatctctaagcagacagaaggagatatatcaaataggtgcattgttgatgttaaaattgaggaagatgataaggaagctgataaaaattgcagcaatgttgatgataagaggtccagtgatagtactcatcaagctggccctatcaacatcaattgcccagaaagtacagataagctgcaaggaactgatgatgccgttgaccaagtaaacatgcatagtagtgtcctcaactcttcaaatgagcatgcaatggccatgcactcagaagtgagatccagtttacactctgtagatgtacttcaaacagacaaagctgaaggtactggtactgatcctagccaggtggaagaatgttcacatcatgctgtctacacaccgatgacagctgggaattctggttcctcagctttcttaacttcagatagtggtatcaaggacaatgttcacatctcaaacatgtctggtgcctccactgttagtcctgcattcacttcaaactatcaacattctctgccaggagatatgcccctgtcgaaaccaaagccactagtaacctcccttaccccaaaggatttaatgcctgtgcagttcagttcagttcttcctgatcccactgcatttcgttttgagggcataaagcccaactttgaggacagcagtggcaacaaagtcagcagtgccctaggagctaaagacatttgcaagtacccagcttttaaagacccatctgataatgagcatgacacattgtttcgtaatattgatggttatatgaataatcatctgacaactgaattgccagttttttctcaaagaactgcaagtggcactgtgagtacttcgcagacaaaattccagaatggcaggtccagcagcgtgtgccttccaaacagttctgaggggattcaatggcccaggaaacctgaagaagtaccggaagattctttgaggccttgcgctcgcaatgcaaaaactgagggtggtgagaaacaaaagcgacctggtgatgtcaagttatttgggcagattctcagccatcagccaaccttgccaagttctggctcgttgtgtaatggtagccagagcaagcctccctcaccaaagattgacaaaacatctgtgagattgaccaacaatccaagggatcttgtagttttttcttccaggcctggtgtcagtccacatgtgggtctggaggaaagatcagtgaggagctacggccatctggatggaagcacgatacagcctgagcctctgctggtgatggcgaagtgccagagatccttggccagtgtaccattttactcggctaagaacagcacggttggcgtgtttccagattatcaacaaccttcaatgcagccacatcaattagatcccaagccgctggaaatgttttctgattcgcagaagaggaatgggctggaactcgtctcgggtttcggcggtgctggtatccttgttagcaacgtctcagaccatgtggctgctctcaaggctcggtatggtcccggttctaagataatgggcagtgacgcggatccttggaaagacataggaagcagcaccataccctttggtagcttgacatgtcaacagcggcccagcgccaccgtgggctcgttagaggtgattaccaggtgttttgtcagcagggtttgatgttgtcagtctatggaaattccttattctcagtatcctagtatgatggatggagttttggttgagatttgtccttgcattggccgttgtttcaacttcttctgtcagcatttctacgggtttatcacttgtgcagctgtgtctagatgcatggatgcactgaacattggctggaaggacatcgactgtgtttcctggtcatcctgtcctcgaagtgag

SEQ ID NO: 217894 - DNA, 4906 bp, Zea Mays
cctgagcgcgcagcgcagcctgtggaccatacactttcacccgccccgacccgtcagtaatcgtgccatgattgcttttcgacctgttcccagggccgatccaagccgtccgtctcctcaccaagcggcccggatccctcctctccggccaccccaaaacacgcccgacgccagcgccaccgaaatcccccaacccatgcagcgcaagcattaccataacctcctcgcatatcggcccgcgctgctgccggaagcagatcggagcagcctcttcggctcttggcgacggatgttgctcgcttcgtttaccacgaccagatctgcgatggcttctgctcgcctcgctcgctacccaccagatcccggcgcctcccccctcgtcgctcaattctgctccgccgcgctgcgatcgatccgctcccagacgacgatcgcccggcgcggatcagcagccgccggggctgctccggcgtcgcgaatggccgcgctcgccgggccgacaagcagcgcagatcgtggggctcgccggcggcaccggcttcggcctcgtcttccgtggggacggcaggcgcgaggcggtgccctgcccgccgcggactgcctctgggagttcgcttccgttacggcacctgccatcctggccgtcggtcgggggctggcgttctcgtgaatcccgtggtgggccgggggcagaagcggtaactcgccgggccagtacatgtaagctgctccaactgaaggaaagcatttccaaggagattgaaaagactgaactccagattgattcattggaaggcgaacttaaatctgtgaatactgaggctgtaactactcttgaaagttctcccacaggggtgacacatacagaaaatctgtcaccttctggtgggacatcaaaggttcctggaagtgccgagatctgtgatacatttgatatgataaaagaaccgggggagctcattgtttctcctaaggtacctgtggtgcaggatgctgatgtcaaaggggtcgatatgatggaggttgaaacagctccagttcgcaatgcaaaaacagttccttcagaagagagtgctgtaactcctggagttgctgagggtaaggcatgtgcagctgctgatcttagctcattgatagcttctgaagaagctgggtctcaaaatgatattgacaatgacaggccgaaaacttctttgtgccatgctgattccatgaaaattaaagttagtgatgaactaccagtgaagcaatggacatactgtgatcatatgtctgatttacacagttctttcacatctgcaaataatgatatagccaaagaaatgaatgaggtgctatttaaatcattgcctgctggtacatctgcccttgatttgttggcatcaagtgatcttcttagccaacggaagattgatttgattgtcaaagaaagacttggagtacgtaaaaccaggctgaggttgaaagagcagattcttacaatgaagttcaaggcatatcgtcacttgtggaaagaggatgtacggctactttctgcaaagaaacagcgattgaagtctaataagcgcattgatcagaataaccgaacatctcaaattggatctcagaggcaacgcttttctaaccgctcacgattagccatgcctgctgggaatttaagtacattctcaactccggaaatgtcagatgttgcaagaaagttgttttcagaatctcaaattaagcgctgcagaaactacttgaaaatgcctgcactgattattgatgagaaagagaaggaacacctgaggtttctgaccaagaatggactggttgtggatcctgttttagttgagaaggaacggatcatgataaatccgtggactcaagacgaaaaggaaatttttatggagatgcttgctaaatttggcaaggatttctccaaaatttccagtttcatcacacataaaactactgcagactgtgtggagttctactacaagcatcataaatcagacagcttccgagaagtgaagaaactgttggaccttcatcaacagctgcctgccagcaattaccttggagcgaaatcaggacagaaatggaatcctgagtcaaatgctgcttctcttgatatgcttggggtagcatcagctgaagcagcccatgaccttgaatatgcaaacaaagtggagaaaatttctgtgaaatccctcatccggactgcatatgggtccaatgtttcatttgtgaccaaaaaatcttctgataaggagtgcattgacaatgtgcctttgcatgagagagaatctgtagcagctgatgtactagcaggcatatgcggcactccttctcctgatggaatgggctcatgcattactagttctgctgatcctggcctgaagatcagcatgaaaagagtggagcatgtcttatcccaagaaaatgacaaaaatgttaatgaggaagaatctctctctgatcaagagtgtgaatttgatccagttgattggaatgatgatgagaagtcaattttcattgaggcaatgaataactacggaaaggatttttctcggatctcgtcttgtgtgaagagcaagtcatatgaacaatgcaaagtgttctttagtaaggctcggaaatcacttggtttggatttgatccatcaaggggcagccgatgttagtatgccagctagtgataccaatggagggaggagcgatactgacgaggcctgtgctgtggaaatggattcagctatctgtaggaagcagtcttgttcaaagattgtgcaagatgtttgtcctactgaaggagccattttagggcctgactctgttttaatctctaagcagacagaaggagatatatcaaataggtgcattgttgatgttaaaattgaggaagatgataaggaagctgataaaaattgcagcaatgttgatgataagaggtccagtgatagtactcatcaagctggccctatcaacatcaattgcccagaaagtacagataagctgcaaggaactgatgatgccgttgaccaagtaaacatgcatagtagtgtcctcaactcttcaaatgagcatgcaatggccatgcactcagaagtgagatccagtttacactctgtagatgtacttcaaacagacaaagctgaaggtactggtactgatcctagccaggtggaagaatgttcacatcatgctgtctacacaccgatgacagctgggaattctggttcctcagctttcttaacttcagatagtggtatcaaggacaatgttcacatctcaaacatgtctggtgcctccactgttagtcctgcattcacttcaaactatcaacattctctgccaggagatatgcccctgtcgaaaccaaagccactagtaacctcccttaccccaaaggatttaatgcctgtgcagttcagttcagttcttcctgatcccactgcatttcgttttgagggcataaagcccaactttgaggacagcagtggcaacaaagtcagcagtgccctaggagctaaagacatttgcaagtacccagcttttaaagacccatctgataatgagcatgacacattgtttcgtaatattgatggttatatgaataatcatctgacaactgaattgccagttttttctcaaagaactgcaagtggcactgtgagtacttcgcagacaaaattccagaatggcaggtccagcagcgtgtgccttccaaacagttctgaggggattcaatggcccaggaaacctgaagaagtaccggaagattctttgaggccttgcgctcgcaatgcaaaaactgagggtggtgagaaacaaaagcgacctggtgatgtcaagttatttgggcagattctcagccatcagccaaccttgccaagttctggctcgttgtgtaatggtagccagagcaagcctccctcaccaaagattgacaaaacatctgtgagattgaccaacaatccaagggatcttgtagttttttcttccaggcctggtgtcagtccacatgtgggtctggaggaaagatcagtgaggagctacggccatctggatggaagcacgatacagcctgagcctctgctggtgatggcgaagtgccagagatccttggccagtgtaccattttactcggctaagaacagcacggttggcgtgtttccagattatcaacaaccttcaatgcagccacatcaattagatcccaagccgctggaaatgttttctgattcgcagaagaggaatgggctggaactcgtctcgggtttcggcggtgctggtatccttgttagcaacgtctcagaccatgtggctgctctcaaggctcggtatggtcccggttctaagataatgggcagtgacgcggatccttggaaagacataggaagcaggtagcaccgatagcggtagccagttctagtgcttgttttgttgctcgctgtatcatatttagttcttttttttttctgtaacttgaatgaaatcgtcaaatgaaggaaagtgaatggctttcctgcccatactatttgtaagctttgcagtagttgccgggttatgttatttactggcattaacatttttacctttattgcagcaccataccctttggtagcttgacatgtcaacagcggcccagcgccaccgtgggctcgttagaggtgattaccaggtgttttgtcagcagggtttgatgttgtcagtctatggaaattccttattctcagtatcctagtatgatggatggagttttggttgagatttgtccttgcattggccgttgtttcaacttcttctgtcagcatttctacgggtttatcacttgtgcagctgtgtctagatgcatggatgcactgaacattggctggaaggacatcgactgtgtttcctggtcatcctgtcctcgaagtgag

SEQ ID NO: 217895 - DNA, 5749 bp, Zea Mays
tcgggctcaggcccggccgggcgcatccgctttatcggctcacgttggcgcggcctccgtttcctctcccatttccttgtcctctctccctctccctcttcctccctcacggcctcacctctccagcctcccgctcacctcttccacctctctacgctccccagagggccccagacgcaccgccgacgacccccggcgcgggcgcagatcagcgtgcgccgtgacctgcccgccctgcctccgctgctttcgaccctgggagcgcctgcccgcgccgccggggcgcttcgtatcgccgcttctctttttgttccgcggctcttcctcgccggcaggcggccggctgctgccccgcccacgccgcgtctacgtgtcctcaaggggctgggcgctcttgcctgtcaaacctggtgccgcctccggttggaaaccgtttcttacgggttaggagcaggaggtcagagactccccagagttggcttcgccgcgcgcatgcgatttgcggcggcggccgaagcctcgtacagccgccgctgggacgacgacgacaacggcgacgtggatgcctccgccgccgccggatcgaagggactatctataccgggagggccgcaggcacgacggcggcgtcggcgactcgctcctgccgcctgcccccacgccgccgcgctggcgggactcgccgtaccacccgccgccgccaccgccccttcgggaccccgcgcggccctcgccgcgccgtgcgccgccgttggcctcctcagaaggctactaccgacagggtggcggcgcgtacgaccgttcctaccctgatgacccgccgtctgtctacacgccgtcgcgctcggaccggtactggccggaagacgacgacgggggatacaagggtttcggtcggtatggcagcggtggccgcagggacggccgtgacatgaggggttcataccggaagtccccatacaggggcggctacggaagcgacttctccaggaaccactcagagcagccccctccgccaccacccaggaggtctcccttgaggtcagttgccgttccgatctgctatgaccctccgggcaatagaattaacagaggggacagggacaacctcccacgggtgacaccatggcggagaagggagagcagatctgaagtagccgatgctgatggaccgctttctgttggccaaagtactcggctctctgcttcagggaaggaggcttcagctcagcctctggccgcggcaggtcctcacgggacggaagacgaggcaccaaggaagaaggcacgccttggatggggtcagggtttggccaagtatgagaagcagaaggtgcagggtccttcggatcccgctgaagttgttgctgatgtaagttcaggtgatggcgaacagaagacctcccttgcgcctgcgccttctgttgcatctgtatttcctgctgcaccactgcctgagtctgcaccagcacctcctgctgctcttgcactttcgtctgctcctatgcgatgctcatctccagttactgcaccgccatattgttcctcagcacctgaagataaatcatgtgaaatgacaccaaatacggtcactaactctactaaagatgtcttggaagctgatggtaaaactttcaataatgaattttccatcaagttagatcagctcggtgatgatcctattaatggccttacaaacattctcgttgaacttatgcaacataatgattcttgttctggggattcaaacggcccgaccagtacatgtaagctgctccaactgaaggaaagcatttccaaggagattgaaaagactgaactccagattgattcattggaaggcgaacttaaatctgtgaatactgaggctgtaactactcttgaaagttctcccacaggggtgacacatacagaaaatctgtcaccttctggtgggacatcaaaggttcctggaagtgccgagatctgtgatacatttgatatgataaaagaaccgggggagctcattgtttctcctaaggtacctgtggtgcaggatgctgatgtcaaaggggtcgatatgatggaggttgaaacagctccagttcgcaatgcaaaaacagttccttcagaagagagtgctgtaactcctggagttgctgagggtaaggcatgtgcagctgctgatcttagctcattgatagcttctgaagaagctgggtctcaaaatgatattgacaatgacaggccgaaaacttctttgtgccatgctgattccatgaaaattaaagttagtgatgaactaccagtgaagcaatggacatactgtgatcatatgtctgatttacacagttctttcacatctgcaaataatgatatagccaaagaaatgaatgaggtgctatttaaatcattgcctgctggtacatctgcccttgatttgttggcatcaagtgatcttcttagccaacggaagattgatttgattgtcaaagaaagacttggagtacgtaaaaccaggctgaggttgaaagagcagattcttacaatgaagttcaaggcatatcgtcacttgtggaaagaggatgtacggctactttctgcaaagaaacagcgattgaagtctaataagcgcattgatcagaataaccgaacatctcaaattggatctcagaggcaacgcttttctaaccgctcacgattagccatgcctgctgggaatttaagtacattctcaactccggaaatgtcagatgttgcaagaaagttgttttcagaatctcaaattaagcgctgcagaaactacttgaaaatgcctgcactgattattgatgagaaagagaaggaacacctgaggtttctgaccaagaatggactggttgtggatcctgttttagttgagaaggaacggatcatgataaatccgtggactcaagacgaaaaggaaatttttatggagatgcttgctaaatttggcaaggatttctccaaaatttccagtttcatcacacataaaactactgcagactgtgtggagttctactacaagcatcataaatcagacagcttccgagaagtgaagaaactgttggaccttcatcaacagctgcctgccagcaattaccttggagcgaaatcaggacagaaatggaatcctgagtcaaatgctgcttctcttgatatgcttggggtagcatcagctgaagcagcccatgaccttgaatatgcaaacaaagtggagaaaatttctgtgaaatccctcatccggactgcatatgggtccaatgtttcatttgtgaccaaaaaatcttctgataaggagtgcattgacaatgtgcctttgcatgagagagaatctgtagcagctgatgtactagcaggcatatgcggcactccttctcctgatggaatgggctcatgcattactagttctgctgatcctggcctgaagatcagcatgaaaagagtggagcatgtcttatcccaagaaaatgacaaaaatgttaatgaggaagaatctctctctgatcaagagtgtgaatttgatccagttgattggaatgatgatgagaagtcaattttcattgaggcaatgaataactacggaaaggatttttctcggatctcgtcttgtgtgaagagcaagtcatatgaacaatgcaaagtgttctttagtaaggctcggaaatcacttggtttggatttgatccatcaaggggcagccgatgttagtatgccagctagtgataccaatggagggaggagcgatactgacgaggcctgtgctgtggaaatggattcagctatctgtaggaagcagtcttgttcaaagattgtgcaagatgtttgtcctactgaaggagccattttagggcctgactctgttttaatctctaagcagacagaaggagatatatcaaataggtgcattgttgatgttaaaattgaggaagatgataaggaagctgataaaaattgcagcaatgttgatgataagaggtccagtgatagtactcatcaagctggccctatcaacatcaattgcccagaaagtacagataagctgcaaggaactgatgatgccgttgaccaagtaaacatgcatagtagtgtcctcaactcttcaaatgagcatgcaatggccatgcactcagaagtgagatccagtttacactctgtagatgtacttcaaacagacaaagctgaaggtactggtactgatcctagccaggtggaagaatgttcacatcatgctgtctacacaccgatgacagctgggaattctggttcctcagctttcttaacttcagatagtggtatcaaggacaatgttcacatctcaaacatgtctggtgcctccactgttagtcctgcattcacttcaaactatcaacattctctgccaggagatatgcccctgtcgaaaccaaagccactagtaacctcccttaccccaaaggatttaatgcctgtgcagttcagttcagttcttcctgatcccactgcatttcgttttgagggcataaagcccaactttgaggacagcagtggcaacaaagtcagcagtgccctaggagctaaagacatttgcaagtacccagcttttaaagacccatctgataatgagcatgacacattgtttcgtaatattgatggttatatgaataatcatctgacaactgaattgccagttttttctcaaagaactgcaagtggcactgtgagtacttcgcagacaaaattccagaatggcaggtccagcagcgtgtgccttccaaacagttctgaggggattcaatggcccaggaaacctgaagaagtaccggaagattctttgaggccttgcgctcgcaatgcaaaaactgagggtggtgagaaacaaaagcgacctggtgatgtcaagttatttgggcagattctcagccatcagccaaccttgccaagttctggctcgttgtgtaatggtagccagagcaagcctccctcaccaaagattgacaaaacatctgtgagattgaccaacaatccaagggatcttgtagttttttcttccaggcctggtgtcagtccacatgtgggtctggaggaaagatcagtgaggagctacggccatctggatggaagcacgatacagcctgagcctctgctggtgatggcgaagtgccagagatccttggccagtgtaccattttactcggctaagaacagcacggttggcgtgtttccagattatcaacaaccttcaatgcagccacatcaattagatcccaagccgctggaaatgttttctgattcgcagaagaggaatgggctggaactcgtctcgggtttcggcggtgctggtatccttgttagcaacgtctcagaccatgtggctgctctcaaggctcggtatggtcccggttctaagataatgggcagtgacgcggatccttggaaagacataggaagcagcaccataccctttggtagcttgacatgtcaacagcggcccagcgccaccgtgggctcgttagaggtgattaccaggtgttttgtcagcagggtttgatgttgtcagtctatggaaattccttattctcagtatcctagtatgatggatggagttttggttgagatttgtccttgcattggccgttgtttcaacttcttctgtcagcatttctacgggtttatcacttgtgcagctgtgtctagatgcatggatgcactgaacattggctggaaggacatcgactgtgtttcctggtcatcctgtcctcgaagtgag

SEQ ID NO: 217896 - DNA, 5760 bp, Zea Mays
gcgcatccgctttatcggctcacgttggcgcggcctccgtttcctctcccatttccttgtcctctctccctctccctcttcctccctcacggcctcacctctccagcctcccgctcacctcttccacctctctacgctccccagagggccccagacgcaccgccgacgacccccggcgcgggcgcagatcagcgtgcgccgtgacctgcccgccctgcctccgctgctttcgaccctgggagcgcctgcccgcgccgccggggcgcttcgtatcgccgcttctctttttgttccgcggctcttcctcgccggcaggcggccggctgctgccccgcccacgccgcgtctacgtgtcctcaaggggctgggcgctcttgcctgtcaaacctggtgccgcctccggttggaaaccgtttcttacgggttaggagcaggaggtcagagactccccagagttggcttcgccgcgcgcatgcgatttgcggcggcggccgaagcctcgtacagccgccgctgggacgacgacgacaacggcgacgtggatgcctccgccgccgccggatcgaagggactatctataccgggagggccgcaggcacgacggcggcgtcggcgactcgctcctgccgcctgcccccacgccgccgcgctggcgggactcgccgtaccacccgccgccgccaccgccccttcgggaccccgcgcggccctcgccgcgccgtgcgccgccgttggcctcctcaggctactaccgacagggtggcggcgcgtacgaccgttcctaccctgatgacccgccgtctgtctacacgccgtcgcgctcggaccggtactggccggaagacgacgacgggggatacaagggtttcggtcggtatggcagcggtggccgcagggacggccgtgacatgaggggttcataccggaagtccccatacaggggcggctacggaagcgacttctccaggaaccactcagagcagccccctccgccaccacccaggaggtctcccttgaggtcagttgccgttccgatctgctatgaccctccgggcaatagaattaacagaggggacagggacaacctcccacgggtgacaccatggcggagaagggagagcagatctgaagtagccgatgctgatggaccgctttctgttggccaaagtactcggctctctgcttcagggaaggaggcttcagctcagcctctggccgcggcaggtcctcacgggacggaagacgaggcaccaaggaagaaggcacgccttggatggggtcagggtttggccaagtatgagaagcagaaggtgcagggtccttcggatcccgctgaagttgttgctgatgtaagttcaggtgatggcgaacagaagacctcccttgcgcctgcgccttctgttgcatctgtatttcctgctgcaccactgcctgagtctgcaccagcacctcctgctgctcttgcactttcgtctgctcctatgcgatgctcatctccagttactgcaccgccatattgttcctcagcacctgaagataaatcatgtgaaatgacaccaaatacggtcactaactctactaaagatgtcttggaagctgatggtaaaactttcaataatgaattttccatcaagttagatcagctcggtgatgatcctattaatggccttacaaacattctcgttgaacttatgcaacataatgattcttgttctggggattcaaacggcccgaccagtacatgtaagctgctccaactgaaggaaagcatttccaaggagattgaaaagactgaactccagattgattcattggaaggcgaacttaaatctgtgaatactgaggctgtaactactcttgaaagttctcccacaggggtgacacatacagaaaatctgtcaccttctggtgggacatcaaaggttcctggaagtgccgagatctgtgatacatttgatatgataaaagaaccgggggagctcattgtttctcctaaggtacctgtggtgcaggatgctgatgtcaaaggggtcgatatgatggaggttgaaacagctccagttcgcaatgcaaaaacagttccttcagaagagagtgctgtaactcctggagttgctgagggtaaggcatgtgcagctgctgatcttagctcattgatagcttctgaagaagctgggtctcaaaatgatattgacaatgacaggccgaaaacttctttgtgccatgctgattccatgaaaattaaagttagtgatgaactaccagtgaagcaatggacatactgtgatcatatgtctgatttacacagttctttcacatctgcaaataatgatatagccaaagaaatgaatgaggtgctatttaaatcattgcctgctggtacatctgcccttgatttgttggcatcaagtgatcttcttagccaacggaagattgatttgattgtcaaagaaagacttggagtacgtaaaaccaggctgaggttgaaagagcagattcttacaatgaagttcaaggcatatcgtcacttgtggaaagaggatgtacggctactttctgcaaagaaacagcgattgaagtctaataagcgcattgatcagaataaccgaacatctcaaattggatctcagaggcaacgcttttctaaccgctcacgattagccatgcctgctgggaatttaagtacattctcaactccggaaatgtcagatgttgcaagaaagttgttttcagaatctcaaattaagcgctgcagaaactacttgaaaatgcctgcactgattattgatgagaaagagaaggaacacctgaggtttctgaccaagaatggactggttgtggatcctgttttagttgagaaggaacggatcatgataaatccgtggactcaagacgaaaaggaaatttttatggagatgcttgctaaatttggcaaggatttctccaaaatttccagtttcatcacacataaaactactgcagactgtgtggagttctactacaagcatcataaatcagacagcttccgagaagtgaagaaactgttggaccttcatcaacagctgcctgccagcaattaccttggagcgaaatcaggacagaaatggaatcctgagtcaaatgctgcttctcttgatatgcttggggtagcatcagctgaagcagcccatgaccttgaatatgcaaacaaagtggagaaaatttctgtgaaatccctcatccggactgcatatgggtccaatgtttcatttgtgaccaaaaaatcttctgataaggagtgcattgacaatgtgcctttgcatgagagagaatctgtagcagctgatgtactagcaggcatatgcggcactccttctcctgatggaatgggctcatgcattactagttctgctgatcctggcctgaagatcagcatgaaaagagtggagcatgtcttatcccaagaaaatgacaaaaatgttaatgaggaagaatctctctctgatcaagagtgtgaatttgatccagttgattggaatgatgatgagaagtcaattttcattgaggcaatgaataactacggaaaggatttttctcggatctcgtcttgtgtgaagagcaagtcatatgaacaatgcaaagtgttctttagtaaggctcggaaatcacttggtttggatttgatccatcaaggggcagccgatgttagtatgccagctagtgataccaatggagggaggagcgatactgacgaggcctgtgctgtggaaatggattcagctatctgtaggaagcagtcttgttcaaagattgtgcaagatgtttgtcctactgaaggagccattttagggcctgactctgttttaatctctaagcagacagaaggagatatatcaaataggtgcattgttgatgttaaaattgaggaagatgataaggaagctgataaaaattgcagcaatgttgatgataagaggtccagtgatagtactcatcaagctggccctatcaacatcaattgcccagaaagtacagataagctgcaaggaactgatgatgccgttgaccaagtaaacatgcatagtagtgtcctcaactcttcaaatgagcatgcaatggccatgcactcagaagtgagatccagtttacactctgtagatgtacttcaaacagacaaagctgaaggtactggtactgatcctagccaggtggaagaatgttcacatcatgctgtctacacaccgatgacagctgggaattctggttcctcagctttcttaacttcagatagtggtatcaaggacaatgttcacatctcaaacatgtctggtgcctccactgttagtcctgcattcacttcaaactatcaacattctctgccaggagatatgcccctgtcgaaaccaaagccactagtaacctcccttaccccaaaggatttaatgcctgtgcagttcagttcagttcttcctgatcccactgcatttcgttttgagggcataaagcccaactttgaggacagcagtggcaacaaagtcagcagtgccctaggagctaaagacatttgcaagtacccagcttttaaagacccatctgataatgagcatgacacattgtttcgtaatattgatggttatatgaataatcatctgacaactgaattgccagttttttctcaaagaactgcaagtggcactgtgagtacttcgcagacaaaattccagaatggcaggtccagcagcgtgtgccttccaaacagttctgaggggattcaatggcccaggaaacctgaagaagtaccggaagattctttgaggccttgcgctcgcaatgcaaaaactgagggtggtgagaaacaaaagcgacctggtgatgtcaagttatttgggcagattctcagccatcagccaaccttgccaagttctggctcgttgtgtaatggtagccagagcaagcctccctcaccaaagattgacaaaacatctgtgagattgaccaacaatccaagggatcttgtagttttttcttccaggcctggtgtcagtccacatgtgggtctggaggaaagatcagtgaggagctacggccatctggatggaagcacgatacagcctgagcctctgctggtgatggcgaagtgccagagatccttggccagtgtaccattttactcggctaagaacagcacggttggcgtgtttccagattatcaacaaccttcaatgcagccacatcaattagatcccaagccgctggaaatgttttctgattcgcagaagaggaatgggctggaactcgtctcgggtttcggcggtgctggtatccttgttagcaacgtctcagaccatgtggctgctctcaaggctcggtatggtcccggttctaagataatgggcagtgacgcggatccttggaaagacataggaagcaggtagcaccgatagcggtagccagttctagtgcttgttttgttgctcgctgtatcatatttagttcttttttttttctgtaacttgaatgaaatcgtcaaatgaaggaaagtgaatggctttcctgcccatactatttgtaagctttgcagtagttgccgggttatgttatttactggcattaacatttttacctttattgcagcaccataccctttggtagcttgacatgtcaacagcggcccagcgccaccgtgggctcgttagagctgtgtctagatgcatggatgcactgaacattggctggaaggacatcgactgtgtttcctggtcatcctgtcctcgaagtgag

SEQ ID NO: 217897 - DNA, 1350 bp, Zea Mays
cagaaaattgaaccaactcggatgaacttgatcccatcatctacctgaatgtcgattaggtgcgacccggccattggctaatatgcgctaccgttccacgtcgggacctctatcaccctcgatggagagcccgcccaaccatgtcgtccctgacgacacagcaaatgccaccggtgtagcctccctcgtcgggcgccgccacctgatttgtttcttcctctatcgtcgtgccatatcctccggtggcgatgagctacacttgctgcttatgagcggtacagatcaagagttgattccagtgttcggtgcgctggtgatgcacctctgcaccggctttggccccgaggcgctaccggttgggatacggtggaccatggacgagagggatccggggtgcttgtatggagatctggctgaactgccgtgctggggattcttcagtctcattgtacatccactgctaggcgaggcacgatgtcgacgtgctggcgtgctgctacggaaggtgttagatatatgcaacaatctgatattccatactaccttaaccatgtggagcttctcgaagcatgtgagtttctatgtttattgttgagcatgatctctttgttttatatcaatgctaggttcctggtaacaaatagatctctaaacttcttattttttttacacagattttcttattttcttcatatctaaccgggagagcttgctatcctgcacttgaactgcttctgcatttttataaaatttattttagtgattcattgcatcaagaaaactattacttgtggacagcctggggacatatgagtccttttaagtagatgttgttatctgctcataccatgcaatacttttcctcaacaagtggtgttgttttaaatactagagtagaactacatccatgaaaactatcactgctcatatccacgacaaagcaccagtgaacgtgtgtgcgacaaggagggaccgcctgctgttctgagtccaaccaactagacctacaactgaaaggtatgctatatatataatatggtgctattttgacgtgatccagattgttattgtaggccacacacaaaacagggaccgataaaataaaaccataattacttctgattctgaattgaaagcattacatagcttcgaaggtatatacttccctttcgattctttgggcagttcaaccacattagctactccatccttagattctagaactgctcatcattctcttcatccaggtcaacacctttatcatctctaattgttttagcgtcttgatgtcattgtacttgtggacaggggctagctttctttgtgtcattgtacttgtgtacaggggct

SEQ ID NO: 217898 - DNA, 1809 bp, Zea Mays
attacctccgcttcactgctcgcactcgctcgctcggctgctcctgccggctgccgagaagtctccctccctcccatggccgcggccacctccaccccatgctgagccaaaccccccaactagtttcagtgtccgcccagcagtcagcagaggaggagcgcgacagatcctcggcgccggcgcgccctccgggtcccccgccccaccaccactcacatcacatcacatggcggactccacgcaccacaccatccgccgcgccgcggcgcgcccgcgcggctggtgctgctcgttcgcgggcgtcccggagagccccgagcaccgccgcgcgctcccggcgcccgcctccgccgccgacgccgtcccgaagcctccgcctccgccgccgccaaagtccccgctggcgccgtcgtcgcacggctcgccctcgtccaagctcgcggggctcatcgacacgcggaggatcctctcgccgggccgcgtgtccccgatcgactccgaggggtcaccggcggcggcgccgagggagcaggccgcgcctttcgtggcggtgcgggaggacgaggacgagggcggggacggcggcgaggcgccggcgctggatctgaggctgtgcctcagggccagcgacggccggtgcgtcgccatggacctcgactccgccgtgctgtgcgggagcagcgccttcttcgccggcatggtgccggacgcatctgcggccgggggaaggagggtcgaggtggatggggtggacgacttggaggcgttcaaggacgcggtggagctcatgttcgagcccgacgccttgcggtggctcgccagggccggcgtgtcacgggcaaccgctgtgctccaggtttgctcctctattgcgttcgacaaaggagtcgaatcatgtttgaagtacatcgaggcagttccatggagcgagagcgaggaagagaagctgaaacacgtttttgccagatgcactttcggcgaatcagttagtaaagatgtgctggcaagattgcagcagcagtgcgcgagcggctcggaggacctggcggtgcagctcgtggaatctatcacgagcggagccaacaacggcgcgaggaaagaaatgcagtctttggtgagcggtctcctaagcagaagctcagtctaccataaggacctgtccggggtgaacaaggggggcctttaccgaatctgccgttcctgcttgagctcacttgtggaacttttcatggaggactcagatggcggccaagctatggcaccttcaggcagaaggcctatggttgaaaggatcagtcagcaaactgagaatctcaactggctcttggacatccttctgaacaacgacatggcagaagaatacgttgagctgtggggtacgcaggaggagctcatcagaatgcacgagcgagcatcgccgatgttcaggtacgagctcagccgggtatcggcgagcgtgttcatggctctggggagagggagaatccagtgccccagcgacacgaggagccagctgttccgtggatggttcaggcccatgcttgtggacttcggctggctgcagaggtgctccaaggggctggatgtgagagtcctggaggagaacctggggcaggccctgctcacccttccgctccacctacaacagagcttgttcgtagaatggtttcagtgctttgcgtctagaggcacaggaggatgccctaatctcagcagagctttccagatctggttcctctgtttgcaaagctggaatggatccatgcacgctggctggattggatcggccaggcagtcagcataagcgag

SEQ ID NO: 217899 - DNA, 1367 bp, Zea Mays
ccggcccctagtcggctaatcttcaccttatcccaccctcgctatgcacatccaccactgcccatgctaggctcgctgcggtgccgcgtcatgccgcgcccgcgcaccgccaccagtgtctcatcacacatcaccgagctccgtcgagcgctggagaatggacatcagccacccccatccgaaggcttgcagcgcccgaagctacgccagagcaccacggacatcgacgcctctggtgtttcattggttgaatcggaggatgcattctaatactgagtactgcagcatccatggtagcaaagccatggaggacaaggactctgtgcctcatagtgtggttgagaaagatactgaagcccttctgctccatgatgtgcttcttaatggtatacttgcaattggcacacttggccatcacgtggactcactttgccctgtggcttgcattgaagaagatgatctctttatcatggatgatgagaaagcaattgtggaagagagagatgatgaggaacccaggaatgatcaggtgaaagaagatgttgcattggaaacagagccatgtgaaccagtatggcctattgttgagcctgctaagatgcattcattgtcaatgaaagaagacaactttacatgctttgtagcagaagaaatcctgatacgtgaggtggaagatgggggaggtgctaatatccaggaacgaccacttctgatgttagaaaaggtggagaaagtaagaactacacttgctgatttatttgcagcagaagtattctcatcaagttctccaagggagtatagttgccaggatatcattgacgttgctgtggcatccacttcaaagcatgcatcatgcatggaaaagatgcatcaaaagaaaccaaggaagccaacaccaaaaccactgaaagcgacaagaaaattaagtcgggtcatgaggaagatgttggggaagaagatccacccagagcagctcaatgggcgtagcaatgcagagggcccccttactgcatgatgtttattcttgccgacaaatttgcttctctatttggttacattggatccctatggctcagattccttgccagagagaagcgtccatggacagtcgtcgacgatgtggaagttccgttttttgttgttgtgttttgtcgccagtgaagcgtgcatgaataccaaccattctgctttcccatgttctcttgcttatttgcatgtataaatcaactgttggggtgtgtgtctgtgatcttgtaagctgtcatcatctggcgccacggcctgcgctgcgctgcactgcactgccttgtcgtcgcggcatgccaaatatatatattctttaataaaatatctgctttacgtttgca

SEQ ID NO: 217900 - DNA, 1513 bp, Zea Mays
gtttggatggtctgctccagtagatttctgcgcagattagcagagtatctctgatgaagaaactacgtcatccaaatattatactcttcatgggagcagttgcatctccagaacgactttgtattgttacagaatttcttccacgggggagtttgttccgcttacttcaaaagaacactgccaagctggatccaagacgacgagttcacatggctatagacattgcaaggggtatgaattatcttcaccattgtagccctcctattgttcaccgtgatttaaaatcgtcaaatttgttggtagacaagaactggactgtaaaggttgcagatttcggtctttcacgtctaaaactcgaaacgtttttacgaacaaaaactggaaaaggaacgccacaatggatggccccagaggtgttatgtaatgaaccttcagatgagaagtctgacgtgtacagctatggggttattctatgggaacttgtgacccagaagataccctgggataatctcaatacaatgcaggttattggagctgtcggctttatggatcagaggttggacattccaagcgatacagatcctaaatgggcatcgatgatcgagagttgttgggataggtaagcatattgtttttccctactaagcaacaactagttgaatgcatatggtggagatcatgtttgaagaccataggaagcccaaatcaattttttttgagaaaatcatagttccattctgatgaacagtgtgattagaagtccctgatacatgtatatccttttatttgagcagcgacccgcagaaacgcccttcgttcctagaggtcctggacaggcttagagatctgcagaagcagtacagcctgcaggctcagatgcagcgtaacctgtccgcggatgctctcctgaaaggcgctgtgaaatgagcgtcgaggaatgctagctctcggaatgtaatggaacatggcactggacacattgacagcgaccagggcaagcgttcatcgacatttgtagcgtctgcgtgctgatgaggaaggctggctacgtgcatcttggtggccttcgtatagaagaggaggagctacagtccggactccggaggctgtaccggcaaaggcggccggtgcatgcatggcttcatgtatctcaaggcctcaacgaagcttcataatgcggtaatcttcggccaagaaggccggacacttgtgaaacgagaatggctaagaaggccggactactttttgtattaacgccccagtttttcaatgggggaaaaatcgaattgtttataaattgtatacttagtctcgataacgttcttgcctgcatatagaaccgggtgtcttcagacgcatggatgggtggtagtagtgtgttcagatgcatagaaagatggtaagcatgtctctgctgctgctttccttactgaatggacctttgatgtcgtcgctcattgcagcgttttctgaacagtgaccacattacagccggctgcacgcctgcacttgc

SEQ ID NO: 217901 - DNA, 2631 bp, Zea Mays
actccctctcccaatcctcgtcactgctgcctctccaagcaacaaggccgcggaagaacagaccacgcggtcagcagcagcaggggagcaagaagaactcctgttgggctgggttcacggttcaccccatttctgaattccgtcctgaggtgtggcagctcacagaagcttccagaaggcgggattgagccaagttcgctccccggatcgccgggaaaccaacaaaagcagccgctttatgcttcttgggccagacgaggaatcctcgagaaaccgatagaaggtgcaggcaggcagttagctgggtcgcggaagcctccaaaggcgccattttcgccgccgacctcgcgcgcgccggaagcaacaactccccctcccctgatgcttgccatttgacacacagcaaccgggcgctctgctgccggtgatggcggcggaggagctgctgcggaagttacgggagctggaggaaggccaggcggagctcaagcgggagatttccaagctcgtgccggagcagcagcaacagcaccaccaccaccactaccactcctcgcgccgcccgccgcagccttcgccggtgcgccgcgccctccccgcggcgccttccttgccgtcgcggctgcagcgcgtgggccgcgtcgggctcactgaccgccagcacatcagggccctgcacgcgctgggacaggccgtgcatatcattgcccccggcgggaagctcatttactggaaccgttatgccgagcaaatgtatggctattctacatcagaagcagtcggtcacgatgccgttgagttattggtccatcctgatgatgctgaggcagcaaacaatataattgggaatatatttatggggaaatgttggagagggaagtttcctgttaaaaagaagtcaggagagcggtttttcattgtggccaataatactcctttgtatgatgatgatggaagcttggtaggtctcatttgtctctcagttgatacgaagacattagaagatataatcggcccttcaacttcaatgaagtctcatacacatccagtgaagcctcgctttcaagtcaacaatcggcctaaatgcaatttgttaaataaaagttctattgagtctgagcaaactgtccaatcttctatagcctccaagataacaactttggtatctctgatgaagaaactacgtcatccaaatattatactcttcatgggagcagttgcatctccagaacgactttgtattgttacagaatttcttccacgggggagtttgttccgcttacttcaaaagaacactgccaagctggatccaagacgacgagttcacatggctatagacattgcaaggggtatgaattatcttcaccattgtagccctcctattgttcaccgtgatttaaaatcgtcaaatttgttggtagacaagaactggactgtaaaggttgcagatttcggtctttcacgtctaaaactcgaaacgtttttacgaacaaaaactggaaaaggaacgccacaatggatggccccagaggtgttatgtaatgaaccttcagatgagaagtctgacgtgtacagctatggggttattctatgggaacttgtgacccagaagataccctgggataatctcaatacaatgcaggttattggagctgtcggctttatggatcagaggttggacattccaagcgatacagatcctaaatgggcatcgatgatcgagagttgttgggataggtaagcatattgtttttccctactaagcaacaactagttgaatgcatatggtggagatcatgtttgaagaccataggaagcccaaatcaattttttttgagaaaatcatagttccattctgatgaacagtgtgattagaagtccctgatacatgtatatccttttatttgagcagcgacccgcagaaacgcccttcgttcctagaggtcctggacaggcttagagatctgcagaagcagtacagcctgcaggctcagatgcagcgtaacctgtccgcggatgctctcctgaaaggcgctgtgaaatgagcgtcgaggaatgctagctctcggaatgtaatggaacatggcactggacacattgacagcgaccagggcaagcgttcatcgacatttgtagcgtctgcgtgctgatgaggaaggctggctacgtgcatcttggtggccttcgtatagaagaggaggagctacagtccggactccggaggctgtaccggcaaaggcggccggtgcatgcatggcttcatgtatctcaaggcctcaacgaagcttcataatgcggtaatcttcggccaagaaggccggacacttgtgaaacgagaatggctaagaaggccggactactttttgtattaacgccccagtttttcaatgggggaaaaatcgaattgtttataaattgtatacttagtctcgataacgttcttgcctgcatatagaaccgggtgtcttcagacgcatggatgggtggtagtagtgtgttcagatgcatagaaagatggtaagcatgtctctgctgctgctttccttactgaatggacctttgatgtcgtcgctcattgcagcgttttctgaacagtgaccacattacagccggctgcacgcctgcacttgc

SEQ ID NO: 217902 - DNA, 3101 bp, Zea Mays
actccctctcccaatcctcgtcactgctgcctctccaagcaacaaggccgcggaagaacagaccacgcggtcagcagcagcaggggagcaagaagaactcctgttgggctgggttcacggttcaccccatttctgaattccgtcctgaggtgtggcagctcacagaagcttccagaaggcgggattgagccaagttcgctccccggatcgccgggaaaccaacaaaagcagccgctttatgcttcttgggccagacgaggaatcctcgagaaaccgatagaaggtgcaggcaggcagttagctgggtcgcggaagcctccaaaggcgccattttcgccgccgacctcgcgcgcgccggaagcaacaactccccctcccctgatgcttgccatttgacacacagcaaccgggcgctctgctgccggtgatggcggcggaggagctgctgcggaagttacgggagctggaggaaggccaggcggagctcaagcgggagatttccaagctcgtgccggagcagcagcaacagcaccaccaccaccactaccactcctcgcgccgcccgccgcagccttcgccggtgcgccgcgccctccccgcggcgccttccttgccgtcgcggctgcagcgcgtgggccgcgtcgggctcactgaccgccagcacatcagggccctgcacgcgctgggacaggccgtgcatatcattgcccccggcgggaagctcatttactggaaccgttatgccgagcaaatgtatggctattctacatcagaagcagtcggtcacgatgccgttgagttattggtccatcctgatgatgctgaggcagcaaacaatataattgggaatatatttatggggaaatgttggagagggaagtttcctgttaaaaagaagtcaggagagcggtttttcattgtggccaataatactcctttgtatgatgatgatggaagcttggtaggtctcatttgtctctcagttgatacgaagacattagaagatataatcggcccttcaacttcaatgaagtctcatacacatccagtgaagcctcgctttcaagtcaacaatcggcctaaatgcaatttgttaaataaaagttctattgagtctgagcaaactgtccaatcttctatagcctccaagataacaactttggctaccaaagttacaaacagagttcgttctcggatgaagacaggtcagaactgcggcgggtctgagtgtccgtactctgaagatgattccaaggaagaactgacatctagtggaaacacccctagaggtgatgtactgcatggtggcattgttaaaggagataatttccctgggaagtcgagtaaaacaagtagtgaagactcaggggacggaaacgaaaggctttgcaagattagttcaaagacagaggacttattggccaagaaggggatatcatggccctggaaagggcacgaacatagtggtcctgacaagggtcacatgaacccattgcagttccatgataagcaagacaatgatcagatacatctggtcggtccagagtcaattataattccagactaccaagattctgatagcacccaggaaagcagatatgaagtaacgggtaactggtggtctttcaacaacgatagcttcaatagtttgggtagcagtttaagttctaatagcagtgctattgagagagttgatcttgaagcagattgcctagactatgagattctatgggaagacctagtacttggagaacaagtaggtcaaggttcttgcggaacggtgtatcatgctcagtggtatggctcggtatctctgatgaagaaactacgtcatccaaatattatactcttcatgggagcagttgcatctccagaacgactttgtattgttacagaatttcttccacgggggagtttgttccgcttacttcaaaagaacactgccaagctggatccaagacgacgagttcacatggctatagacattgcaaggggtatgaattatcttcaccattgtagccctcctattgttcaccgtgatttaaaatcgtcaaatttgttggtagacaagaactggactgtaaaggttgcagatttcggtctttcacgtctaaaactcgaaacgtttttacgaacaaaaactggaaaaggaacgccacaatggatggccccagaggtgttatgtaatgaaccttcagatgagaagtctgacgtgtacagctatggggttattctatgggaacttgtgacccagaagataccctgggataatctcaatacaatgcaggttattggagctgtcggctttatggatcagaggttggacattccaagcgatacagatcctaaatgggcatcgatgatcgagagttgttgggatagcgacccgcagaaacgcccttcgttcctagaggtcctggacaggcttagagatctgcagaagcagtacagcctgcaggctcagatgcagcgtaacctgtccgcggatgctctcctgaaaggcgctgtgaaatgagcgtcgaggaatgctagctctcggaatgtaatggaacatggcactggacacattgacagcgaccagggcaagcgttcatcgacatttgtagcgtctgcgtgctgatgaggaaggctggctacgtgcatcttggtggccttcgtatagaagaggaggagctacagtccggactccggaggctgtaccggcaaaggcggccggtgcatgcatggcttcatgtatctcaaggcctcaacgaagcttcataatgcggtaatcttcggccaagaaggccggacacttgtgaaacgagaatggctaagaaggccggactactttttgtattaacgccccagtttttcaatgggggaaaaatcgaattgtttataaattgtatacttagtctcgataacgttcttgcctgcatatagaaccgggtgtcttcagacgcatggatgggtggtagtagtgtgttcagatgcatagaaagatggtaagcatgtctctgctgctgctttccttactgaatggacctttgatgtcgtcgctcattgcagcgttttctgaacagtgaccacattacagccggctgcacgcctgcacttgc

SEQ ID NO: 217903 - DNA, 3322 bp, Zea Mays
catgcgtccacaccacacgatcctggattgatgattaataaataaagcaagacaaagacttttgtgcgatgcgatgccctcacttgggtcgacagagatcatcccctggcaccaccatccagttccaattccaactccaactccctctcccaatcctcgtcactgctgcctctccaagcaacaaggccgcggaagaacagaccacgcggtcagcagcagcaggggagcaagaagaactcctgttgggctgggttcacggttcaccccatttctgaattccgtcctgaggtgtggcagctcacagaagcttccagaaggcgggattgagccaagttcgctccccggatcgccgggaaaccaacaaaagcagccgctttatgcttcttgggccagacgaggaatcctcgagaaaccgatagaaggtgcaggcaggcagttagctgggtcgcggaagcctccaaaggcgccattttcgccgccgacctcgcgcgcgccggaagcaacaactccccctcccctgatgcttgccatttgacacacagcaaccgggcgctctgctgccggtgatggcggcggaggagctgctgcggaagttacgggagctggaggaaggccaggcggagctcaagcgggagatttccaagctcgtgccggagcagcagcaacagcaccaccaccaccactaccactcctcgcgccgcccgccgcagccttcgccggtgcgccgcgccctccccgcggcgccttccttgccgtcgcggctgcagcgcgtgggccgcgtcgggctcactgaccgccagcacatcagggccctgcacgcgctgggacaggccgtgcatatcattgcccccggcgggaagctcatttactggaaccgttatgccgagcaaatgtatggctattctacatcagaagcagtcggtcacgatgccgttgagttattggtccatcctgatgatgctgaggcagcaaacaatataattgggaatatatttatggggaaatgttggagagggaagtttcctgttaaaaagaagtcaggagagcggtttttcattgtggccaataatactcctttgtatgatgatgatggaagcttggtaggtctcatttgtctctcagttgatacgaagacattagaagatataatcggcccttcaacttcaatgaagtctcatacacatccagtgaagcctcgctttcaagtcaacaatcggcctaaatgcaatttgttaaataaaagttctattgagtctgagcaaactgtccaatcttctatagcctccaagataacaactttgaataacaccacaggctaccaaagttacaaacagagttcgttctcggatgaagacaggtcagaactgcggcgggtctgagtgtccgtactctgaagatgattccaaggaagaactgacatctagtggaaacacccctagaggtgatgtactgcatggtggcattgttaaaggagataatttccctgggaagtcgagtaaaacaagtagtgaagactcaggggacggaaacgaaaggctttgcaagattagttcaaagacagaggacttattggccaagaaggggatatcatggccctggaaagggcacgaacatagtggtcctgacaagggtcacatgaacccattgcagttccatgataagcaagacaatgatcagatacatctggtcggtccagagtcaattataattccagactaccaagattctgatagcacccaggaaagcagatatgaagtaacgggtaactggtggtctttcaacaacgatagcttcaatagtttgggtagcagtttaagttctaatagcagtgctattgagagagttgatcttgaagcagattgcctagactatgagattctatgggaagacctagtacttggagaacaagtaggtcaaggttcttgcggaacggtgtatcatgctcagtggtatggctcggatgtagcagttaaactattctctaagcaggaatattcagatgaaatgatagataccttcagacaagaggtatctctgatgaagaaactacgtcatccaaatattatactcttcatgggagcagttgcatctccagaacgactttgtattgttacagaatttcttccacgggggagtttgttccgcttacttcaaaagaacactgccaagctggatccaagacgacgagttcacatggctatagacattgcaaggggtatgaattatcttcaccattgtagccctcctattgttcaccgtgatttaaaatcgtcaaatttgttggtagacaagaactggactgtaaaggttgcagatttcggtctttcacgtctaaaactcgaaacgtttttacgaacaaaaactggaaaaggaacgccacaatggatggccccagaggtgttatgtaatgaaccttcagatgagaagtctgacgtgtacagctatggggttattctatgggaacttgtgacccagaagataccctgggataatctcaatacaatgcaggttattggagctgtcggctttatggatcagaggttggacattccaagcgatacagatcctaaatgggcatcgatgatcgagagttgttgggatagcgacccgcagaaacgcccttcgttcctagaggtcctggacaggcttagagatctgcagaagcagtacagcctgcaggctcagatgcagcgtaacctgtccgcggatgctctcctgaaaggcgctgtgaaatgagcgtcgaggaatgctagctctcggaatgtaatggaacatggcactggacacattgacagcgaccagggcaagcgttcatcgacatttgtagcgtctgcgtgctgatgaggaaggctggctacgtgcatcttggtggccttcgtatagaagaggaggagctacagtccggactccggaggctgtaccggcaaaggcggccggtgcatgcatggcttcatgtatctcaaggcctcaacgaagcttcataatgcggtaatcttcggccaagaaggccggacacttgtgaaacgagaatggctaagaaggccggactactttttgtattaacgccccagtttttcaatgggggaaaaatcgaattgtttataaattgtatacttagtctcgataacgttcttgcctgcatatagaaccgggtgtcttcagacgcatggatgggtggtagtagtgtgttcagatgcatagaaagatggtaagcatgtctctgctgctgctttccttactgaatggacctttgatgtcgtcgctcattgcagcgttttctgaacagtgaccacattacagccggctgcacgcctgcacttgc

SEQ ID NO: 217904 - DNA, 3480 bp, Zea Mays
ttgcttcggctttgcgccttcctcctcctcgccgacatgcggtcttttcatcattcttcttcttttctgacttgtggccgtcgtcaaccgctagtagttaaatggaaaatgtaaacttttctgcgcacaccaagaagcaaacaagcgtccagagtccagacaaacagtacacatgcgtccacaccacacgatcctggattgatgattaataaataaagcaagacaaagacttttgtgcgatgcgatgccctcacttgggtcgacagagatcatcccctggcaccaccatccagttccaattccaactccaactccctctcccaatcctcgtcactgctgcctctccaagcaacaaggccgcggaagaacagaccacgcggtcagcagcagcaggggagcaagaagaactcctgttgggctgggttcacggttcaccccatttctgaattccgtcctgaggtgtggcagctcacagaagcttccagaaggcgggattgagccaagttcgctccccggatcgccgggaaaccaacaaaagcagccgctttatgcttcttgggccagacgaggaatcctcgagaaaccgatagaaggtgcaggcaggcagttagctgggtcgcggaagcctccaaaggcgccattttcgccgccgacctcgcgcgcgccggaagcaacaactccccctcccctgatgcttgccatttgacacacagcaaccgggcgctctgctgccggtgatggcggcggaggagctgctgcggaagttacgggagctggaggaaggccaggcggagctcaagcgggagatttccaagctcgtgccggagcagcagcaacagcaccaccaccaccactaccactcctcgcgccgcccgccgcagccttcgccggtgcgccgcgccctccccgcggcgccttccttgccgtcgcggctgcagcgcgtgggccgcgtcgggctcactgaccgccagcacatcagggccctgcacgcgctgggacaggccgtgcatatcattgcccccggcgggaagctcatttactggaaccgttatgccgagcaaatgtatggctattctacatcagaagcagtcggtcacgatgccgttgagttattggtccatcctgatgatgctgaggcagcaaacaatataattgggaatatatttatggggaaatgttggagagggaagtttcctgttaaaaagaagtcaggagagcggtttttcattgtggccaataatactcctttgtatgatgatgatggaagcttggtaggtctcatttgtctctcagttgatacgaagacattagaagatataatcggcccttcaacttcaatgaagtctcatacacatccagtgaagcctcgctttcaagtcaacaatcggcctaaatgcaatttgttaaataaaagttctattgagtctgagcaaactgtccaatcttctatagcctccaagataacaactttggctaccaaagttacaaacagagttcgttctcggatgaagacaggtcagaactgcggcgggtctgagtgtccgtactctgaagatgattccaaggaagaactgacatctagtggaaacacccctagaggtgatgtactgcatggtggcattgttaaaggagataatttccctgggaagtcgagtaaaacaagtagtgaagactcaggggacggaaacgaaaggctttgcaagattagttcaaagacagaggacttattggccaagaaggggatatcatggccctggaaagggcacgaacatagtggtcctgacaagggtcacatgaacccattgcagttccatgataagcaagacaatgatcagatacatctggtcggtccagagtcaattataattccagactaccaagattctgatagcacccaggaaagcagatatgaagtaacgggtaactggtggtctttcaacaacgatagcttcaatagtttgggtagcagtttaagttctaatagcagtgctattgagagagttgatcttgaagcagattgcctagactatgagattctatgggaagacctagtacttggagaacaagtaggtcaaggttcttgcggaacggtgtatcatgctcagtggtatggctcggatgtagcagttaaactattctctaagcaggaatattcagatgaaatgatagataccttcagacaagaggtatctctgatgaagaaactacgtcatccaaatattatactcttcatgggagcagttgcatctccagaacgactttgtattgttacagaatttcttccacgggggagtttgttccgcttacttcaaaagaacactgccaagctggatccaagacgacgagttcacatggctatagacattgcaaggggtatgaattatcttcaccattgtagccctcctattgttcaccgtgatttaaaatcgtcaaatttgttggtagacaagaactggactgtaaaggttgcagatttcggtctttcacgtctaaaactcgaaacgtttttacgaacaaaaactggaaaaggaacgccacaatggatggccccagaggtgttatgtaatgaaccttcagatgagaagtctgacgtgtacagctatggggttattctatgggaacttgtgacccagaagataccctgggataatctcaatacaatgcaggttattggagctgtcggctttatggatcagaggttggacattccaagcgatacagatcctaaatgggcatcgatgatcgagagttgttgggatagcgacccgcagaaacgcccttcgttcctagaggtcctggacaggcttagagatctgcagaagcagtacagcctgcaggctcagatgcagcgtaacctgtccgcggatgctctcctgaaaggcgctgtgaaatgagcgtcgaggaatgctagctctcggaatgtaatggaacatggcactggacacattgacagcgaccagggcaagcgttcatcgacatttgtagcgtctgcgtgctgatgaggaaggctggctacgtgcatcttggtggccttcgtatagaagaggaggagctacagtccggactccggaggctgtaccggcaaaggcggccggtgcatgcatggcttcatgtatctcaaggcctcaacgaagcttcataatgcggtaatcttcggccaagaaggccggacacttgtgaaacgagaatggctaagaaggccggactactttttgtattaacgccccagtttttcaatgggggaaaaatcgaattgtttataaattgtatacttagtctcgataacgttcttgcctgcatatagaaccgggtgtcttcagacgcatggatgggtggtagtagtgtgttcagatgcatagaaagatggtaagcatgtctctgctgctgctttccttactgaatggacctttgatgtcgtcgctcattgcagcgttttctgaacagtgaccacattacagccggctgcacgcctgcacttgc

SEQ ID NO: 217905 - DNA, 2956 bp, Zea Mays
aactcaacacaagacgtcacgcctaaaaagacaggtaaacggtgctacttcaaatggcccacctcttagggtgtcaaaaatggagctcagtaaaatcctggagaaaatagaaaatattgtgactgaagcacacaaaattttgcagcttttgaacttgccaagcggcagtaatgttgacaagagacaaattgttgctgagaattcacgcggtgcagtcactactgtggcccctccacgtttagtaattggccgcgacgaggatcgcgtcaaggtcatatctatgcttcgtgagacacttgatgatggtcaacaggatcgcagcggtgctaaaccatactctacaattggcatttatggcattcctgggtctggtaaatctaccctcgcacagtatgtttgcgcccatgaggaagacaatatccactttgacattgtcatctgggtccatgtgtcgcagaaatttagtgtgcgagccgttttgagggagatgatcgagcagggttttgagggagaaagcatcgagaccgaggagagtttcagatgtatttttcccaggaggcattggctggaccctgagtatttagtcaggttgtgggtggcagaaggatttgtcaccagccgcaatacaggggaggaactggaggctgttggtcgaggctactttgatgagttagtgtcagcctcatttctgcaaccagtagatggtgacaaggaacgctatacgatccatgatctgttgcatgacttggtaagtaaagtagctggaagtgactgcttcagagctgacaatggctgggaaggagaatttcctcaggatgtccgtcatctttgggttgagaactgtaaactagacttgattgcccacaagattaccagactgaaaaagctacgcaccctgatcatttctgctggtgagaatgacacgccagttgaggaaaaagccttgttggaaaatattttcacgggtgtgacgacattgcgggtgctccagataacaccctggacagcaggaactctctcattcccagcatctgtcgggcggctaaagcatctacgctatctttctgtcggtaggcatattggcggtactaaggtgattctgccaagtacggttgttttgggactgtaccatctgcagcttttggattgcccttctgtagccttctcctcctgcgaagatattgttaagggcctgttcggttgtaccggaatgagccaggattcattccagctcatcaaaatctatataaattagagaagtaatccagctaggaattaatccggggctccaatccgaaacaaccgaacagggcctaagctggttagcttgaggcacctactgtgctcatcaggatctctgaatgtaccaaacataggcaggattgtgtcactccgaactcttcgatgcttcagggtaaagaagaaggcaggctacgagttgtggcagctgaagcacctcaacaagcttgagaagaagctagtgatccgcggccttcagaacgctggacgcaagggagaggctccagaagccaatctagctgccaaggaacggctcacaagcctagcccttgagtgggacagtgatgcgccgctgagctgcggcgcggacctccaagcagaggtactggagggcctctgccctccgttgcacctcgaaaaactgcggctctgttggtacggcggctcgaggtacccagactggattgttggtgtgcgatgcctttgtctctaccggtgcagccgactaggcgcctttcatggatgctccccccgtcttgtcaaactgaaaattttagagtgcggctgggatgccttgccagataacatggagcacctcgcctcactccggaagttggttattgacggctgcaaggatctacggtcgcttccagagctgcctcgctctctgctgcaccttaagatctccggctgcgatggcgaggtcatgaggtcatgcaaaacggttggacatcccaatcgcaaaaggatacagcacgttcgcacagtaatcatcggatgggaatcacttcccagagcagagctattagatcactttgagagcgagcctgtggtgccggagaaagagaaggagatcgccgcccttgttaaaaagttgctcgtgatgcttggccttctactactttgcatgttcagtgtgattgcaaggttgcttgtgggctctttcctgctcccagctccgctggtcgtcgtaattttgctgcttgtggtatggataattttgacactctagaggcctgtgaaatcggttatgcctggtgccgttaaacacggacactactctctatcaattttcttctcttctctatggatattatgtttgcttgcctatatctactcgaccagtctgagaaaagatactatgtagttgtttgtatggaaaaaatgttgtataagataaaaaacgaatataaagctatgacctttttttttgtttttggatgagtatacttttagtgtttttgtttagctagagatgctagtgtgtttgcttgttgttgtgcacagtttgtggtactgtgtatggcctaacgctccggcggccctgaagttgagacggaaagggtggttgcggacagtccgttcttagaagcggacagtccacgattagatcagacggattaacttctatctccacacatgtttatctctttaaatacgtgtgagttattagaagtgctgagctagctctgcatgtacatacataaataaaaaatctcaagaaagtccctagatcaaacaaataaataaacaaaggaaacaaagagcagaaacgaatcaaaggatccagatccacacctagatagatacaataatataggcaatcagatgtattggtgcgatcgtgcaattaaacaatctctacgtttgatcctatatatatattattattaagatattatcaccgcatgatttataatcaatgacacaaattgct

SEQ ID NO: 217906 - DNA, 1746 bp, Zea Mays
ctgatcttgtccgggagaggttcgtacatcccattttgttggtcaacttcacttactgccacattggatgctttcttgtacatgtattgatatatgttggtttatttgttaaaaatctcgttatttccctctaaataccagaaaagtgatctgtgaagatttaacaatatagatcatattgttgttcttcgatctcctgcctcattctgcaatctgcaccatgccagtatggcactacttaagtaacattgccaaaagactagggtaccacagcaatgcagtttgtggctgatgttccactaccaaatggagtgctgatttcccagccattgacatgctattcgtgctttcgttttcccctaactaactcatttgagtgaatatgcggaccttgcctgtgttcttattggttgctgctggcacctctcaggctcttactttgtttaacatttttttctgaattggttgatatttccaaggcaacataatcgaaaagtttgcacacatctttgtgtggggcaaaggggccataaaaaacattgacgagcatgctagagccacatgcttagattgtcaggtggttaactcttatgatgggtacctagcagtagagtatgaggccataagtcaatcctaaattctcctccaaaacaaagatacgaagtgctgcttttgtattttttaaggaaaatttacattttacatcccttgaacttttaatttacattaactatgaaatagtctaattgacaggcctcaactatcaaatattttactttactctgtagacctgaaacaactaggacacacacttaggtcttggatgcacttgtacctatctcagtccacatgcaatctattcccgtcctttccatccactgtaatttcgatcttaggggagtggtgttatgtgggaacaggcctacaaccaatgcatgaagaccagctcatcaactaacatctagaatcgagacataagatatgtcccattgtgttctgtatatgggggagtgggcattccttgatgaataaagaaaggcaagcaaaagtcggtaccttaccctgcgtctccgttccatgatcctagcactagggaggcaaggattatcaagcatagcagctggtctacgacaccctccttaaggtcgtggacaagcacttgtcggctctggcaaaacagcacgtggagacacggttcgtgaaggtccacgccgagaaggccccctttctgacagagaagctcaggatagtcgtcctcccgaccctcgccatagttaagaacgccaaggtcgaggactacgtggtcggcttcgacgagctcggcggcaaggacgacttcagcaccgaggacctggaagagcgcctggcgaggtcccaggtcgtcttcctggacggcgaagggtccgcgcacgcttcgaagcaggccgccgccgccaccaaacggagcgtccggcagtcgggcaccggcgactcgtccgactccgagtagctctcgtgtgttgttgttgttgttattattatatatatctaaatgggtacacagcacagacatgttttggttgctatgccaacaggcaacattagcattgcaaggatatgcgtcttattgggacctggaagcaaaagtggttgtggtttgagttgctgtacagtgctgcggcgctgccgtgtggatcacatctgatctgaatatctgattgggtgggtcttgctctagtggttttgtttgccctgtaccgccaggag

SEQ ID NO: 217907 - DNA, 1969 bp, Zea Mays
ctgatcttgtccgggagaggttcgtacatcccattttgttggtcaacttcacttactgccacattggatgctttcttgtacatgtattgatatatgttggtttatttgttaaaaatctcgttatttccctctaaataccagaaaagtgatctgtgaagatttaacaatatagatcatattgttgttcttcgatctcctgcctcattctgcaatctgcaccatgccagtatggcactacttaagtaacattgccaaaagactagggtaccacagcaatgcagtttgtggctgatgttccactaccaaatggagtgctgatttcccagccattgacatgctattcgtgctttcgttttcccctaactaactcatttgagtgaatatgcggaccttgcctgtgttcttattggttgctgctggcacctctcaggctcttactttgtttaacatttttttctgaattggttgatatttccaaggcaacataatcgaaaagtttgcacacatctttgtgtggggcaaaggggccataaaaaacattgacgagcatgctagagccacatgcttagattgtcaggtggttaactcttatgatgggtacctagcagtagagtatgaggccataagtcaatcctaaattctcctccaaaacaaagatacgaagtgctgcttttgtattttttaaggaaaatttacattttacatcccttgaacttttaatttacattaactatgaaatagtctaattgacaggcctcaactatcaaatattttactttactctgtagacctgaaacaactaggacacacacttaggtcttggatgcacttgtacctatctcagtccacatgcaatctattcccgtcctttccatccactgtaatttcgatcttaggggagtggtgttatgtgggaacaggcctacaaccaatgcatgaagaccagctcatcaactaacatctagaatcgagacataagatatgtcccattgtgttctgtatatgggggagtgggcattccttgatgaataaagaaaggcaagcaaaagtcggtaccttaccctgcgtctccgttccatgatcctagcactagggaggcaaggattatcaagcatagcagctggtctacgacaccctccttaaggtcataacctcacaacaaatggtgcagattgcaatggttgggatttcttgcaagattcaagtagtttttttttgttcgaactttcaattctttttttattggggtcgtacaatgttaaagctaatgttcctttgttctgtatttgttgtcgtctttctataatcctatcgatacatttatcatccgttcattgtatccatgtccctctcctgacctgcaacaggtcgtggacaagcacttgtcggctctggcaaaacagcacgtggagacacggttcgtgaaggtccacgccgagaaggccccctttctgacagagaagctcaggatagtcgtcctcccgaccctcgccatagttaagaacgccaaggtcgaggactacgtggtcggcttcgacgagctcggcggcaaggacgacttcagcaccgaggacctggaagagcgcctggcgaggtcccaggtcgtcttcctggacggcgaagggtccgcgcacgcttcgaagcaggccgccgccgccaccaaacggagcgtccggcagtcgggcaccggcgactcgtccgactccgagtagctctcgtgtgttgttgttgttgttattattatatatatctaaatgggtacacagcacagacatgttttggttgctatgccaacaggcaacattagcattgcaaggatatgcgtcttattgggacctggaagcaaaagtggttgtggtttgagttgctgtacagtgctgcggcgctgccgtgtggatcacatctgatctgaatatctgattgggtgggtcttgctctagtggttttgtttgccctgtaccgccaggag

SEQ ID NO: 217908 - DNA, 757 bp, Zea Mays
agactaggggcttcagatcagtgcatcatattctaaggaagacaaggatggccaggcgcgagagagtatttaaggtggtgatcaaatttgcggcccgtgctgatctccaccatctggctatgtttctagctggaaggcaagcagatgcccctcaggaagctcttcaagtgcttgacattgtactacgtgaattgcctaccgcgaggtattctcctgttggtaggtcattttactctcccaacttagggagacgtcaaaaacttgatatgtcctctactgcatttatcgagcctctccctatgatcgattttgttgctcagcttcttaacagagatatcttagttagaccattatctgattctgatcgcgtgaagattaaaaaaaccctaagaggtgtgaaggttgaggtgactcacaggggaaacatgcgcagaaaatatcgcatttctggcctcacctcacaagcaacaagagagctatcattccctgttgatgatcgtggtactgtgaagactgtggtgcaatacttcatggagacttatggttttagtatccagcacaccactttaccatgcttgcaagtgggcaatcaacaaagaccaaattatctgcctatggaggtttgcaagattgttgaaggacagcgttactcaaagcgactcaatgagaaacaaatcacttctctactgaaagtgacctgccagcgccctcaagagcgtgagctagacatcttacaggattccggctctcatcaagt

SEQ ID NO: 217909 - DNA, 2980 bp, Zea Mays
ctagagacttcatcaccgcaggcagtcgcgcggcggctctcctccccgcaggcagtcgcgcggcggcctcatccccgctggcgagcctccactcccctccgccggtacgcctctatcgtcggtggactccccctcggcagacagcctcgcctcgcgtcttctcaccagtcgcgcggccactatcccgctgctctgcgcaccgcgcaacaaacaattgctggttgcgggtgtttgcatcttttcgcgcacaaatagatagtgtgtggcattgcctatttcattcagttctgcaaagataacagaaggttgggtatgggcaaatgtcgggtcagtcaagcaagcatcgcactgctctaaaagatcacagaagattgggtatggaattgcttgttccatggagattttgaaggaattctaccaacaagagctgacctcatgaaaacctccctcatcgaattcttgtgtttttcctgcacctcatccaaacattcggtcttggagttttctttatttgttcgatctatagagctacaggattcaaggtactacggtaatgaattcctatgtctcgggatttttgtgccagggaggccataatctgtcagagacgaaaacaagaaagaacccaactcagtttctttgaagcacatatcacctccttcctattcacctcttcagatgaatgcaagctcccaatgcacatatcgcctgacgtgaacctcgatcggcatcaggaggccaacggaggatcagagcaggaaggcgtggagcttgagctgcagcgagagcttgggcgtgagctgcaagaccaatgcaggcgtctcagtcagcaatacaaccgcacaactctcctactgtctatgaggtgtcagatgttcatgcatattccagtaaagttgaacagagccatcaggagtgcgtacatacagggcatggaaattatctccaaaggccgagccatcttgtagctctgctatggattcgagtcaccgtgggttgccgtgagaagcatgagagccacacagcctgcagatgcgagcagcagtcttcttaatgataaatatgtctacagcttcagtcataactatactgatgcattttaactgcaacgtcactcatcacaataaacatgaaggacataagctttatctcagacactcaatgttgtgcgataacctaatcaggtcacatatgttgtctggatcgtattaccagatgtcatctgataatgtgcaattttagagagtgttgaaggcttctttataacgttctcgagttgtagggttctaaggtccgactggcacgaggctcgttcagtcgtctcgaggagtagcaccccaagatgtaagaatggcattaagggcctgttcgtttcgcatggaatgaaggggtgaaataaatctgccttggattcctttaataattactataagtttgttaattgaaatacaatgagcaggagtcagggttctctcaattgcgaatgctcactcttgagtaaagggataggctaaagagcagctccatccagttcgacgaccatagtttttgcgagtgggtgcacaacctcaaattagcaagtacatgcctacatcgtcgacaactaaaggcaattactgagggagctcggtggggaagacctaaaggtgaagacgcggaaaaactcagggagaagctgaggcaggagtgcctgtggaaggggacggaactggcacatggggtggctgacgccctcttcgctgtatcacccaccgaggacctcgacggccctattgtacacctcccaccgcccgctgttcgactcccgcgcgagaagcatcttggtgctgggacctcactgccaggattagtagctgcaaaggttggggcagatgtaacactaacagacatcgcgcagacattattgtttctttaattgcaggccactggtgctgtactacgtggtcctgacgttgcgggacagcgtgcacaaggtcttctacgccgtcgtcgaggccgctgcagttcgcgcagacaacagccatcttggagatacttgtgttgccaccttatcagggtgaaggctatggtcttggtcttcttgaagcaatcaattatattgcacagtctaagaacatttacgatgttacaatagaaagcccttctgattccttgcagtatgtgagatcatccattgactgcctctgtttgctcatgtttgatccgatcaaacctgcactcggtgctattgtctcgtctctgaaggagaccaacctgtcaaaaagggcccaaagtttgagaatggttccaccagctgacctgatggagactatatgtcagaagctgaagataaagaagaaacagttccttcggtgctgggaaattctgatcttcctaagcctcgactctcaggatcataagagcgtggacaactttagggcctgcatatatgacttcatgaagggggagatccttggcagtgcctctagaactaacaggaagcgtctgttgtagatgccaaccagtttcaataaggaggcatcttttgctgtgtattggacacatgagattggggatgaggatgaacaaactgttgagcagcagccagaggatctgaggacgcaggagcaacagctcaatgagctcgtggacatccaaatcgaggatattgctggggtcgccaagaacgtcacttcacgtggcaaggataagatggcagagctggcggttcaatgaatttgggtgaggttcctacttcaaacgacgttaaaatgttgtcgtagcttatctggtgaggtctcttttacgggttggcttcttggtagaaagggaatgtcacagcataggcactgagtagattgtcacggcagattattatgtacttcaattctggaatatttgatgggaatgctattttagattgcttggtaagtgggaaccgcctcaaatcacagaagtagaagcagcttccgattcagccggaaccatttctccaaaaatg

SEQ ID NO: 217910 - DNA, 3740 bp, Zea Mays
aaatatataagagattagtgtagcacggttctgccagtgccatccgcgccctcagccgaggatctccattctcctccccacgcagaatccaccgcgaggttgcagtggtgtcgtgctccccagatctaccacgggcgcgtgcccggatctggcccgacgaacagcggtggagctcgcgcggtgttccattcatggattgggatctcaagatgtcggtctcctaggacctccgcgacttcccccgcgacagcgtcgggcattgccgccgcagctgccgcgccttccctcgcgacggcgccgagccgagcggagtgctccgtcgacctcaagctcggcaggacgacaccaccacgaaggagccggtggctgcaaccgcagcgccgtccgccagcccgatgggcggcgtcgggcattgccgccgcagctgccgagccttcccccgcgacggtgctgagccgggcggagtgctccgtcgacctcaagctcggcgggctaggcccaggagcagcccccggccccggggacctgcgacctgtacaagggccgctgggtgtacgacgagtcccgcgcgccgctgtacaaggagtccgactgcagcttcctcacggagcaggtcacctgtatgcgcaacggccgacgcgacgacgactaccagaagtggcgctggcagcccgacggctgcgatctccccaggtaccaccgccttgcttcctcgcttgcctgccactgattctacagaaacggtgcctatacgtatacgtgtacggtttacgcggcccggcgcgcgtcgtagggtaggtgcgcgttttcgtttgcgggctggatactgtgaattctagcaaaattaccttaattattagctgagcacacctctgtacaccataattatccgagactgagttgaatctgtatgtagaacctgctatgggatggcacttcttgtgactatgttagcagtagattcgtgtttgactgtagtagtaaaataaattgttgatcccaatggattgttctacaacctgtatctattttatgagtcggatccaatgccatctgccgccatgtcaaagcgaggtaagcagcctcttttaccaactggattcggccatttctcgtcgctcgatctggctataaatctcgcctgctcgtgcatgtgacatagttcggctgcttcaaggtgctcggaaaggggatgctgttgtccaaccccatcattgttagggccaagctcatctccaagatcatcgagaagaggatcaatgttactggaggcactgtcttgctgaccgccacatagatgctgtcgacggatatgcatagaagagaacatatatgcataaaagggagtaaaactaagatttggatattttcatccggacacagagtaaagaattctccactctcttgacttgacgaggctatataaccagaggccatcagaggagaactgaagactgagagcattctctgcttataatctttattcctctatattctaaattatttttttcaatccccttccacctggattcgattcgaatcccacaccaccacgtggtgttcttcctatatcgaataaacgttgtttcgcttgtctaatgatcgatagggcactgaaagagtcattcctagagactctacggaaggacacaacggagatggagcagcctgcttgagaagaggcggcggaggagaaggaagcgctcaacctagactcgtggtcgtcgaccagcatgcgccttgacgtcctcttttttgattcatttatttgattttttgaacaaaattgcccttgtctttgtccttcctcccttttttcattttcttaatgccctcatgtaaaatataaggcatgtgttgttcaaatctttcttttaaaactacatgtatttcgtgtgttctatgatgatatatacagaaactggtcttcttgatatgttgatagtggtctgtttgctcttgaaccatggccattcagtgtaatccgtgaatgtcatatattatactccctctattttgaaatatagaacattgaggacatgctacaactaattagcctttttattttgaatcaagttttctctttctgccaaatcttgctattaagcaatagtgcatgcatattttttttctaaatcagaccattttctataggacaaaggagggcatatggaaggacataaaggaaggagggatactggatgaacatatcgtgcatgagaaagaaattgctatttctgatattcaacaaactgttgaatctgttcagcttgacatcaagcaccttcttgaggcagcagcagcaaaagtggcagaagttcagctagaggtgaatcaactttatggttttgctgaaactctgaattcacttaacatcatccaagagcatgatattgttttcaaggatatgcttcattcagagctgactggactaaccaataccatcggggagagctacaggattcaagatgaatgcaagctcccaatgcacatatcgcctgacgtgaacctcgatcggcatcaggaggccaacggaggatcagagcaggaaggcgtggagcttgagctgcagcgagagcttgggccggaaaaactcagggagaagctgaggcaggagtgcctgtggaaggggacggaactggcacatggggtggctgacgccctcttcgctgtatcacccaccgaggacctcgacggccctattgtacacctcccaccgcccgctgttcgactcccgcgcgagaagcatcttggtgctgggacctcactgccaggattagtagctgcaaagatacttgtgttgccaccttatcagggtgaaggctatggtcttggtcttcttgaagcaatcaattatattgcacagtctaagaacatttacgatgttacaatagaaagcccttctgattccttgcagtatgtgagatcatccattgactgcctctgtttgctcatgtttgatccgatcaaacctgcactcggtgctattgtctcgtctctgaaggagaccaacctgtcaaaaagggcccaaagtttgagaatggttccaccagctgacctgatggagactatatgtcagaagctgaagataaagaagaaacagttccttcggtgctgggaaattctgatcttcctaagcctcgactctcaggatcataagagcgtggacaactttagggcctgcatatatgacttcatgaagggggagatccttggcagtgcctctagaactaacaggaagcgtctgttgtagatgccaaccagtttcaataaggaggcatcttttgctgtgtattggacacatgagattggggatgaggatgaacaaactgttgagcagcagccagaggatctgaggacgcaggagcaacagctcaatgagctcgtggacatccaaatcgaggatattgctggggtcgccaagaacgtcacttcacgtggcaaggataagatggcagagctggcggttcaatgaatttgggtgaggttcctacttcaaacgacgttaaaatgttgtcgtagcttatctggtgaggtctcttttacgggttggcttcttggtagaaagggaatgtcacagcataggcactgagtagattgtcacggcagattattatgtacttcaattctggaatatttgatgggaatgctattttagattgcttggtaagtgggaaccgcctcaaatcacagaagtagaagcagcttccgattcagccggaaccatttctccaaaaatg

SEQ ID NO: 217911 - DNA, 3271 bp, Zea Mays
aaatatataagagattagtgtagcacggttctgccagtgccatccgcgccctcagccgaggatctccattctcctccccacgcagaatccaccgcgaggttgcagtggtgtcgtgctccccagatctaccacgggcgcgtgcccggatctggcccgacgaacagcggtggagctcgcgcggtgttccattcatggattgggatctcaagatgtcggtctcctaggacctccgcgacttcccccgcgacagcgtcgggcattgccgccgcagctgccgcgccttccctcgcgacggcgccgagccgagcggagtgctccgtcgacctcaagctcggcaggacgacaccaccacgaaggagccggtggctgcaaccgcagcgccgtccgccagcccgatgggcggcgtcgggcattgccgccgcagctgccgagccttcccccgcgacggtgctgagccgggcggagtgctccgtcgacctcaagctcggcgggctaggcccaggagcagcccccggccccggggacctgcgacctgtacaagggccgctgggtgtacgacgagtcccgcgcgccgctgtacaaggagtccgactgcagcttcctcacggagcaggtcacctgtatgcgcaacggccgacgcgacgacgactaccagaagtggcgctggcagcccgacggctgcgatctccccagttcggctgcttcaaggtgctcggaaaggggatgctgttgtccaaccccatcattgttagggccaagctcatctccaagatcatcgagaagaggatcaatgttactggaggcactgtcttgctgaccgccacatagatgctgtcgacggatatgcatagaagagaacatatatgcataaaagggagtaaaactaagatttggatattttcatccggacacagagtaaagaattctccactctcttgacttgacgaggctatataaccagaggccatcagaggagaactgaagactgagagcattctctgcttataatctttattcctctatattctaaattatttttttcaatccccttccacctggattcgattcgaatcccacaccaccacgtggtgttcttcctatatcgaataaacgttgtttcgcttgtctaatgatcgatagggcactgaaagagtcattcctagagactctacggaaggacacaacggagatggagcagcctgcttgagaagaggcggcggaggagaaggaagcgctcaacctagactcgtggtcgtcgaccagcatgcgccttgacgtcctcttttttgattcatttatttgattttttgaacaaaattgcccttgtctttgtccttcctcccttttttcattttcttaatgccctcatgtaaaatataaggcatgtgttgttcaaatctttcttttaaaactacatgtatttcgtgtgttctatgatgatatatacagaaactggtcttcttgatatgttgatagtggtctgtttgctcttgaaccatggccattcagtgtaatccgtgaatgtcatatattatactccctctattttgaaatatagaacattgaggacatgctacaactaattagcctttttattttgaatcaagttttctctttctgccaaatcttgctattaagcaatagtgcatgcatattttttttctaaatcagaccattttctataggacaaaggagggcatatggaaggacataaaggaaggagggatactggatgaacatatcgtgcatgagaaagaaattgctatttctgatattcaacaaactgttgaatctgttcagcttgacatcaagcaccttcttgaggcagcagcagcaaaagtggcagaagttcagctagaggtgaatcaactttatggttttgctgaaactctgaattcacttaacatcatccaagagcatgatattgttttcaaggatatgcttcattcagagctgactggactaaccaataccatcggggagagctacaggattcaagatgaatgcaagctcccaatgcacatatcgcctgacgtgaacctcgatcggcatcaggaggccaacggaggatcagagcaggaaggcgtggagcttgagctgcagcgagagcttgggccggaaaaactcagggagaagctgaggcaggagtgcctgtggaaggggacggaactggcacatggggtggctgacgccctcttcgctgtatcacccaccgaggacctcgacggccctattgtacacctcccaccgcccgctgttcgactcccgcgcgagaagcatcttggtgctgggacctcactgccaggattagtagctgcaaagatacttgtgttgccaccttatcagggtgaaggctatggtcttggtcttcttgaagcaatcaattatattgcacagtctaagaacatttacgatgttacaatagaaagcccttctgattccttgcagtatgtgagatcatccattgactgcctctgtttgctcatgtttgatccgatcaaacctgcactcggtgctattgtctcgtctctgaaggagaccaacctgtcaaaaagggcccaaagtttgagaatggttccaccagctgacctgatggagactatatgtcagaagctgaagataaagaagaaacagttccttcggtgctgggaaattctgatcttcctaagcctcgactctcaggatcataagagcgtggacaactttagggcctgcatatatgacttcatgaagggggagatccttggcagtgcctctagaactaacaggaagcgtctgttgtagatgccaaccagtttcaataaggaggcatcttttgctgtgtattggacacatgagattggggatgaggatgaacaaactgttgagcagcagccagaggatctgaggacgcaggagcaacagctcaatgagctcgtggacatccaaatcgaggatattgctggggtcgccaagaacgtcacttcacgtggcaaggataagatggcagagctggcggttcaatgaatttgggtgaggttcctacttcaaacgacgttaaaatgttgtcgtagcttatctggtgaggtctcttttacgggttggcttcttggtagaaagggaatgtcacagcataggcactgagtagattgtcacggcagattattatgtacttcaattctggaatatttgatgggaatgctattttagattgcttggtaagtgggaaccgcctcaaatcacagaagtagaagcagcttccgattcagccggaaccatttctccaaaaatg

SEQ ID NO: 217912 - DNA, 4990 bp, Zea Mays
aaatatataagagattagtgtagcacggttctgccagtgccatccgcgccctcagccgaggatctccattctcctccccacgcagaatccaccgcgaggtctccgccgccctaaccgcgcccttccatccatggttctgcagccgcgccgaaatcctcctgtcccaaaatctcgtcggcctggccacgatgagtgcgccttctctgaccctgggcttttgacccctcgccaggttgcagtggtgtcgtgctccccagatctaccacgggcgcgtgcccggatctggcccgacgaacagcggtggagctcgcgcggtgttccattcatggattgggatctcaagatgtcggtctcctaggacctccgcgacttcccccgcgacagcgtcgggcattgccgccgcagctgccgcgccttccctcgcgacggcgccgagccgagcggagtgctccgtcgacctcaagctcggcaggacgacaccaccacgaaggagccggtggctgcaaccgcagcgccgtccgccagcccgatgggcggcgtcgggcattgccgccgcagctgccgagccttcccccgcgacggtgctgagccgggcggagtgctccgtcgacctcaagctcggcgggctaggtatgtttgctctcaggtacccgagaatcagaggctccttgtatgacggcgacggcggcgcgcaggcccaggagcagcccccggccccggggacctgcgacctgtacaagggccgctgggtgtacgacgagtcccgcgcgccgctgtacaaggagtccgactgcagcttcctcacggagcaggtcacctgtatgcgcaacggccgacgcgacgacgactaccagaagtggcgctggcagcccgacggctgcgatctccccaggtaccaccgccttgcttcctcgcttgcctgccactgattctacagaaacggtgcctatacgtatacgtgtacggtttacgcggcccggcgcgcgtcgtagggtaggtgcgcgttttcgtttgcgggctggatactgtgaattctagcaaaattaccttaattattagctgagcacacctctgtacaccataattatccgagactgagttgaatctgtatgtagaacctgctatgggatggcacttcttgtgactatgttagcagtagattcgtgtttgactgtagtagtaaaataaattgttgatcccaatggattgttctacaacctgtatctattttatgagtcggatccaatgccatctgccgccatgtcaaagcgaggtaagcagcctcttttaccaactggattcggccatttctcgtcgctcgatctggctataaatctcgcctgctcgtgcatgtgacatagttcggctgcttcaaggtgctcggaaaggggatgctgttgtccaaccccatcattgttagggccaagctcatctccaagatcatcgagaagaggatcaatgttactggaggcactgtcttgctgaccgccacatagatgctgtcgacggatatgcatagaagagaacatatatgcataaaagggagtaaaactaagatttggatattttcatccggacacagagtaaagaattctccactctcttgacttgacgaggctatataaccagaggccatcagaggagaactgaagactgagagcattctctgcttataatctttattcctctatattctaaattatttttttcaatccccttccacctggattcgattcgaatcccacaccaccacgtggtgttcttcctatatcgaataaacgttgtttcgcttgtctaatgatcgatagggcactgaaagagtcattcctagagactctacggaaggacacaacggagatggagcagcctgcttgagaagaggcggcggaggagaaggaagcgctcaacctagactcgtggtcgtcgaccagcatgcgccttgacgtcctcttttttgattcatttatttgattttttgaacaaaattgcccttgtctttgtccttcctcccttttttcattttcttaatgccctcatgtaaaatataaggcatgtgttgttcaaatctttcttttaaaactacatgtatttcgtgtgttctatgatgatatatacagaaactggtcttcttgatatgttgatagtggtctgtttgctcttgaaccatggccattcagtgtaatccgtgaatgtcatatattatactccctctattttgaaatatagaacattgaggacatgctacaactaattagcctttttattttgaatcaagttttctctttctgccaaatcttgctattaagcaatagtgcatgcatattttttttctaaatcagaccattttctataggacaaaggagggcatatggaaggacataaaggaaggagggatactggatgaacatatcgtgcatgagaaagaaattgctatttctgatattcaacaaactgttgaatctgttcagcttgacatcaagcaccttcttgaggcagcagcagcaaaagtggcagaagttcagctagaggtgaatcaactttatggttttgctgaaactctgaattcacttaacatcatccaagagcatgatattgttttcaaggatatgcttcattcagagctgactggactaaccaataccatcggggagagctacaggattcaaggtactacggtaatgaattcctatgtctcgggatttttgtgccagggaggccataatctgtcagagacgaaaacaagaaagaacccaactcagtttctttgaagcacatatcacctccttcctattcacctcttcagatgaatgcaagctcccaatgcacatatcgcctgacgtgaacctcgatcggcatcaggaggccaacggaggatcagagcaggaaggcgtggagcttgagctgcagcgagagcttgggcgtgagctgcaagaccaatgcaggcgtctcagtcagcaatacaaccgcacaactctcctactgtctatgaggtgtcagatgttcatgcatattccagtaaagttgaacagagccatcaggagtgcgtacatacagggcatggaaattatctccaaaggccgagccatcttgtagctctgctatggattcgagtcaccgtgggttgccgtgagaagcatgagagccacacagcctgcagatgcgagcagcagtcttcttaatgataaatatgtctacagcttcagtcataactatactgatgcattttaactgcaacgtcactcatcacaataaacatgaaggacataagctttatctcagacactcaatgttgtgcgataacctaatcaggtcacatatgttgtctggatcgtattaccagatgtcatctgataatgtgcaattttagagagtgttgaaggcttctttataacgttctcgagttgtagggttctaaggtccgactggcacgaggctcgttcagtcgtctcgaggagtagcaccccaagatgagtcagggttctctcaattgcgaatgctcactcttgagtaaagggataggctaaagagcagctccatccagttcgacgaccatagtttttgcgagtgggtgcacaacctcaaattagcaagtacatgcctacatcgtcgacaactaaaggcaattactgagggagctcggtggggaagacctaaaggtgaagacgcggaaaaactcagggagaagctgaggcaggagtgcctgtggaaggggacggaactggcacatggggtggctgacgccctcttcgctgtatcacccaccgaggacctcgacggccctattgtacacctcccaccgcccgctgttcgactcccgcgcgagaagcatcttggtgctgggacctcactgccaggattagtagctgcaaaggttggggcagatgtaacactaacagacatcgcgcagacattattgtttctttaattgcaggccactggtgctgtactacgtggtcctgacgttgcgggacagcgtgcacaaggtcttctacgccgtcgtcgaggccgctgcagttcgcgcagacaacagccatcttggagatacttgtgttgccaccttatcagggtgaaggctatggtcttggtcttcttgaagcaatcaattatattgcacagtctaagaacatttacgatgttacaatagaaagcccttctgattccttgcagtatgtgagatcatccattgactgcctctgtttgctcatgtttgatccgatcaaacctgcactcggtgctattgtctcgtctctgaaggagaccaacctgtcaaaaagggcccaaagtttgagaatggttccaccagctgacctgatggagactatatgtcagaagctgaagataaagaagaaacagttccttcggtgctgggaaattctgatcttcctaagcctcgactctcaggatcataagagcgtggacaactttagggcctgcatatatgacttcatgaagggggagatccttggcagtgcctctagaactaacaggaagcgtctgttgtagatgccaaccagtttcaataaggaggcatcttttgctgtgtattggacacatgagattggggatgaggatgaacaaactgttgagcagcagccagaggatctgaggacgcaggagcaacagctcaatgagctcgtggacatccaaatcgaggatattgctggggtcgccaagaacgtcacttcacgtggcaaggataagatggcagagctggcggttcaatgaatttgggtgaggttcctacttcaaacgacgttaaaatgttgtcgtagcttatctggtgaggtctcttttacgggttggcttcttggtagaaagggaatgtcacagcataggcactgagtagattgtcacggcagattattatgtacttcaattctggaatatttgatgggaatgctattttagattgcttggtaagtgggaaccgcctcaaatcacagaagtagaagcagcttccgattcagccggaaccatttctccaaaaatg

SEQ ID NO: 217913 - DNA, 1675 bp, Zea Mays
aggctctaggttctttgaacattttaagttgttcactccaagtgtgaaaccaggtccctatttggacctgaagtgaagcattttaaagttgaaggacccagattctcacttcgagagtttatgaacctagatgagaatctaaggctctggaagttatggaacttgaccagaaaatagatctagttcatgagcttgatggtcatattatgcgatgtgtccgtgatcaaaatggaaatcacgttatacagaagtgcattgagtgtgtccccacagaacatattggttttgtagtgtctgcttttcagggacaagttactagcctttcaatgcatccatatggctgccgtgtaattcagagaatcttggagcactgcggtggtaactcacaaggccagtgcataatagacgagatattacagtgggtgtgcatccttgcgcaggatcagtatggcaactatgttacacagcatgttctagaaagaggaaaagctcatgagaggagccaaattattactaaattggccgggcaggttgttaccatgagccaaaataaatatgcatcaaatgtgatagagaagtgttttcaacatggtgatattgcggagcgggatcttctgatcagacggattgtggagcagacagagggcaacaacaatttattggtctgtttggtagtgtagtaaaagtgttccctccattatcccttcctctctttgccaaacgggtcggggttctggaaggtagggctaggacatggggacctgatctcagttcggtacagccaatcagataacaccatgagtatctcagttctgctattccagctttctgggagctgcgaatcctatggattaccaagacatgggatctctgtaaacttatttcttcctgtgttgatgttagtttatatttcctaatcaccttttatattcaatcaggcaatgatgaaggaccagtatgctaattacgtggtccagaagatacttgaaacttgcaacgaggatcagcgggagcttctgctcagccgcgtaaaggatcatatgcaagcattgaggaagtacacatacggcaagcacatcgtaagccgagtcgagcagctctgtggcgacgttgtcaccctttcaggaactgccgagtcaggttcttgaaacgaaccgccgcctaattcttcataggctggagggtgtcctgctcttttgctcattccgtcagtgacgaagaaagcaaaacggatcaagtctaactctggcgcttcagaacagactaacaaagctgtcgtcgaagattgtataggtgtgactctgttcagggatagtcttcaggttctagaacagaagggtagtggtgtgcatcagtgtatctgtttactggataatagtggttggttaggtgtgtgcagaaaaagtttagtgctatgctttgtatgtgatacatattaactatgccttggaatgttcatatgttgtcctgattacgtgtgatatctctcgttcagttcaagttgcgttttctacatggccatgggaccatctgccgatttgatgaaaaaggaaaggttgtgcacctttgtaagcgggcatggagatgagctgcgctattttttttttttacaaaatgtctgctgggattgaactgtctattttataaaaatatcatattttcttttaatgtcaac

SEQ ID NO: 217914 - DNA, 1783 bp, Zea Mays
tactcttcaatctttgtttaatataattaaatcagatgtgactaattcgtaataagagcaaagcacacctaggttcttaaaacttttcaggattctcacctaagttcacaaacttttgaagtgaggctctaggttctttgaacattttaagttgttcactccaagtgtgaaaccaggtccctatttggacctgaagtgaagcattttaaagttgaaggacccagattctcacttcgagagtttatgaacctagatgagaatctaaggctctggaagttatggaacttgaccagaaaatagatctagttcatgagcttgatggtcatattatgcgatgtgtccgtgatcaaaatggaaatcacgttatacagaagtgcattgagtgtgtccccacagaacatattggttttgtagtgtctgcttttcagggacaagttactagcctttcaatgcatccatatggctgccgtgtaattcagagaatcttggagcactgcggtggtaactcacaaggccagtgcataatagacgagatattacagtgggtgtgcatccttgcgcaggatcagtatggcaactatgttacacagcatgttctagaaagaggaaaagctcatgagaggagccaaattattactaaattggccgggcaggttgttaccatgagccaaaataaatatgcatcaaatgtgatagagaagtgttttcaacatggtgatattgcggagcgggatcttctgatcagacggattgtggagcagacagagggcaacaacaatttattggtctgtttggtagtgtagtaaaagtgttccctccattatcccttcctctctttgccaaacgggtcggggttctggaaggtagggctaggacatggggacctgatctcagttcggtacagccaatcagataacaccatgagtatctcagttctgctattccagctttctgggagctgcgaatcctatggattaccaagacatgggatctctgtaaacttatttcttcctgtgttgatgttagtttatatttcctaatcaccttttatattcaatcaggcaatgatgaaggaccagtatgctaattacgtggtccagaagatacttgaaacttgcaacgaggatcagcgggagcttctgctcagccgcgtaaaggatcatatgcaagcattgaggaagtacacatacggcaagcacatcgtaagccgagtcgagcagctctgtggcgacggaactgccgagtcaggttcttgaaacgaaccgccgcctaattcttcataggctggagggtgtcctgctcttttgctcattccgtcagtgacgaagaaagcaaaacggatcaagtctaactctggcgcttcagaacagactaacaaagctgtcgtcgaagattgtataggtgtgactctgttcagggatagtcttcaggttctagaacagaagggtagtggtgtgcatcagtgtatctgtttactggataatagtggttggttaggtgtgtgcagaaaaagtttagtgctatgctttgtatgtgatacatattaactatgccttggaatgttcatatgttgtcctgattacgtgtgatatctctcgttcagttcaagttgcgttttctacatggccatgggaccatctgccgatttgatgaaaaaggaaaggttgtgcacctttgtaagcgggcatggagatgagctgcgctattttttttttttacaaaatgtctgctgggattgaactgtctattttataaaaatatcatattttcttttaatgtcaac

SEQ ID NO: 217915 - DNA, 3851 bp, Zea Mays
gtcactggtgcttggtcgcctagggtttcgggccagccggctggcttggacgcgccaagtctaatggctactgagagtgctttccgattgattggtgggacgggggctagggactggagtaagggatttggtgcatttggctcttcagcaggtgccttatcaggggaagacttgggatttgtggataatgacactggggtttatgggggctggaacaaatctgttccaaatcgtagtggaagcgcaccgcctagcatggaaggatctcttgctgctcttggccatctcattgatcagcagagtgggagctttgaagctagtttgacaaccttggataacataactgacagttccaaatctgaggagcaactacgtgctgatccagcatattttgagtattatggctccaaggtgaatctgaatccaaggctccctccgccacttatttcaagggagagtcgccgattaatgaaccgtgttggcaaggctaaagagtggaggatggtctcccaagataacagcagcaaaggctcaatatacgttcctcgatctatgttgtcaactcacaaagaagaacctgaggatgataaatctccaagattggattcaagttcagtggaggatgcccagattgtctccagtgcatccaactttcagagccaggattttatgctggagaggtttcaacagagtgttgcttcttcgcctgatagttcatcttctaatccttcaaatagcaacactggtgattctatgcctgtatattctgacataaatttgttaaagagtttgtcatttgatgctttgaagcaatcggatttgaactcttggacaccaaaaggcccactgaaaagtaatgttaacaatgacctttcatcgccacccctttccagttcatcatatcctggtagcaaaactggtacgcaaacttttgagcaagaaaaggctgctgctgacaccaaacatggaaatgttgtgcttggcagtggcgcagctgttactgaagttgataatgtggactccattatgaagaatttgaagttaagtttggatgtccatacatcctcacctgccaagcagaggtggcaggacaatgtcttgcagcagtatggttcctttttaccagcccaaggtgatcctattcaattgactactcaaggaccccatcctcctcatgtaccttttgttgataacttgtctcatgctcagctcaagttgcctgacatccaccaaaatttaccacaacctagtatgacaacacctttctatacaccaaattcttttgggaacccttattatcagaatttgcaccctgctaatgcttttccaacctcaattggaactgggggttatgctgtaagtggttctattttgccaccgtttatggctggctatgctccccaaggtcctcttgctacacctcttgacagttctatgactccaagctttagtggcaggccatctggatttcttccagcagggaatcttacagggggaacagattttatgcagtcatgtaaagtatacggacaatttgagcctggtatgcagccatccattcccgatccgaacttcattcatttctttcagcatccctctttatttcagtatactggaggaaatcaatacaatacaatgggtccaagatttactgttgttgggaatttagctgaaagctttgattcacaaaacacgatacctcaagctgcatctgcatatccatctgatcagaggcttccactgccaataactggctttcctaattctcctacagccagaagaggagggactgttccaaattatcaaggcatttcatcctacattggagtgccaatgacttatcctactagtccagtgtttcagggacaaacattgcctggagtattgcctcctgttaggagaaacgactctgctggatttctgcccccctcaagaaacatcactggtagccctggaattcaagggcagcgagcaagacagaagtttgatgaatcaaagacctgctctttcttagaagagttgaagtccaacagagcgcgcatggttgagctttctgacatcacaggccgtgtagttgaatacagtgctgaccaacatggtagccgattcatccagcagaagttggaaaactgcaccgccgaagagaagacatctgtgtttgccgagattcttcctcatgcttcagcattaatgactgacgtttttgggaattatgtgatccaaaagttttttgaacatggaactcgtgagcaaaggagggatcttgccaccaagcttgttggtcacgttttgcctttgagtcttcagatgtatggctgccgtgtaatccagaaggctctggaagttatggaacttgaccagaaaatagatctagttcatgagcttgatggtcatattatgcgatgtgtccgtgatcaaaatggaaatcacgttatacagaagtgcattgagtgtgtccccacagaacatattggttttgtagtgtctgcttttcagggacaagttactagcctttcaatgcatccatatggctgccgtgtaattcagagaatcttggagcactgcggtggtaactcacaaggccagtgcataatagacgagatattacagtgggtgtgcatccttgcgcaggatcagtatggcaactatgttacacagcatgttctagaaagaggaaaagctcatgagaggagccaaattattactaaattggccgggcaggttgttaccatgagccaaaataaatatgcatcaaatgtgatagagaagtgttttcaacatggtgatattgcggagcgggatcttctgatcagacggattgtggagcagacagagggcaacaacaatttattggtctgtttggtagtgtagtaaaagtgttccctccattatcccttcctctctttgccaaacgggtcggggttctggaaggtagggctaggacatggggacctgatctcagttcggtacagccaatcagataacaccatgagtatctcagttctgctattccagctttctgggagctgcgaatcctatggattaccaagacatgggatctctgtaaacttatttcttcctgtgttgatgttagtttatatttcctaatcaccttttatattcaatcaggcaatgatgaaggaccagtatgctaattacgtggtccagaagatacttgaaacttgcaacgaggatcagcgggagcttctgctcagccgcgtaaaggatcatatgcaagcattgaggaagtacacatacggcaagcacatcgtaagccgagtcgagcagctctgtggcgacggaactgccgagtcaggttcttgaaacgaaccgccgcctaattcttcataggctggagggtgtcctgctcttttgctcattccgtcagtgacgaagaaagcaaaacggatcaagtctaactctggcgcttcagaacagactaacaaagctgtcgtcgaagattgtataggtgtgactctgttcagggatagtcttcaggttctagaacagaagggtagtggtgtgcatcagtgtatctgtttactggataatagtggttggttaggtgtgtgcagaaaaagtttagtgctatgctttgtatgtgatacatattaactatgccttggaatgttcatatgttgtcctgattacgtgtgatatctctcgttcagttcaagttgcgttttctacatggccatgggaccatctgccgatttgatgaaaaaggaaaggttgtgcacctttgtaagcgggcatggagatgagctgcgctattttttttttttacaaaatgtctgctgggattgaactgtctattttataaaaatatcatattttcttttaatgtcaac

SEQ ID NO: 217916 - DNA, 4810 bp, Zea Mays
aaaaaaagtaaagcggtggtggcggtggagcaaaggaaacctcctggcagagagatggcggataaggccaaggtggttggtgcccatggagaaagggatgatgtttttttgtggggagagcttcagcacgatgactgcagatcaggtgaccaactaggaggtgtcaaattgctgagtctaatggctactgagagtgctttccgattgattggtgggacgggggctagggactggagtaagggatttggtgcatttggctcttcagcaggtgccttatcaggggaagacttgggatttgtggataatgacactggggtttatgggggctggaacaaatctgttccaaatcgtagtggaagcgcaccgcctagcatggaaggatctcttgctgctcttggccatctcattgatcagcagagtgggagctttgaagctagtttgacaaccttggataacataactgacagttccaaatctgaggagcaactacgtgctgatccagcatattttgagtattatggctccaaggtgaatctgaatccaaggctccctccgccacttatttcaagggagagtcgccgattaatgaaccgtgttggcaaggctaaagagtggaggatggtctcccaagataacagcagcaaaggctcaatatacgttcctcgatctatgttgtcaactcacaaagaagaacctgaggatgataaatctccaagattggattcaagttcagtggaggatgcccagattgtctccagtgcatccaactttcagagccaggattttatgctggagaggtttcaacagagtgttgcttcttcgcctgatagttcatcttctaatccttcaaatagcaacactggtgattctatgcctgtatattctgacataaatttgttaaagagtttgtcatttgatgctttgaagcaatcggatttgaactcttggacaccaaaaggcccactgaaaagtaatgttaacaatgacctttcatcgccacccctttccagttcatcatatcctggtagcaaaactggtacgcaaacttttgagcaagaaaaggctgctgctgacaccaaacatggaaatgttgtgcttggcagtggcgcagctgttactgaagttgataatgtggactccattatgaagaatttgaagttaagtttggatgtccatacatcctcacctgccaagcagaggtggcaggacaatgtcttgcagcagtatggttcctttttaccagcccaaggtgatcctattcaattgactactcaaggaccccatcctcctcatgtaccttttgttgataacttgtctcatgctcagctcaagttgcctgacatccaccaaaatttaccacaacctagtatgacaacacctttctatacaccaaattcttttgggaacccttattatcagaatttgcaccctgctaatgcttttccaacctcaattggaactgggggttatgctgtaagtggttctattttgccaccgtttatggctggctatgctccccaaggtcctcttgctacacctcttgacagttctatgactccaagctttagtggcaggccatctggatttcttccagcagggaatcttacagggggaacagattttatgcagtcatgtaaagtatacggacaatttgagcctggtatgcagccatccattcccgatccgaacttcattcatttctttcagcatccctctttatttcagtatactggaggaaatcaatacaatacaatgggtccaagatttactgttgttgggaatttagctgaaagctttgattcacaaaacacgatacctcaagctgcatctgcatatccatctgatcagaggcttccactgccaataactggctttcctaattctcctacagccagaagaggagggactgttccaaattatcaaggcatttcatcctacattggagtgccaatgacttatcctactagtccagtgtttcagggacaaacattgcctggagtattgcctcctgttaggagaaacgactctgctggatttctgcccccctcaagaaacatcactggtagccctggaattcaagggcagcgagcaagacagaagtttgatgaatcaaagacctgctctttcttagaagagttgaagtccaacagagcgcgcatggttgagctttctgacatcacaggccgtgtagttgaatacagtgctgaccaacatggtagccgattcatccagcagaagttggaaaactgcaccgccgaagagaagacatctgtgtttgccgagattcttcctcatgcttcagcattaatgactgacgtttttgggaattatgtgatccaaaagttttttgaacatggaactcgtgagcaaaggagggatcttgccaccaagcttgttggtcacgttttgcctttgagtcttcagatgtatggctgccgtgtaatccagaagcctcgcaaaccctatcgcctatccctctcgcggtcttgcctcggtctctggcggcggcaccgccgttttacactcctcctccttcgacaacccgtcgcagtagcgtccgtctctggtgtccggctgtccggctctggactcccgacctcgacatcaggatctgcgcctcccgaccggtatgtgggggctctgaagaaggtgcagaaggatctgggcgcgtcggtgttcgagccgctggtgcaggcgtacgccgccgtcgggaagttccctgggatgtggcagcggctgaagatcgagaacgtggaggtcggggaggggacggcccagctgcttgactctatctgcgccgatcaatagcccaagcacgtcctagaggcggcgacagaaatgagttgctggcaagtttgacaaaacaagcagacatggtcttggtggctcagcaggaattaatcacccaaaaaaacagttacaagttgggttcatgcatgtcttacgtcaaggattgtactccccgttaaactgttggttcgggccagtggccggcccggtacgttcaggcccaccgggcgaacgggccggcccggcacgatttatccctgtgcgtgccgggtttgggcatgtcgctaggcacgtgggccagcacgacccggcccgaagcatcaacgggccgtgcctggcccggccctatccgtaccgggccgaaacgggttcggaccgggtccgtgccgggtggcccgtttggacatctataggtccctatttggacctgaagtgaagcattttaaagttgaaggacccagattctcacttcgagagtttatgaacctagatgagaatctaaggctctggaagttatggaacttgaccagaaaatagatctagttcatgagcttgatggtcatattatgcgatgtgtccgtgatcaaaatggaaatcacgttatacagaagtgcattgagtgtgtccccacagaacatattggttttgtagtgtctgcttttcagggacaagttactagcctttcaatgcatccatatggctgccgtgtaattcagagaatcttggagcactgcggtggtaactcacaaggccagtgcataatagacgagatattacagtgggtgtgcatccttgcgcaggatcagtatggcaactatgttacacagcatgttctagaaagaggaaaagctcatgagaggagccaaattattactaaattggccgggcaggttgttaccatgagccaaaataaatatgcatcaaatgtgatagagaagtgttttcaacatggtgatattgcggagcgggatcttctgatcagacggattgtggagcagacagagggcaacaacaatttattggtctgtttggtagtgtagtaaaagtgttccctccattatcccttcctctctttgccaaacgggtcggggttctggaaggtagggctaggacatggggacctgatctcagttcggtacagccaatcagataacaccatgagtatctcagttctgctattccagctttctgggagctgcgaatcctatggattaccaagacatgggatctctgtaaacttatttcttcctgtgttgatgttagtttatatttcctaatcaccttttatattcaatcaggcaatgatgaaggaccagtatgctaattacgtggtccagaagatacttgaaacttgcaacgaggatcagcgggagcttctgctcagccgcgtaaaggatcatatgcaagcattgaggaagtacacatacggcaagcacatcgtaagccgagtcgagcagctctgtggcgacggaactgccgagtcaggttcttgaaacgaaccgccgcctaattcttcataggctggagggtgtcctgctcttttgctcattccgtcagtgacgaagaaagcaaaacggatcaagtctaactctggcgcttcagaacagactaacaaagctgtcgtcgaagattgtataggtgtgactctgttcagggatagtcttcaggttctagaacagaagggtagtggtgtgcatcagtgtatctgtttactggataatagtggttggttaggtgtgtgcagaaaaagtttagtgctatgctttgtatgtgatacatattaactatgccttggaatgttcatatgttgtcctgattacgtgtgatatctctcgttcagttcaagttgcgttttctacatggccatgggaccatctgccgatttgatgaaaaaggaaaggttgtgcacctttgtaagcgggcatggagatgagctgcgctattttttttttttacaaaatgtctgctgggattgaactgtctattttataaaaatatcatattttcttttaatgtcaac

SEQ ID NO: 217917 - DNA, 4042 bp, Zea Mays
gtcaaacatgcctgcacagccattttgaggcttctataagtgaccgatccgccctctggtccatcgtcgtctgcagcaagtagaaaaaagggaaaaaaagtaaagcggtggtggcggtggagcaaaggaaacctcctggcagagagatggcggataaggccaaggtggttggtgcccatggagaaagggatgatgtttttttgtggggagagcttcagcacgatgactgcagatcaggtgaccaactaggaggtgtcaaattgctgagtctaatggctactgagagtgctttccgattgattggtgggacgggggctagggactggagtaagggatttggtgcatttggctcttcagcaggtgccttatcaggggaagacttgggatttgtggataatgacactggggtttatgggggctggaacaaatctgttccaaatcgtagtggaagcgcaccgcctagcatggaaggatctcttgctgctcttggccatctcattgatcagcagagtgggagctttgaagctagtttgacaaccttggataacataactgacagttccaaatctgaggagcaactacgtgctgatccagcatattttgagtattatggctccaaggtgaatctgaatccaaggctccctccgccacttatttcaagggagagtcgccgattaatgaaccgtgttggcaaggctaaagagtggaggatggtctcccaagataacagcagcaaaggctcaatatacgttcctcgatctatgttgtcaactcacaaagaagaacctgaggatgataaatctccaagattggattcaagttcagtggaggatgcccagattgtctccagtgcatccaactttcagagccaggattttatgctggagaggtttcaacagagtgttgcttcttcgcctgatagttcatcttctaatccttcaaatagcaacactggtgattctatgcctgtatattctgacataaatttgttaaagagtttgtcatttgatgctttgaagcaatcggatttgaactcttggacaccaaaaggcccactgaaaagtaatgttaacaatgacctttcatcgccacccctttccagttcatcatatcctggtagcaaaactggtacgcaaacttttgagcaagaaaaggctgctgctgacaccaaacatggaaatgttgtgcttggcagtggcgcagctgttactgaagttgataatgtggactccattatgaagaatttgaagttaagtttggatgtccatacatcctcacctgccaagcagaggtggcaggacaatgtcttgcagcagtatggttcctttttaccagcccaaggtgatcctattcaattgactactcaaggaccccatcctcctcatgtaccttttgttgataacttgtctcatgctcagctcaagttgcctgacatccaccaaaatttaccacaacctagtatgacaacacctttctatacaccaaattcttttgggaacccttattatcagaatttgcaccctgctaatgcttttccaacctcaattggaactgggggttatgctgtaagtggttctattttgccaccgtttatggctggctatgctccccaaggtcctcttgctacacctcttgacagttctatgactccaagctttagtggcaggccatctggatttcttccagcagggaatcttacagggggaacagattttatgcagtcatgtaaagtatacggacaatttgagcctggtatgcagccatccattcccgatccgaacttcattcatttctttcagcatccctctttatttcagtatactggaggaaatcaatacaatacaatgggtccaagatttactgttgttgggaatttagctgaaagctttgattcacaaaacacgatacctcaagctgcatctgcatatccatctgatcagaggcttccactgccaataactggctttcctaattctcctacagccagaagaggagggactgttccaaattatcaaggcatttcatcctacattggagtgccaatgacttatcctactagtccagtgtttcagggacaaacattgcctggagtattgcctcctgttaggagaaacgactctgctggatttctgcccccctcaagaaacatcactggtagccctggaattcaagggcagcgagcaagacagaagtttgatgaatcaaagacctgctctttcttagaagagttgaagtccaacagagcgcgcatggttgagctttctgacatcacaggccgtgtagttgaatacagccgattcatccagcagaagttggaaaactgcaccgccgaagagaagacatctgtgtttgccgagattcttcctcatgcttcagcattaatgactgacgtttttgggaattatgtgatccaaaagttttttgaacatggaactcgtgagcaaaggagggatcttgccaccaagcttgttggtcacgttttgcctttgagtcttcagatgtatggctgccgtgtaatccagaaggctctggaagttatggaacttgaccagaaaatagatctagttcatgagcttgatggtcatattatgcgatgtgtccgtgatcaaaatggaaatcacgttatacagaagtgcattgagtgtgtccccacagaacatattggttttgtagtgtctgcttttcagggacaagttactagcctttcaatgcatccatatggctgccgtgtaattcagagaatcttggagcactgcggtggtaactcacaaggccagtgcataatagacgagatattacagtgggtgtgcatccttgcgcaggatcagtatggcaactatgttacacagcatgttctagaaagaggaaaagctcatgagaggagccaaattattactaaattggccgggcaggttgttaccatgagccaaaataaatatgcatcaaatgtgatagagaagtgttttcaacatggtgatattgcggagcgggatcttctgatcagacggattgtggagcagacagagggcaacaacaatttattggtctgtttggtagtgtagtaaaagtgttccctccattatcccttcctctctttgccaaacgggtcggggttctggaaggtagggctaggacatggggacctgatctcagttcggtacagccaatcagataacaccatgagtatctcagttctgctattccagctttctgggagctgcgaatcctatggattaccaagacatgggatctctgtaaacttatttcttcctgtgttgatgttagtttatatttcctaatcaccttttatattcaatcaggcaatgatgaaggaccagtatgctaattacgtggtccagaagatacttgaaacttgcaacgaggatcagcgggagcttctgctcagccgcgtaaaggatcatatgcaagcattgaggaagtacacatacggcaagcacatcgtaagccgagtcgagcagctctgtggcgacggaactgccgagtcaggttcttgaaacgaaccgccgcctaattcttcataggctggagggtgtcctgctcttttgctcattccgtcagtgacgaagaaagcaaaacggatcaagtctaactctggcgcttcagaacagactaacaaagctgtcgtcgaagattgtataggtgtgactctgttcagggatagtcttcaggttctagaacagaagggtagtggtgtgcatcagtgtatctgtttactggataatagtggttggttaggtgtgtgcagaaaaagtttagtgctatgctttgtatgtgatacatattaactatgccttggaatgttcatatgttgtcctgattacgtgtgatatctctcgttcagttcaagttgcgttttctacatggccatgggaccatctgccgatttgatgaaaaaggaaaggttgtgcacctttgtaagcgggcatggagatgagctgcgctattttttttttttacaaaatgtctgctgggattgaactgtctattttataaaaatatcatattttcttttaatgtcaac

SEQ ID NO: 217918 - DNA, 4209 bp, Zea Mays
ggaacactttttatttttcaaaggaaaggttaaattgcaccccaatctctgcatacgcaactgacgctttatgatcctgtctattccatccctgccgcacatcgcctcttgcaccaaatccccaaagcacgctgctgtggtcatatccagtcaaacatgcctgcacagccattttgaggcttctataagtgaccgatccgccctctggtccatcgtcgtctgcagcaagtagaaaaaagggaaaaaaagtaaagcggtggtggcggtggagcaaaggaaacctcctggcagagagatggcggataaggccaaggtggttggtgcccatggagaaagggatgatgtttttttgtggggagagcttcagcacgatgactgcagatcaggtgaccaactaggaggtgtcaaattgctgagtctaatggctactgagagtgctttccgattgattggtgggacgggggctagggactggagtaagggatttggtgcatttggctcttcagcaggtgccttatcaggggaagacttgggatttgtggataatgacactggggtttatgggggctggaacaaatctgttccaaatcgtagtggaagcgcaccgcctagcatggaaggatctcttgctgctcttggccatctcattgatcagcagagtgggagctttgaagctagtttgacaaccttggataacataactgacagttccaaatctgaggagcaactacgtgctgatccagcatattttgagtattatggctccaaggtgaatctgaatccaaggctccctccgccacttatttcaagggagagtcgccgattaatgaaccgtgttggcaaggctaaagagtggaggatggtctcccaagataacagcagcaaaggctcaatatacgttcctcgatctatgttgtcaactcacaaagaagaacctgaggatgataaatctccaagattggattcaagttcagtggaggatgcccagattgtctccagtgcatccaactttcagagccaggattttatgctggagaggtttcaacagagtgttgcttcttcgcctgatagttcatcttctaatccttcaaatagcaacactggtgattctatgcctgtatattctgacataaatttgttaaagagtttgtcatttgatgctttgaagcaatcggatttgaactcttggacaccaaaaggcccactgaaaagtaatgttaacaatgacctttcatcgccacccctttccagttcatcatatcctggtagcaaaactggtacgcaaacttttgagcaagaaaaggctgctgctgacaccaaacatggaaatgttgtgcttggcagtggcgcagctgttactgaagttgataatgtggactccattatgaagaatttgaagttaagtttggatgtccatacatcctcacctgccaagcagaggtggcaggacaatgtcttgcagcagtatggttcctttttaccagcccaaggtgatcctattcaattgactactcaaggaccccatcctcctcatgtaccttttgttgataacttgtctcatgctcagctcaagttgcctgacatccaccaaaatttaccacaacctagtatgacaacacctttctatacaccaaattcttttgggaacccttattatcagaatttgcaccctgctaatgcttttccaacctcaattggaactgggggttatgctgtaagtggttctattttgccaccgtttatggctggctatgctccccaaggtcctcttgctacacctcttgacagttctatgactccaagctttagtggcaggccatctggatttcttccagcagggaatcttacagggggaacagattttatgcagtcatgtaaagtatacggacaatttgagcctggtatgcagccatccattcccgatccgaacttcattcatttctttcagcatccctctttatttcagtatactggaggaaatcaatacaatacaatgggtccaagatttactgttgttgggaatttagctgaaagctttgattcacaaaacacgatacctcaagctgcatctgcatatccatctgatcagaggcttccactgccaataactggctttcctaattctcctacagccagaagaggagggactgttccaaattatcaaggcatttcatcctacattggagtgccaatgacttatcctactagtccagtgtttcagggacaaacattgcctggagtattgcctcctgttaggagaaacgactctgctggatttctgcccccctcaagaaacatcactggtagccctggaattcaagggcagcgagcaagacagaagtttgatgaatcaaagacctgctctttcttagaagagttgaagtccaacagagcgcgcatggttgagctttctgacatcacaggccgtgtagttgaatacagtgctgaccaacatggtagccgattcatccagcagaagttggaaaactgcaccgccgaagagaagacatctgtgtttgccgagattcttcctcatgcttcagcattaatgactgacgtttttgggaattatgtgatccaaaagttttttgaacatggaactcgtgagcaaaggagggatcttgccaccaagcttgttggtcacgttttgcctttgagtcttcagatgtatggctgccgtgtaatccagaaggctctggaagttatggaacttgaccagaaaatagatctagttcatgagcttgatggtcatattatgcgatgtgtccgtgatcaaaatggaaatcacgttatacagaagtgcattgagtgtgtccccacagaacatattggttttgtagtgtctgcttttcagggacaagttactagcctttcaatgcatccatatggctgccgtgtaattcagagaatcttggagcactgcggtggtaactcacaaggccagtgcataatagacgagatattacagtgggtgtgcatccttgcgcaggatcagtatggcaactatgttacacagcatgttctagaaagaggaaaagctcatgagaggagccaaattattactaaattggccgggcaggttgttaccatgagccaaaataaatatgcatcaaatgtgatagagaagtgttttcaacatggtgatattgcggagcgggatcttctgatcagacggattgtggagcagacagagggcaacaacaatttattggtctgtttggtagtgtagtaaaagtgttccctccattatcccttcctctctttgccaaacgggtcggggttctggaaggtagggctaggacatggggacctgatctcagttcggtacagccaatcagataacaccatgagtatctcagttctgctattccagctttctgggagctgcgaatcctatggattaccaagacatgggatctctgtaaacttatttcttcctgtgttgatgttagtttatatttcctaatcaccttttatattcaatcaggcaatgatgaaggaccagtatgctaattacgtggtccagaagatacttgaaacttgcaacgaggatcagcgggagcttctgctcagccgcgtaaaggatcatatgcaagcattgaggaagtacacatacggcaagcacatcgtaagccgagtcgagcagctctgtggcgacggaactgccgagtcaggttcttgaaacgaaccgccgcctaattcttcataggctggagggtgtcctgctcttttgctcattccgtcagtgacgaagaaagcaaaacggatcaagtctaactctggcgcttcagaacagactaacaaagctgtcgtcgaagattgtataggtgtgactctgttcagggatagtcttcaggttctagaacagaagggtagtggtgtgcatcagtgtatctgtttactggataatagtggttggttaggtgtgtgcagaaaaagtttagtgctatgctttgtatgtgatacatattaactatgccttggaatgttcatatgttgtcctgattacgtgtgatatctctcgttcagttcaagttgcgttttctacatggccatgggaccatctgccgatttgatgaaaaaggaaaggttgtgcacctttgtaagcgggcatggagatgagctgcgctattttttttttttacaaaatgtctgctgggattgaactgtctattttataaaaatatcatattttcttttaatgtcaac

SEQ ID NO: 217919 - DNA, 4672 bp, Zea Mays
gttctgaggtcctgagccattaaaatttggcgaatatgtctaatggctactgagagtgctttccgattgattggtgggacgggggctagggactggagtaagggatttggtgcatttggctcttcagcaggtgccttatcaggggaagacttgggatttgtggataatgacactggggtttatgggggctggaacaaatctgttccaaatcgtagtggaagcgcaccgcctagcatggaaggatctcttgctgctcttggccatctcattgatcagcagagtgggagctttgaagctagtttgacaaccttggataacataactgacagttccaaatctgaggagcaactacgtgctgatccagcatattttgagtattatggctccaaggtgaatctgaatccaaggctccctccgccacttatttcaagggagagtcgccgattaatgaaccgtgttggcaaggctaaagagtggaggatggtctcccaagataacagcagcaaaggctcaatatacgttcctcgatctatgttgtcaactcacaaagaagaacctgaggatgataaatctccaagattggattcaagttcagtggaggatgcccagattgtctccagtgcatccaactttcagagccaggattttatgctggagaggtttcaacagagtgttgcttcttcgcctgatagttcatcttctaatccttcaaatagcaacactggtgattctatgcctgtatattctgacataaatttgttaaagagtttgtcatttgatgctttgaagcaatcggatttgaactcttggacaccaaaaggcccactgaaaagtaatgttaacaatgacctttcatcgccacccctttccagttcatcatatcctggtagcaaaactggtacgcaaacttttgagcaagaaaaggctgctgctgacaccaaacatggaaatgttgtgcttggcagtggcgcagctgttactgaagttgataatgtggactccattatgaagaatttgaagttaagtttggatgtccatacatcctcacctgccaagcagaggtggcaggacaatgtcttgcagcagtatggttcctttttaccagcccaaggtgatcctattcaattgactactcaaggaccccatcctcctcatgtaccttttgttgataacttgtctcatgctcagctcaagttgcctgacatccaccaaaatttaccacaacctagtatgacaacacctttctatacaccaaattcttttgggaacccttattatcagaatttgcaccctgctaatgcttttccaacctcaattggaactgggggttatgctgtaagtggttctattttgccaccgtttatggctggctatgctccccaaggtcctcttgctacacctcttgacagttctatgactccaagctttagtggcaggccatctggatttcttccagcagggaatcttacagggggaacagattttatgcagtcatgtaaagtatacggacaatttgagcctggtatgcagccatccattcccgatccgaacttcattcatttctttcagcatccctctttatttcagtatactggaggaaatcaatacaatacaatgggtccaagatttactgttgttgggaatttagctgaaagctttgattcacaaaacacgatacctcaagctgcatctgcatatccatctgatcagaggcttccactgccaataactggctttcctaattctcctacagccagaagaggagggactgttccaaattatcaaggcatttcatcctacattggagtgccaatgacttatcctactagtccagtgtttcagggacaaacattgcctggagtattgcctcctgttaggagaaacgactctgctggatttctgcccccctcaagaaacatcactggtagccctggaattcaagggcagcgagcaagacagaagtttgatgaatcaaagacctgctctttcttagaagagttgaagtccaacagagcgcgcatggttgagctttctgacatcacaggccgtgtagttgaatacagtgctgaccaacatggtagccgattcatccagcagaagttggaaaactgcaccgccgaagagaagacatctgtgtttgccgagattcttcctcatgcttcagcattaatgactgacgtttttgggaattatgtgatccaaaagttttttgaacatggaactcgtgagcaaaggagggatcttgccaccaagcttgttggtcacgttttgcctttgagtcttcagatgtatggctgccgtgtaatccagaagcctcgcaaaccctatcgcctatccctctcgcggtcttgcctcggtctctggcggcggcaccgccgttttacactcctcctccttcgacaacccgtcgcagtagcgtccgtctctggtgtccggctgtccggctctggactcccgacctcgacatcaggatctgcgcctcccgaccggtatgtgggggctctgaagaaggtgcagaaggatctgggcgcgtcggtgttcgagccgctggtgcaggcgtacgccgccgtcgggaagttccctgggatgtggcagcggctgaagatcgagaacgtggaggtcggggaggggacggcccagctgcttgactctatctgcgccgatcaatagcccaagcacgtcctagaggcggcgacagaaatgagttgctggcaagtttgacaaaacaagcagacatggtcttggtggctcagcaggaattaatcacccaaaaaaacagttacaagttgggttcatgcatgtcttacgtcaaggattgtactccccgttaaactgttggttcgggccagtggccggcccggtacgttcaggcccaccgggcgaacgggccggcccggcacgatttatccctgtgcgtgccgggtttgggcatgtcgctaggcacgtgggccagcacgacccggcccgaagcatcaacgggccgtgcctggcccggccctatccgtaccgggccgaaacgggttcggaccgggtccgtgccgggtggcccgtttggacatctataggtccctatttggacctgaagtgaagcattttaaagttgaaggacccagattctcacttcgagagtttatgaacctagatgagaatctaaggctctggaagttatggaacttgaccagaaaatagatctagttcatgagcttgatggtcatattatgcgatgtgtccgtgatcaaaatggaaatcacgttatacagaagtgcattgagtgtgtccccacagaacatattggttttgtagtgtctgcttttcagggacaagttactagcctttcaatgcatccatatggctgccgtgtaattcagagaatcttggagcactgcggtggtaactcacaaggccagtgcataatagacgagatattacagtgggtgtgcatccttgcgcaggatcagtatggcaactatgttacacagcatgttctagaaagaggaaaagctcatgagaggagccaaattattactaaattggccgggcaggttgttaccatgagccaaaataaatatgcatcaaatgtgatagagaagtgttttcaacatggtgatattgcggagcgggatcttctgatcagacggattgtggagcagacagagggcaacaacaatttattggtctgtttggtagtgtagtaaaagtgttccctccattatcccttcctctctttgccaaacgggtcggggttctggaaggtagggctaggacatggggacctgatctcagttcggtacagccaatcagataacaccatgagtatctcagttctgctattccagctttctgggagctgcgaatcctatggattaccaagacatgggatctctgtaaacttatttcttcctgtgttgatgttagtttatatttcctaatcaccttttatattcaatcaggcaatgatgaaggaccagtatgctaattacgtggtccagaagatacttgaaacttgcaacgaggatcagcgggagcttctgctcagccgcgtaaaggatcatatgcaagcattgaggaagtacacatacggcaagcacatcgtaagccgagtcgagcagctctgtggcgacggaactgccgagtcaggttcttgaaacgaaccgccgcctaattcttcataggctggagggtgtcctgctcttttgctcattccgtcagtgacgaagaaagcaaaacggatcaagtctaactctggcgcttcagaacagactaacaaagctgtcgtcgaagattgtataggtgtgactctgttcagggatagtcttcaggttctagaacagaagggtagtggtgtgcatcagtgtatctgtttactggataatagtggttggttaggtgtgtgcagaaaaagtttagtgctatgctttgtatgtgatacatattaactatgccttggaatgttcatatgttgtcctgattacgtgtgatatctctcgttcagttcaagttgcgttttctacatggccatgggaccatctgccgatttgatgaaaaaggaaaggttgtgcacctttgtaagcgggcatggagatgagctgcgctattttttttttttacaaaatgtctgctgggattgaactgtctattttataaaaatatcatattttcttttaatgtcaac

SEQ ID NO: 217920 - DNA, 4263 bp, Zea Mays
ggcagagcgacgccgcctcgcctccatccccgccgcacatcgccacccggcacgaaccccaaagcacgccgcggcggtcgcccacagcccagcagcaggcagcagggcggtccgaggccgagggttttagaaaccaccacccgatcggtacggccgcacgcacccattcaaccgtccgtcgccatcgtcttctccaccgagtcgccattcgccaaaagaaaaagggaaaaacgtccgcgggggagaggtggaagagaggtgggagcgaaggaaaagcttcccgagtgaagaagtgtttcccaaaggtgtggataaggccgacgcccgacgcggttggaggctccggctcccgagaaagtggggggctttgtcgcgggcctagctccggcggaggaggacgaggcctgctggtggacttgctcgcccgcctagggttttgggctgccggccggcttgctcggaggccgcaagtctaatggctactgagagtgctttccgattgattggtgggacgggggctagggactggagtaagggatttggtgcatttggctcttcagcaggtgccttatcaggggaagacttgggatttgtggataatgacactggggtttatgggggctggaacaaatctgttccaaatcgtagtggaagcgcaccgcctagcatggaaggatctcttgctgctcttggccatctcattgatcagcagagtgggagctttgaagctagtttgacaaccttggataacataactgacagttccaaatctgaggagcaactacgtgctgatccagcatattttgagtattatggctccaaggtgaatctgaatccaaggctccctccgccacttatttcaagggagagtcgccgattaatgaaccgtgttggcaaggctaaagagtggaggatggtctcccaagataacagcagcaaaggctcaatatacgttcctcgatctatgttgtcaactcacaaagaagaacctgaggatgataaatctccaagattggattcaagttcagtggaggatgcccagattgtctccagtgcatccaactttcagagccaggattttatgctggagaggtttcaacagagtgttgcttcttcgcctgatagttcatcttctaatccttcaaatagcaacactggtgattctatgcctgtatattctgacataaatttgttaaagagtttgtcatttgatgctttgaagcaatcggatttgaactcttggacaccaaaaggcccactgaaaagtaatgttaacaatgacctttcatcgccacccctttccagttcatcatatcctggtagcaaaactggtacgcaaacttttgagcaagaaaaggctgctgctgacaccaaacatggaaatgttgtgcttggcagtggcgcagctgttactgaagttgataatgtggactccattatgaagaatttgaagttaagtttggatgtccatacatcctcacctgccaagcagaggtggcaggacaatgtcttgcagcagtatggttcctttttaccagcccaaggtgatcctattcaattgactactcaaggaccccatcctcctcatgtaccttttgttgataacttgtctcatgctcagctcaagttgcctgacatccaccaaaatttaccacaacctagtatgacaacacctttctatacaccaaattcttttgggaacccttattatcagaatttgcaccctgctaatgcttttccaacctcaattggaactgggggttatgctgtaagtggttctattttgccaccgtttatggctggctatgctccccaaggtcctcttgctacacctcttgacagttctatgactccaagctttagtggcaggccatctggatttcttccagcagggaatcttacagggggaacagattttatgcagtcatgtaaagtatacggacaatttgagcctggtatgcagccatccattcccgatccgaacttcattcatttctttcagcatccctctttatttcagtatactggaggaaatcaatacaatacaatgggtccaagatttactgttgttgggaatttagctgaaagctttgattcacaaaacacgatacctcaagctgcatctgcatatccatctgatcagaggcttccactgccaataactggctttcctaattctcctacagccagaagaggagggactgttccaaattatcaaggcatttcatcctacattggagtgccaatgacttatcctactagtccagtgtttcagggacaaacattgcctggagtattgcctcctgttaggagaaacgactctgctggatttctgcccccctcaagaaacatcactggtagccctggaattcaagggcagcgagcaagacagaagtttgatgaatcaaagacctgctctttcttagaagagttgaagtccaacagagcgcgcatggttgagctttctgacatcacaggccgtgtagttgaatacagtgctgaccaacatggtagccgattcatccagcagaagttggaaaactgcaccgccgaagagaagacatctgtgtttgccgagattcttcctcatgcttcagcattaatgactgacgtttttgggaattatgtgatccaaaagttttttgaacatggaactcgtgagcaaaggagggatcttgccaccaagcttgttggtcacgttttgcctttgagtcttcagatgtatggctgccgtgtaatccagaaggctctggaagttatggaacttgaccagaaaatagatctagttcatgagcttgatggtcatattatgcgatgtgtccgtgatcaaaatggaaatcacgttatacagaagtgcattgagtgtgtccccacagaacatattggttttgtagtgtctgcttttcagggacaagttactagcctttcaatgcatccatatggctgccgtgtaattcagagaatcttggagcactgcggtggtaactcacaaggccagtgcataatagacgagatattacagtgggtgtgcatccttgcgcaggatcagtatggcaactatgttacacagcatgttctagaaagaggaaaagctcatgagaggagccaaattattactaaattggccgggcaggttgttaccatgagccaaaataaatatgcatcaaatgtgatagagaagtgttttcaacatggtgatattgcggagcgggatcttctgatcagacggattgtggagcagacagagggcaacaacaatttattggtctgtttggtagtgtagtaaaagtgttccctccattatcccttcctctctttgccaaacgggtcggggttctggaaggtagggctaggacatggggacctgatctcagttcggtacagccaatcagataacaccatgagtatctcagttctgctattccagctttctgggagctgcgaatcctatggattaccaagacatgggatctctgtaaacttatttcttcctgtgttgatgttagtttatatttcctaatcaccttttatattcaatcaggcaatgatgaaggaccagtatgctaattacgtggtccagaagatacttgaaacttgcaacgaggatcagcgggagcttctgctcagccgcgtaaaggatcatatgcaagcattgaggaagtacacatacggcaagcacatcgtaagccgagtcgagcagctctgtggcgacggaactgccgagtcaggttcttgaaacgaaccgccgcctaattcttcataggctggagggtgtcctgctcttttgctcattccgtcagtgacgaagaaagcaaaacggatcaagtctaactctggcgcttcagaacagactaacaaagctgtcgtcgaagattgtataggtgtgactctgttcagggatagtcttcaggttctagaacagaagggtagtggtgtgcatcagtgtatctgtttactggataatagtggttggttaggtgtgtgcagaaaaagtttagtgctatgctttgtatgtgatacatattaactatgccttggaatgttcatatgttgtcctgattacgtgtgatatctctcgttcagttcaagttgcgttttctacatggccatgggaccatctgccgatttgatgaaaaaggaaaggttgtgcacctttgtaagcgggcatggagatgagctgcgctattttttttttttacaaaatgtctgctgggattgaactgtctattttataaaaatatcatattttcttttaatgtcaac

SEQ ID NO: 217921 - DNA, 3435 bp, Zea Mays
gcaagcgaacacatttctttcctttctatctccccccaccgctctcgctctcctcctcgctctagccgcgaccacgcgacgccgtgggcacacgcacaagcacacggacccccctcccccctacccgctgcctccgccgcggctcgccggagatggatggctccggcagctgggacgctatagactggaaccaaatcgaggatccgaggccgcggaggtcgggccaggccgtcaaggagagcatggacgacttcttgctcgaggacgaggaggtgctcgcgcagggccatggagttgttctactaaacaaccgtgatgctggtacactttcagttacaaatttccgtcttctctttgtgagccaagcaaaaaaatgtgtcatagagctgggtaccattccactgacgacaattgagaagctaaatgacgatgtgaaactccaacccttgccccacctctctgataagaaccacccccgtgaacttcttcaagtaattggcaaagacatgagaatcattgtgtttgcttttatccccagaacacagcagaaaaatgaagtgtttgatgctttgaggagatacactaaacctgctaatttgagaagtttaccgctacagggagtcgaggaagtttctttgtgtaatgaatggtggaggctaactagagttaattctagttattcattgtgttcaacttacccctctgaactcattgtaccaagaagcataagtgatgaagatttatttcaagcctccccatttcgatcaggcaagcgcttgcctgttatttcatggtgtgaccctgggtctggagctgttctggcaaggtcatctcagccgatggtggggttgatgatgaactttagaaacaatgcggatgagaagcttgtctgtgctctcagcagcagaaccatcgatgagaaaggatctccaaggaaattgtacataattgatgcccggccaagagcaaatgctatagcaaatggggcaaagggagggggctcagaatcatcttctaactaccataaatctgaggttctgtttttaggaatacaaaacatccacaccatgagagagagtctttctcgccttagggactatgtggatgctcatggctcaatttcatcaaatgggagcccttcagctgtatctgttgttggagatcggaggaaccgtggatcaacctggggtggaggcaatctaaatagcatgacatcattttcttcaacactgggggaatggctaaaccatatccagaatattctggttggtgcttcatggattgctgcacaaatttcagaagaagcagcgtcagttcttgtacattgcagtgatggatgggaccgcacaacccagttggtttcacttgcttgtttattgcttgatccctattatcgaactttcagtggattccaggctcttgttgaaaaggattggttagcatttggtcatccatttgcagagagaatgggagttccaacagtagctgagaatggggggtcacagtatgagctactaaggcaaccttcgctcggaaatttaagcagttccccgagtaggaacactttagggccgccagggccatcctctaattctccagtgcaatcccagacatcaaacaacacttcaccaatattgttacagtggcttgattgtatctcacagttgttacgtctgtacccatctgcatttcagttttcatctaaattcctagttgattttatggattgtgtgctatcgtgtcgctttgggaacttcttgtgcaatagtgaacgagaaagggagcaatctggtgtcacaatctcctgtcgttgcatgtggtcacatttggctaatctgagagcttctggcggcagcttccatgagcactataatccattctatgacccagtaaatcataatggtgcactattgccccctgctgcagcacttgccccaacactctggccccagttttttttgaggtggacatgccccattgagtcacaaggtggtgatcttgaatcccagtggcatgctatgaataaaaaatatgcagatacaatgaaggcaaaggatattgctgagtggagggcaaaggatatcaaattgaaattggaatctatgaaacaagacctgcagagggagaaacgtattaatagtacagctctagccgcagcccgaagtgctcaaagggagaatgctgcaattaagaaggcaatagaatctatagggtgcacaattaaattttcgacaagcgaaaacgaggacagaactgaagtgctgtcatgttcattaggaagaggcacagatggtagagctcagcaagatgaaaacggtgacttctctgtagcaattgaggacagcctggtctcggatgcaccggcggaccatttttgcgaatcactctgccccttccgcacaagagaagggtgcagatggccagatgctccgtgtgcacagcttggaagtcagtttgttggtttgaaggcaaattttgatgcttttgaccggctgtcaatacatgactgctattttggaccggagtagttgatcatgaaccagccgtgtcagtacacgcttggcagttgccaatggattttttcagtagttggcacctccaggtcggcatcaatagcaaaagaatgctgagaaacaactcaatgatgcatatttgacgagtatttacaaattccttgattcaatagtttttcactgtctgggtcctccgaatctgcatcaacagaataacctggaaagcaaattaaggatgcgtacctgatatgcatcggaggatcttttttttttgttccaatggtattataagcttctgtgagggaattccagcgttctttgttagttagcaatttgtaggaaccaccgagatagaaatcaatccctttgtatagtttggcaagccattcatactataagcaaaataaagcgaaacatggaagacggtagtagtttgttactctttttctgatagtacagtgttcgacttgtaactcttagctttagaataagatccatgcaaatcctgcttggaaaggaaatgttgtacatgaaggtatagacacgtggactggttcctgatccctccttatagttgtaacgatatagattttttcaagtgccattgccttcctgatgttaactgtgggtaagactgtcaacaggtcttaaaacctgcttctttagcagtgcaggtgtcgcatacttcaaattgttactgaatgtgaagataatttacaattagcgtcgttgagcactgaattcaggactagacgggctcagctgcaatgcattgattacgtctctctctgtttgagtgaatctgaaagactagtagggatatgaatggtataaatattatctgtctgtattcaaatttgatctctgtattcaaattcgaagctaagattcgattcgatccacatttgaggtcagattcgat

SEQ ID NO: 217922 - DNA, 3355 bp, Zea Mays
gccaccgccacgagcgcgcaccaggatccgaggccgcggaggtcgggccaggccgtcaaggagagcatggacgacttcttgctcgaggacgaggaggtgctcgcgcagggccatggagttgttctactaaacaaccgtgatgctggtacactttcagttacaaatttccgtcttctctttgtgagccaagcaaaaaaatgtgtcatagagctgggtaccattccactgacgacaattgagaagctaaatgacgatgtgaaactccaacccttgccccacctctctgataagaaccacccccgtgaacttcttcaagtaattggcaaagacatgagaatcattgtgtttgcttttatccccagaacacagcagaaaaatgaagtgtttgatgctttgaggagatacactaaacctgctaatttgtgggatctatatgcattttcttgtgatccatccaccattaagcatgattctgagccaaagtggcgtctcttgagggaatactttcgtctttttaggagaagtttaccgctacagggagtcgaggaagtttctttgtgtaatgaatggtggaggctaactagagttaattctagttattcattgtgttcaacttacccctctgaactcattgtaccaagaagcataagtgatgaagatttatttcaagcctccccatttcgatcaggcaagcgcttgcctgttatttcatggtgtgaccctgggtctggagctgttctggcaaggtcatctcagccgatggtggggttgatgatgaactttagaaacaatgcggatgagaagcttgtctgtgctctcagcagcagaaccatcgatgagaaaggatctccaaggaaattgtacataattgatgcccggccaagagcaaatgctatagcaaatggggcaaagggagggggctcagaatcatcttctaactaccataaatctgaggttctgtttttaggaatacaaaacatccacaccatgagagagagtctttctcgccttagggactatgtggatgctcatggctcaatttcatcaaatgggagcccttcagctgtatctgttgttggagatcggaggaaccgtggatcaacctggggtggaggcaatctaaatagcatgacatcattttcttcaacactgggggaatggctaaaccatatccagaatattctggttggtgcttcatggattgctgcacaaatttcagaagaagcagcgtcagttcttgtacattgcagtgatggatgggaccgcacaacccagttggtttcacttgcttgtttattgcttgatccctattatcgaactttcagtggattccaggctcttgttgaaaaggattggttagcatttggtcatccatttgcagagagaatgggagttccaacagtagctgagaatggggggtcacagtatgagctactaaggcaaccttcgctcggaaatttaagcagttccccgagtaggaacactttagggccgccagggccatcctctaattctccagtgcaatcccagacatcaaacaacacttcaccaatattgttacagtggcttgattgtatctcacagttgttacgtctgtacccatctgcatttcagttttcatctaaattcctagttgattttatggattgtgtgctatcgtgtcgctttgggaacttcttgtgcaatagtgaacgagaaagggagcaatctggtgtcacaatctcctgtcgttgcatgtggtcacatttggctaatctgagagcttctggcggcagcttccatgagcactataatccattctatgacccagtaaatcataatggtgcactattgccccctgctgcagcacttgccccaacactctggccccagttttttttgaggtggacatgccccattgagtcacaaggtggtgatcttgaatcccagtggcatgctatgaataaaaaatatgcagatacaatgaaggcaaaggatattgctgagtggagggcaaaggatatcaaattgaaattggaatctatgaaacaagacctgcagagggagaaacgtattaatagtacagctctagccgcagcccgaagtgctcaaagggagaatgctgcaattaagaaggcaatagaatctatagggtgcacaattaaattttcgacaagcgaaaacgaggacagaactgaagtgctgtcatgttcattaggaagaggcacagatggtagagctcagcaagatgaaaacggtgacttctctgtagcaattgaggacagcctggtctcggatgcaccggcggaccatttttgcgaatcactctgccccttccgcacaagagaagggtgcagatggccagatgctccgtgtgcacagcttggaagtcagtttgttggtttgaaggcaaattttgatgcttttgaccggctgtcaatacatgactgctattttggaccggagtagttgatcatgaaccagccgtgtcagtacacgcttggcagttgccaatggattttttcagtagttggcacctccaggtcggcatcaatagcaaaagaatgctgagaaacaactcaatgatgcatatttgacgagtatttacaaattccttgattcaatagtttttcactgtctgggtcctccgaatctgcatcaacagaataacctggaaagcaaattaaggatgcgtacctgatatgcatcggaggatcttttttttttgttccaatggtattataagcttctgtgagggaattccagcgttctttgttagttagcaatttgtaggaaccaccgagatagaaatcaatccctttgtatagtttggcaagccattcatactataagcaaaataaagcgaaacatggaagacggtagtagtttgttactctttttctgatagtacagtgttcgacttgtaactcttagctttagaataagatccatgcaaatcctgcttggaaaggaaatgttgtacatgaaggtatagacacgtggactggttcctgatccctccttatagttgtaacgatatagattttttcaagtgccattgccttcctgatgttaactgtgggtaagactgtcaacaggtcttaaaacctgcttctttagcagtgcaggtgtcgcatacttcaaattgttactgaatgtgaagataatttacaattagcgtcgttgagcactgaattcaggactagacgggctcagctgcaatgcattgattacgtctctctctgtttgagtgaatctgaaagactagtagggatatgaatggtataaatattatctgtctgtattcaaatttgatctctgtattcaaattcgaagctaagattcgattcgatccacatttgaggtcagattcgat

SEQ ID NO: 217923 - DNA, 3822 bp, Zea Mays
gggttcgctcgtggttccaggggtcggttttgctctcgatcaaaaccgaaacttttctgcgcctcttacacgttactcccacagtgagggtaactcgaataactgtgagtgctactgtgagatgggtggtgtgctctctcttttagcttggtgatcatctgaaaaaaggaagtgctgtttatttctgtaagatagaaagcaaaccattggttcatgaatggtttagtcatgctaagaaaaacaaagttctaagaacacatatacagtgcacgtgcttgctggcaatatgaatgaaaactctgccattattatttcggatagtgatgatgactcaattggctcaatattcgatgatgacgaccagccagcgtctgcaatcgcaaggcttgatcaaaatgctgaaggacgaataatcaattttgaggatgaagattggcaaaggagcgctcctgctccaccatcgactaagcctactgagaacaacaatggtcaatacaggattcttccagcatcccttacgaatggtagacatgctgagagtagtcgttatacatttggttcagtggacaggattcatccccatgcaaatccttatatggctatgcgaccgggccattctacttccagtagaattgatagcgtagtggaaaagcacaacagttctacagcagatgcaaatgacaataacaagagggtccttccatcatccttttcaaatggcaacacatcaaaatctatgcatccaattgttgctagcgaaacacgcaagctcccactgcctttatccaccaaaaagtcaccaaatattggtgaaaacagaatggggacaaatattgccaatggaaatttgcagccttcatcttcaataatggcaagaggaacttctagtacacttaatacccataaagtggatgatgatgatgatgtcattgtatatggaggttctagctcacatagggtactgccttcaacgtttgaggcaaccaattctaataacagtgaagttgctaagggctttgagacacacagtcgccttaatcctgaaaatagggtcttagattacgctgagagagcagtatatcaagaagccctgcagaatattagtcgcgaaaaaagtgaagatgatctgcctgagggtgtgctagcagtacctctgcttagacatcagaaaatggcattggcttggatggtttcaaaggagaatagctcacattgtgctggtggaattcttgccgatgatcagggccttgggaagacagtgtctactattgcccttatacaaaaacagaggatggaacagtcgaaatttatgtttgttgattcagatcgtttgaaatctgaagcactaaaccttgatgaagatgatgagggagaacaaactgttagcaatgaacctaaaaaggaccaaggcgcttgttcattgtcaacatctgctggtactagtgctgaactttttgttaatcaaccgaataatgttgtgaataaaatggttgaaaccaaagcagaacgcaagaaaaaagctaaagtttccacatcatctgcatccacctcacgttccatgacaaggccagctgcaggtactctagtagtgtgccctgctagtgttcttaagcagtggtctaacgaattaactgacaaggttagcgaaagtgctaaattatctgttttagtctaccatggtggtgcaaggaccaaagatccacgtgagctggcaaaatacgatgtagttgttactacatatacaattgtggccaatgaagtacctaaacagatggctgatgatgacgcagatcaaaagaacagtgaagaaccctctgctagcaataaaagaaagccatcggcgaatatgcaaaacaaggctaagaaaaagaagaagaaacttaaggactcaaactttgaccttgacagtggtccaattgcaagagtgcgatggtttagggttgtgcttgatgaagctcagacaataaaaaacttccgaactgtagtggccagagcctgttgtgggctaagagcaaagcggagatggtgcttatcaggaacacctatacaaaatgcaattgatgatctgtttagctatttccgtttcttgaaatatgatccgtattgcacgtataactcgttttgcacaatgattaagcacccaattgctagagatgcaattaatggatacaagaaacttcaggctgtgctgaaggtagttctcctgcgtcgtacgaaagaaactgtgatcaatggcaaaccaataataaatttacctcctaagacaattaatctgaataaagtagatttcacacaagaggagcggtcgttttatttgatgctggaagaacgctctcggcaacaattcaaggcatttgctgcggctgggacactcaaacaaaactatgccaacatccttttaatgttgctgcgacttcggcaagcctgtgatcatcctattcttgtaaagggcaatcagtcagaatatggaggtgatggttctatagaaatggcaaagaaacttcctaaggaagtggtgatagatttgcttgcaaaactggaagtggggtcaacactttgtggcttatgcaatgatacacctgaggatgctattgtgacaatttgtggtcatgttttctgctatcaatgtatacatgaacgaataacgactgatgagaatatgtgccctgcccctaattgcagtagaacattaggtcttgaattgttattttcgtcaggagctttaaagatttgcatctctggcaaatcgagttctgcagtagctagttcatcatcagataacgagtcatcttcaatcagtcaaagcagctttgtctcatccaagatacaagcagccattgatatactgaattcaatcattgtcatggatcctcttactgaaagttatacaatggaatcaagcagaagtggactaggccctgtgaaagccattgtcttttcccaatggactggcatgctggatttgctggagctttcactgaatatcaactgtatacagtacaggagactagatggaacaatgtctctcaatttaagagaaaaaaatgtgaaggattttaacactgacccagaggttagagttatgattatgtcactgaaagctggtaatcttggtctcaacatggtttctgcttgccatgtaattctccttgatctctggtggaacccttatgctgaggaccaggcagttgatagggcacacaggattgggcagactaggcctgttactgtatctcgcttgaccgttaaagacactgtggaagatcgtattttagctctgcaggaggaaaagagaaccatggtgaactctgctttcggtgatgacaaagccggcggccatgcgacccggctcaccgtggaagacctgcggtacctatttaggatatgattgcgagggaactctctcaatgcctcggtcaacttgtcaggtcatgatgcgttgtaccttgtaatcgtagtccggcaaaagggcggtgtaccattgcgagggtaggctcattggtccatgtccgccacgccttgctgcagctccagttttgtggtgctcagatttctagatgggtaatctagggctagatagcatgtgtaattataaccccccaaccccccctccccggggcatggaggagagttccgcagtgccaatgctttatgatttagtgtatgtatatacatgatcaccatgtctaacttgcaatgagttgttttagctcgagatgtgagactgatactgccagcgggtcagcattttgtaccttctgtgttatgtccctttgcccgtcatcagaaaatccaaaaaatcaaaacttttgttggtgtcca

SEQ ID NO: 217924 - DNA, 2309 bp, Zea Mays
ctcgccaccattcccactcctctcttctcgacacaccccaatccgtctcgcctgccggccttcctctctgtctctctctcctgtcctctcatctcctttcgtctctctatcaccatcgacggacttcgtgcgaggaacacagaggagcattcaggcacttgctccgtatcatacacctatgctgcgggatggaggaagctaacgtccacgggaccagcggccggccctccaccgctccttctgatgcatctccggactcggctgttccatccacttctcaccaaggctctcgatcctgtgaggcccagctagatgaaatgcaggagccagacgtcgattccgtcaagggcgccgtcggcaaattcggagtcggaggggttcttgactggagagagaaacgcaagaacgtccagaatgagctcgacaaggtgcaggacgaggtcaccgagtaccagaagagagtacaggaggcggagtccggcagagcgcaagctctggaggagttgggaaccgccgtgagcgccgccgacgagctggcccggggcctagatagggcgcgggccgagcaggcccaggcgcggcagcaggcggagctcgccgagctacagctcgaggagttgcggcgcggcgtcgcggcgcaggcgaaggcggagctcggcgccgccatggaccgcagcgcggccgcgctcgcggacctgcgggcggcgcgagcggaagtagagtcgctggagaaggagcacgcgcgcgccgcggccgaggcgggcgcggcggtggcgcgggcgcgggaggccgccgcggcgtcgcgggaggctgggaaggccgtcgaggacctcgcggccgagctcgccgcgctgaaaggggagctggagtcctcgcgcgccgctcatgtcgaggcggaggagaagacgaggagcctggccgtcgcgtgggaggatgacaagacacggtggcagatcgagctggaggaagccgagcgggaggacaagaggctgcgcgaggtcgagatgaaggcggaggcagcttcccaactgatggcgagcctcaaaaccgagctgttcgcttgcgccgtcgaaggaacgcctggccaggaggagaagccggcggcgagcacccagtcgatgcaggagaagaccgagaaggagctggacgacgtgaaggcgagcattgagtgggccaaggacgaggtcaagtgcctgcgcgtcgccgccgcctcgatgcgcgatgagctggagaaggagaaagcggagctcaccgcgctgcggcggagggagagggaagggctctcgccagcgtccattccttaccccgaggaggagttgaggcgagtgaccaccgaggtcgccgcggcggaggcaggagcgaaggcggacgacgacgatagcaagatggccgagcgggtaggccaggcacggcgagaagcggaggaagcgaaggcgaaggcccagtcggctcgagagaaggtcgccagggccagggaagacgcgggcgtggccaaggcagccctcgccgccatggaggcgcggctggaggcggtgacgcgggagatactcgccgcggacacgtcggaggtgacgctgacggtggacgattacaacgagctgcgccggagagcgcaggagacagaggaggccgacagcatgcgggtggtcgaggcggtgaagctggtcgaggaggccaaggacgcggaggcgaggaagctggagaaggtcgctcggctggcgaagcggaccgagcagaggcggcaggcgctggaagccgcgacgctggaggccgacgaggcggagttcgaaaagctgtcggcggagcgggagctcaggcagtggcgcgccgagcacgagcagcagcgcgcgcccggcgagaccggctcgccccggccggacctcgccgagatctccgtgctcgacgacccggcggccggcgacgggcgcgggaacccgcacatagtcagcccgagaggagggtacatgtcggcggcggacgcggaggacgaggacgcgaggcagaggaagaccttcttcccgcggattgtcatgttcttggcgcgaaagagagctcagacttgaaactgatcaaacgaccggcttccttttgaattattggtcaatgttttttgggacttgcttttttatagtacgtgccttgctcggagctgatgaaatgtgacgatgcacacggagatcatagctttctttttattctcggagttgcttggaaatataaaccggaaaacacattcacgcaaattgagttgattctataaggttgtattcagcaaaacatacacgtgactgtgcaaattattgttttac

SEQ ID NO: 217925 - DNA, 1172 bp, Zea Mays
aggctcgtgcaccatttcccctggttcccctcaatccaaatagtgccgtcccggcgtcccccccatcggctacctttcctcatcccacgcgacgcccatgccagccacacctgttcgaccacctgacccgcgcgcgccctgatggctcccgcgctcacctccaacccgccctccttccgtcccctcacgtccccactccgccgtcgtgccgccaccgtcccatgccgcgtcggtaagcccggcaaggactcctccgctgcggatgacgctaccggccccaacaagaggcccaacctcttcgcggacttcgggaatgccaagtcgctcatacaggcgttcccgtcgcagtcgctgttcgcgggcggtggcaggggcaggaaggacccgcagacggtgttcgtcgcaggcgccacagggcaggccggggtccgcatcgcgcagaccctgctgcggcaggggtttgccgtgcgcgctggtgtcccggacctagcgtcggcgcaggagctagcgcggctggcggcggcataccggctcatctcccccgcggaagcgcggcggctgaacgcggtagaggcgggcttcggtgaccccgacgcgatagccaagtccatcggccccgccgcgaaggtggtggtcaccgtcggctcggccgagaaagggccagaaggcggaggcgtcaccaccgacgacgcgctccgagtggtgcgggccgcagatctcgccagcgtggcgcacgtggttgtcgtgtatgacgagggggcggccagcggcggccttggcggcgggggctccacttacaatgtgctcgacggcttcacgtccttcttctccaacctcttctcgcgagagcagcaggcgctgacgctgagccagttcttggccaaggtggcggagaccgatgtcaggtatacactggtgaaggcttcactcaccgacgactatacccctgagagctactacgcccagctggtactcacgaaggagggagtatcgcctagcgacacaggcaaagtgtcaaggtcacagattgcagcccttgtagctgatgtcttctccaatgtggcagtcgctgagaacaaagtcgtcgaagtttcaacttcctcgtcagcaacagcaaagaacatagccgaggctttcacgtgttcgaaattcatgattacatgaaacttgaa

SEQ ID NO: 217926 - DNA, 1579 bp, Zea Mays
gacgctggcatgtgggtcctggtccccaaccgctcatcccgaactcgtgtatcggtctcccctaaccactgacctgcgagaccgctttgtcagcgaacaccgcgcgcgcctgaaccaaattcctcgctggctcatggatccgcccctgtcaggtcattctccttgctctgtttgttgcgagctccgctagatctccgccgctcgcgcatgtcgaccgtctcgagcctgcgctcatcccctcgcatctataaaacctcgatcccgctattcccatccaaatcggacacctgtcgcccaacccctattgcagaccgccatggagggagaaggaggaaaccgcggaccatcacggcggttgtcgggggatcacggtgcctcaacggtttgggcctcgaaataacatctagggatgatctccagaccccgtggatgttgtacgcgcgcttgattcgaacaaaggttggccgggacccaggcgctacagcccgcacaacgggaggtggagaagctgcggtggaagtgactcgctcgggggagagggatcgcaagctctccaccctccgggccaaggctgatcgtctcgatagtgaggcaacacgcctccgctcgaggcgcgatgagaatgagcatcgcgtccgtgaggctgccggagtcccgcaacagtttggacctcccagccacgccacctatgacgccgctaccggctccgaggacgagccagaccgagcgcccaagattccggttcatgggagagttaccttcttgcccatcgtgctctactgggtgtacaccgacggctaccagttgatccttcacccgcttgagcagtacaggctccacacactggacgaggaggaggagaaattcgtcagcctctgcaccgttgtatgtggcatactcctacagcatcttgtgcatgtcatccacgtgatgatcttgttcatgttgcctcttgtgatggagaatgatgttattgctcgctattacggacaaggcaaggggattgttgttaaggctatatacgatcgcgaggtcacctggaaccaactaggcacacgagttaaccaattatctaacaataccttacttgcagagttgttgcttactacacccgcctcaagaaaactgaagtttgaacacatgacaattgatcgtgcttgccttttgtgaatggactaggctgttcgcttgacttttatagatgaagtgaagttgcgcttgtagttttctaaggtttatgtatataattatgtggattgcattagccccaatataatatcatgtatatacctcccgctgtggtgtctgtccctaagcacatcacctaacataggcttggatcctgtcatcttattttggattagtttcctatatcttcatcttattttggattagtttcctacatcttatttttgattagttttctgatgtatcaagtttgatcattacgctatgttacacctctatgtatgataacttgtgctaaaacagaaaacaactgtaactttaatgtaaattatgttcggtctctttatgttattagtctgaccattgttttgttgctttcatgggagattac

SEQ ID NO: 217927 - DNA, 2813 bp, Zea Mays
attgttttcagatttgatggttgttaggctgtttggcaaggaagatgttcgcaaacagacgagaaacagcagcagctgtaattgttcagaagtatgtccgaagatggctgctacgtagagctcacctgcaagcatgtttggcagctctccttattcagtcttacattcgagggttcatcgctcgccgctatttctctgtcattagggaacataaagctgctacagtgatacagtccacatggagaagacggaagtttgtcatacttttccagaattaccggcaagccactgtggcaattcagtgttcttggagacagaagcttgcaagaaaggagctaaggaaactcaaaatggctgcaaatgaagctggtgcactgcgtgaggcaaagaataagcttgagaaaaagatggatgatcttgctttaagacttacccttgaaaggagactgcgggcttccagtgaagagtcaaaatcagtagaaatattgaagcgtgacaaaataattgaatcattaagtgcagaatgtgctgccgctaagtcagctgctcaaaatgaacatgccaaaaaattgctgctccaaaagcagttggatgattctttgagagagattactatgttgcagagtaaaaagattatgtcagcagaagcagcagaagaaaactccaacctaaagaacttagttgaatcattatctacgaagaactcaatactggagaatgaacttattgtgactcgcaaaagtagtgatgatacaatggaaaaattgaaggaagtcgaggggaaatgcaaccatctacagcaaaacttggacaagagaaacttacaaacttggaaaatgaaaatcatgtcttaagacagaaggcatttaatatgccgacaatgaacaatctgtctgtagctccaaagacattatctgagaaattttctgcatcaattgggcttcccaacagtgagccaaagcatatatatgtaagctttttcttttcctttcaacttgggtaactgcacttgtctggatcttgtaaaaaagctttaatttgacagagaatgaaaattgtaggaaagcccaacacctacaaaatatctggcttctcttccacagactttgagtacatcaaggagatcgaggttgcctgttgaaaggcatgagcaaaatcatgaaattttattgagatgcatcaaagaaaatttaggatataaggatggcaaaccagttgcagcatgtatcatttacaaatgtcttttgcactggcgtgcttttgaatcagagcgaactgctatttttgatcacgtgattgaggccataaatgatgtcctaaaggggaacgaagctgatggtagattaccttattggttgtccaatacctctgcattgctatgccttctccaaagaaatctgcggtcaaatggattattcactaccccgtctcgtcgttctggtggagctctagggaagatagcacaaacattgaggtctccttcaaagtttataggccgcagtgatactctaccacatgttgatgcacggtatccagccatactattcaaacagcagcttactgcatgtgtcgaaaagatatttgggcagctcagagataatctaaaaaaggaaatatcacctcttcttaatgtttgcattcaggctccaaagtcaacacgtgggcaatctggaaaagcatccaagtcatctggagttggtgcccacccagcatcgaactccaactgggacaatatcgtcaatttccttgacttacttatggatacattgcgcgaaaattatgtgccatccttctttatacgtaaacttatcacacaattattctccttcatcaatatacagttgtttaacagtcttcttctccgacgtgaatgttgtacattctccaatggggaatacgtgaaagctgggctatcgttgttggagaaatggattactgatgtcacagatgagtttgcgggtacatcttggcacgagctcaattatatcagacaagctgttggatttttggttatacaccaaaaaagaaaaaagacgcttgaggagatcaagcaagatctttgcccgtccttgagtgttcgccaaatctatagaatatgctcgatgtattgggatgacaaatacggtacccaaggcatttcaaccgaggtggttgctgcaatgcgggagatggtcaacaaagatacccagaatcttgtgtcaaattccttcttgttggatgatgacttaagtataccattctctaccgaggatctatcaatggcaatcccgtcaatagattatgctgacgtcgatcttccagaatctcttcagcactatacatcagtacagtttctactaaggcagcaggatccacagcctgcccaatagaatgaatgtggtcagcctgccctgaagatctgtctgtcccctggttgtttctaccaaggcagcaggatccacagcctgcggcctgcccaatagaatggatgtggtcagcctgccctgaagatctgtctgtcccctggttttattggggtaacatccatctgcgatgttgtattgatgtttagagagtacctagtttggtggagtggacacaatttaaaagcaaccattgttgctagatgccaattcattggtgttcactccccaagtatttttcattgtacaggaaatgttgtaagtctgttgactagcgcaaaattagttatatcagtggtaaattgggcaatgcgcatcagtgcatcaccgatggtatcttctacacatgaatcgttagccagttaaccgctaggtcgggcgatcataagctccaggctgtctgatatgggt

SEQ ID NO: 217928 - DNA, 3081 bp, Zea Mays
caatgtactaatgttccgtgatgattattgattagagaatttaaatgacctacatctatttacatgattcactcttctttctatctcatataggtttctattttttatataaaccccctcccccaccattgctcttgtgcataaacatccagtttttttaaaatgcgccatcagcatattggaaattgttagtgctgcgagcttggtaaaacaaaggtgttccttagggctggtcaaattgcgattttagatatgcgccgtgctgagattttggacaacgctgcacggcacattcaaggccgtttcagaacatttatcacacgcaaagaatttgtgaaaacaagggaggcttcaatttctatacaagcatactgcagaggctgtttggcaaggaagatgttcgcaaacagacgagaaacagcagcagctgtaattgttcagaagtatgtccgaagatggctgctacgtagagctcacctgcaagcatgtttggcagctctccttattcagtcttacattcgagggttcatcgctcgccgctatttctctgtcattagggaacataaagctgctacagtgatacagtccacatggagaagacggaagtttgtcatacttttccagaattaccggcaagccactgtggcaattcagtgttcttggagacagaagcttgcaagaaaggagctaaggaaactcaaaatggctgcaaatgaagctggtgcactgcgtgaggcaaagaataagcttgagaaaaagatggatgatcttgctttaagacttacccttgaaaggagactgcgggcttccagtgaagagtcaaaatcagtagaaatattgaagcgtgacaaaataattgaatcattaagtgcagaatgtgctgccgctaagtcagctgctcaaaatgaacatgccaaaaaattgctgctccaaaagcagttggatgattctttgagagagattactatgttgcagagtaaaaagattatgtcagcagaagcagcagaagaaaactccaacctaaagaacttagttgaatcattatctacgaagaactcaatactggagaatgaacttattgtgactcgcaaaagtagtgatgatacaatggaaaaattgaaggaagtcgaggggaaatgcaaccatctacagcaaaacttggacaaattgcaggagaaacttacaaacttggaaaatgaaaatcatgtcttaagacagaaggcatttaatatgccgacaatgaacaatctgtctgtagctccaaagacattatctgagaaattttctgcatcaattgggcttcccaacagtgagccaaagcatatatatgaaagcccaacacctacaaaatatctggcttctcttccacagactttgagtacatcaaggagatcgaggttgcctgttgaaaggcatgagcaaaatcatgaaattttattgagatgcatcaaagaaaatttaggatataaggatggcaaaccagttgcagcatgtatcatttacaaatgtcttttgcactggcgtgcttttgaatcagagcgaactgctatttttgatcacgtgattgaggccataaatgatgtcctaaaggggaacgaagctgatggtagattaccttattggttgtccaatacctctgcattgctatgccttctccaaagaaatctgcggtcaaatggattattcactaccccgtctcgtcgttctggtggagctctagggaagatagcacaaacattgaggtctccttcaaagtttataggccgcagtgatactctaccacatgttgatgcacggtatccagccatactattcaaacagcagcttactgcatgtgtcgaaaagatatttgggcagctcagagataatctaaaaaaggaaatatcacctcttcttaatgtttgcattcaggctccaaagtcaacacgtgggcaatctggaaaagcatccaagtcatctggagttggtgcccacccagcatcgaactccaactgggacaatatcgtcaatttccttgacttacttatggatacattgcgcgaaaattatgtgccatccttctttatacgtaaacttatcacacaattattctccttcatcaatatacagttgtttaacagtcttcttctccgacgtgaatgttgtacattctccaatggggaatacgtgaaagctgggctatcgttgttggagaaatggattactgatgtcacagatgagtttgcgggtacatcttggcacgagctcaattatatcagacaagctgttggatttttggttatacaccaaaaaagaaaaaagacgcttgaggagatcaagcaagatctttgcccgtccttgagtgttcgccaaatctatagaatatgctcgatgtattgggatgacaaatacggtacccaaggcatttcaaccgaggtggttgctgcaatgcgggagatggtcaacaaagatacccagaatcttgtgtcaaattccttcttgttggatgatgacttaagtataccattctctaccgaggatctatcaatggcaatcccgtcaatagattatgctgacgtcgatcttccagaatctcttcagcactatacatcagtacagtttctactaaggcagcaggatccacagcctgcccaatagaatgaatgtggtcagcctgccctgaagatctgtctgtcccctggttgtttctaccaaggcagcaggatccacagcctgcggcctgcccaatagaatggatgtggtcagcctgccctgaagatctgtctgtcccctggttttattggggtaacatccatctgcgatgttgtattgatgtttagagagtacctagtttggtggagtggacacaatttaaaagcaaccattgttgctagatgccaattcattggtgttcactccccaagtatttttcattgtacaggaaatgttgtaagtctgttgactagcgcaaaattagttatatcagtggtaaattgggcaatgcgcatcagtgcatcaccgatggtatcttctacacatgaatcgttagccagttaaccgctaggtcgggcgatcataagctccaggctgtctgatatgggt

SEQ ID NO: 217929 - DNA, 2873 bp, Zea Mays
atgtaacgtaaatagattacatgggttacgatgaaaaaatgatgacaaagggtattctcgaaaagatgaagcttgaaaattttcaacttggtaaaacaaaggtgttccttagggctggtcaaattgcgattttagatatgcgccgtgctgagattttggacaacgctgcacggcacattcaaggccgtttcagaacatttatcacacgcaaagaatttgtgaaaacaagggaggcttcaatttctatacaagcatactgcagaggctgtttggcaaggaagatgttcgcaaacagacgagaaacagcagcagctgtaattgttcagaagtatgtccgaagatggctgctacgtagagctcacctgcaagcatgtttggcagctctccttattcagtcttacattcgagggttcatcgctcgccgctatttctctgtcattagggaacataaagctgctacagtgatacagtccacatggagaagacggaagtttgtcatacttttccagaattaccggcaagccactgtggcaattcagtgttcttggagacagaagcttgcaagaaaggagctaaggaaactcaaaatggctgcaaatgaagctggtgcactgcgtgaggcaaagaataagcttgagaaaaagatggatgatcttgctttaagacttacccttgaaaggagactgcgggcttccagtgaagagtcaaaatcagtagaaatattgaagcgtgacaaaataattgaatcattaagtgcagaatgtgctgccgctaagtcagctgctcaaaatgaacatgccaaaaaattgctgctccaaaagcagttggatgattctttgagagagattactatgttgcagagtaaaaagattatgtcagcagaagcagcagaagaaaactccaacctaaagaacttagttgaatcattatctacgaagaactcaatactggagaatgaacttattgtgactcgcaaaagtagtgatgatacaatggaaaaattgaaggaagtcgaggggaaatgcaaccatctacagcaaaacttggacaaattgcaggagaaacttacaaacttggaaaatgaaaatcatgtcttaagacagaaggcatttaatatgccgacaatgaacaatctgtctgtagctccaaagacattatctgagaaattttctgcatcaattgggcttcccaacagtgagccaaagcatatatatgaaagcccaacacctacaaaatatctggcttctcttccacagactttgagtacatcaaggagatcgaggttgcctgttgaaaggcatgagcaaaatcatgaaattttattgagatgcatcaaagaaaatttaggatataaggatggcaaaccagttgcagcatgtatcatttacaaatgtcttttgcactggcgtgcttttgaatcagagcgaactgctatttttgatcacgtgattgaggccataaatgatgtcctaaaggggaacgaagctgatggtagattaccttattggttgtccaatacctctgcattgctatgccttctccaaagaaatctgcggtcaaatggattattcactaccccgtctcgtcgttctggtggagctctagggaagatagcacaaacattgaggtctccttcaaagtttataggccgcagtgatactctaccacatgttgatgcacggtatccagccatactattcaaacagcagcttactgcatgtgtcgaaaagatatttgggcagctcagagataatctaaaaaaggaaatatcacctcttcttaatgtttgcattcaggctccaaagtcaacacgtgggcaatctggaaaagcatccaagtcatctggagttggtgcccacccagcatcgaactccaactgggacaatatcgtcaatttccttgacttacttatggatacattgcgcgaaaattatgtgccatccttctttatacgtaaacttatcacacaattattctccttcatcaatatacagttgtttaacagtcttcttctccgacgtgaatgttgtacattctccaatggggaatacgtgaaagctgggctatcgttgttggagaaatggattactgatgtcacagatgagtttgcgggtacatcttggcacgagctcaattatatcagacaagctgttggatttttggttatacaccaaaaaagaaaaaagacgcttgaggagatcaagcaagatctttgcccgtccttgagtgttcgccaaatctatagaatatgctcgatgtattgggatgacaaatacggtacccaaggcatttcaaccgaggtggttgctgcaatgcgggagatggtcaacaaagatacccagaatcttgtgtcaaattccttcttgttggatgatgacttaagtataccattctctaccgaggatctatcaatggcaatcccgtcaatagattatgctgacgtcgatcttccagaatctcttcagcactatacatcagtacagtttctactaaggcagcaggatccacagcctgcccaatagaatgaatgtggtcagcctgccctgaagatctgtctgtcccctggttttattggggtaacatccatctgcgatgttgtattgatgtttagagagtacctagtttggtggagtggacacaatttaaaagcaaccattgttgctagatgccaattcattggtgttcactccccaagtatttttcattgtacaggaaatgttgtaagtctgttgactagcgcaaaattagttatatcagtggtaaattgggcaatgcgcatcagtgcatcaccgatggtatcttctacacatgaatcgttagccagttaaccgctaggtcgggcgatcataagctccaggctgtctgatatgggt

SEQ ID NO: 217930 - DNA, 3035 bp, Zea Mays
ggaagaagccttgcgtaggtaggaaagaaaatcgcatgtgggccctgcacacactgcaaccacttatccatccaaagggtgtcttagaggctgtccgtattagtcttgctggctatcctaccagaaggacttatgctgaatttgttgaccggtttgctgttcttgtgccagaattgatgattggaagttacgatgaaaaaatgatgacaaagggtattctcgaaaagatgaagcttgaaaattttcaacttggtaaaacaaaggtgttccttagggctggtcaaattgcgattttagatatgcgccgtgctgagattttggacaacgctgcacggcacattcaaggccgtttcagaacatttatcacacgcaaagaatttgtgaaaacaagggaggcttcaatttctatacaagcatactgcagaggctgtttggcaaggaagatgttcgcaaacagacgagaaacagcagcagctgtaattgttcagaagtatgtccgaagatggctgctacgtagagctcacctgcaagcatgtttggcagctctccttattcagtcttacattcgagggttcatcgctcgccgctatttctctgtcattagggaacataaagctgctacagtgatacagtccacatggagaagacggaagtttgtcatacttttccagaattaccggcaagccactgtggcaattcagtgttcttggagacagaagcttgcaagaaaggagctaaggaaactcaaaatggctgcaaatgaagctggtgcactgcgtgaggcaaagaataagcttgagaaaaagatggatgatcttgctttaagacttacccttgaaaggagactgcgggcttccagtgaagagtcaaaatcagtagaaatattgaagcgtgacaaaataattgaatcattaagtgcagaatgtgctgccgctaagtcagctgctcaaaatgaacatgccaaaaaattgctgctccaaaagcagttggatgattctttgagagagattactatgttgcagagtaaaaagattatgtcagcagaagcagcagaagaaaactccaacctaaagaacttagttgaatcattatctacgaagaactcaatactggagaatgaacttattgtgactcgcaaaagtagtgatgatacaatggaaaaattgaaggaagtcgaggggaaatgcaaccatctacagcaaaacttggacaaattgcaggagaaacttacaaacttggaaaatgaaaatcatgtcttaagacagaaggcatttaatatgccgacaatgaacaatctgtctgtagctccaaagacattatctgagaaattttctgcatcaattgggcttcccaacagtgagccaaagcatatatatgaaagcccaacacctacaaaatatctggcttctcttccacagactttgagtacatcaaggagatcgaggttgcctgttgaaaggcatgagcaaaatcatgaaattttattgagatgcatcaaagaaaatttaggatataaggatggcaaaccagttgcagcatgtatcatttacaaatgtcttttgcactggcgtgcttttgaatcagagcgaactgctatttttgatcacgtgattgaggccataaatgatgtcctaaaggggaacgaagctgatggtagattaccttattggttgtccaatacctctgcattgctatgccttctccaaagaaatctgcggtcaaatggattattcactaccccgtctcgtcgttctggtggagctctagggaagatagcacaaacattgaggtctccttcaaagtttataggccgcagtgatactctaccacatgttgatgcacggtatccagccatactattcaaacagcagcttactgcatgtgtcgaaaagatatttgggcagctcagagataatctaaaaaaggaaatatcacctcttcttaatgtttgcattcaggctccaaagtcaacacgtgggcaatctggaaaagcatccaagtcatctggagttggtgcccacccagcatcgaactccaactgggacaatatcgtcaatttccttgacttacttatggatacattgcgcgaaaattatgtgccatccttctttatacgtaaacttatcacacaattattctccttcatcaatatacagttgtttaacagtcttcttctccgacgtgaatgttgtacattctccaatggggaatacgtgaaagctgggctatcgttgttggagaaatggattactgatgtcacagatgagtttgcgggtacatcttggcacgagctcaattatatcagacaagctgttggatttttggttatacaccaaaaaagaaaaaagacgcttgaggagatcaagcaagatctttgcccgtccttgagtgttcgccaaatctatagaatatgctcgatgtattgggatgacaaatacggtacccaaggcatttcaaccgaggtggttgctgcaatgcgggagatggtcaacaaagatacccagaatcttgtgtcaaattccttcttgttggatgatgacttaagtataccattctctaccgaggatctatcaatggcaatcccgtcaatagattatgctgacgtcgatcttccagaatctcttcagcactatacatcagtacagtttctactaaggcagcaggatccacagcctgcccaatagaatgaatgtggtcagcctgccctgaagatctgtctgtcccctggttttattggggtaacatccatctgcgatgttgtattgatgtttagagagtacctagtttggtggagtggacacaatttaaaagcaaccattgttgctagatgccaattcattggtgttcactccccaagtatttttcattgtacaggaaatgttgtaagtctgttgactagcgcaaaattagttatatcagtggtaaattgggcaatgcgcatcagtgcatcaccgatggtatcttctacacatgaatcgttagccagttaaccgctaggtcgggcgatcataagctccaggctgtctgatatgggt

SEQ ID NO: 217931 - DNA, 3867 bp, Zea Mays
atctgcgctactcaatctggtgaacacgtttttagtataaatagctctgaagtggtgtgattcagatctattggtctcaacgctatgtagccgatctatacatactcgtgaaggaataattgttaaagcattggattgtgctgctgccgcagctaatcgtgatgctttagcgaagactgtatatgcaagattatttgactggcttgttgagaatattaataagtctattggtcaagatgtggattccaagctacaaattggtgtgctggatatctacggctttgaaagcttcaaaaacaacagctttgagcagttctgcattaactttgcaaatgaaaaacttcagcaacactttaatgagcatgtattcaagatggaacaggaggagtacaaaagtgaggaaattaattggagctacattgagttcattgacaatcaggatgtgctggatttgattgaaaagaaaccaattggaattattgcactgctggatgaagcctgacctttgcgacaaagatgttcagaaacttctcttcccatcttaggctcgagaggacaaaattctcagaaacagattttaccatctcacactatgctgggaaggtcacgtatcaaacagattcttttctggaaaagaatcgagattatattgttgcagaacactgcaatcttctatcatcttcaaggtgcccatttgtttctggacttttcacttcattgcctgaagaatctataagatcttcatacaagttctcatcagttgcttccagattcaagctacaattgcaagccctgatggaaaccctaaactcgactgaacctcactatgtacgctgtgtgaagcccaactctgctaatcgacctcagctttttgaaaatcaaagtgtattgcatcaacttcgttgtgggggtgtcttagaggctgtccgtattagtcttgctggctatcctaccagaaggacttatgctgaatttgttgaccggtttgctgttcttgtgccagaattgatgattggaagttacgatgaaaaaatgatgacaaagggtattctcgaaaagatgaagcttgaaaattttcaacttggtaaaacaaaggtgttccttagggctggtcaaattgcgattttagatatgcgccgtgctgagattttggacaacgctgcacggcacattcaaggccgtttcagaacatttatcacacgcaaagaatttgtgaaaacaagggaggcttcaatttctatacaagcatactgcagaggctgtttggcaaggaagatgttcgcaaacagacgagaaacagcagcagctgtaattgttcagaagtatgtccgaagatggctgctacgtagagctcacctgcaagcatgtttggcagctctccttattcagtcttacattcgagggttcatcgctcgccgctatttctctgtcattagggaacataaagctgctacagtgatacagtccacatggagaagacggaagtttgtcatacttttccagaattaccggcaagccactgtggcaattcagtgttcttggagacagaagcttgcaagaaaggagctaaggaaactcaaaatggctgcaaatgaagctggtgcactgcgtgaggcaaagaataagcttgagaaaaagatggatgatcttgctttaagacttacccttgaaaggagactgcgggcttccagtgaagagtcaaaatcagtagaaatattgaagcgtgacaaaataattgaatcattaagtgcagaatgtgctgccgctaagtcagctgctcaaaatgaacatgccaaaaaattgctgctccaaaagcagttggatgattctttgagagagattactatgttgcagagtaaaaagattatgtcagcagaagcagcagaagaaaactccaacctaaagaacttagttgaatcattatctacgaagaactcaatactggagaatgaacttattgtgactcgcaaaagtagtgatgatacaatggaaaaattgaaggaagtcgaggggaaatgcaaccatctacagcaaaacttggacaaattgcaggagaaacttacaaacttggaaaatgaaaatcatgtcttaagacagaaggcatttaatatgccgacaatgaacaatctgtctgtagctccaaagacattatctgagaaattttctgcatcaattgggcttcccaacagtgagccaaagcatatatatgaaagcccaacacctacaaaatatctggcttctcttccacagactttgagtacatcaaggagatcgaggttgcctgttgaaaggcatgagcaaaatcatgaaattttattgagatgcatcaaagaaaatttaggatataaggatggcaaaccagttgcagcatgtatcatttacaaatgtcttttgcactggcgtgcttttgaatcagagcgaactgctatttttgatcacgtgattgaggccataaatgatgtcctaaaggggaacgaagctgatggtagattaccttattggttgtccaatacctctgcattgctatgccttctccaaagaaatctgcggtcaaatggattattcactaccccgtctcgtcgttctggtggagctctagggaagatagcacaaacattgaggtctccttcaaagtttataggccgcagtgatactctaccacatgttgatgcacggtatccagccatactattcaaacagcagcttactgcatgtgtcgaaaagatatttgggcagctcagagataatctaaaaaaggaaatatcacctcttcttaatgtttgcattcaggctccaaagtcaacacgtgggcaatctggaaaagcatccaagtcatctggagttggtgcccacccagcatcgaactccaactgggacaatatcgtcaatttccttgacttacttatggatacattgcgcgaaaattatgtgccatccttctttatacgtaaacttatcacacaattattctccttcatcaatatacagttgtttaacagtcttcttctccgacgtgaatgttgtacattctccaatggggaatacgtgaaagctgggctatcgttgttggagaaatggattactgatgtcacagatgagtttgcgggtacatcttggcacgagctcaattatatcagacaagctgttggatttttggttatacaccaaaaaagaaaaaagacgcttgaggagatcaagcaagatctttgcccgtccttgagtgttcgccaaatctatagaatatgctcgatgtattgggatgacaaatacggtacccaaggcatttcaaccgaggtggttgctgcaatgcgggagatggtcaacaaagatacccagaatcttgtgtcaaattccttcttgttggatgatgacttaagtataccattctctaccgaggatctatcaatggcaatcccgtcaatagattatgctgacgtcgatcttccagaatctcttcagcactatacatcagtacagtttctactaaggcagcaggatccacagcctgcccaatagaatgaatgtggtcagcctgccctgaagatctgtctgtcccctggttttattggggtaacatccatctgcgatgttgtattgatgtttagagagtacctagtttggtggagtggacacaatttaaaagcaaccattgttgctagatgccaattcattggtgttcactccccaagtatttttcattgtacaggaaatgttgtaagtctgttgactagcgcaaaattagttatatcagtggtaaattgggcaatgcgcatcagtgcatcaccgatggtatcttctacacatgaatcgttagccagttaaccgctaggtcgggcgatcataagctccaggctgtctgatatgggt

SEQ ID NO: 217932 - DNA, 5135 bp, Zea Mays
caaggcaaagcaaaaatttcgcgatgagtccaccacgactccaagcagctgcggccgcgccgctctaaccggagctccgttaagactccgccgccccaaatctcagcgcctgagtccgccgctctcctcccgtgctcgccgccactggtttccgcgccgggacttgggttcggtggggcgacgtggagcttagggtttcggcaggatgagctaccggaaggggttgaaggtttgggtggaggagaagggggaagggtgggtggaggcggaggtggtggaagcgaaggagcgcgccgtcgtcgtgttctcgagccagcggaaaaagattacagtttcaccagaaaaattgttgcccagggatacagatgaagatctgggtgggggtcatgtggatgacatgaccaaattgacatatctaaatgaaccaggtgttctttacaatctgaagaaaagatatgcattgaatgagatatatacgtacaccggaagcatcttgattgccgttaatccttttacaaggctgcctcacctgtacaatgaatacatgatggaacaatacaagggcatccgattaggggagctgagtccgcatgtttttgcggtggcggatgcatcatacagggctatggtgaatgattctcgaagccaatccatcctggttagtggtgaaagtggtgctggcaaaaccgaaacaacgaagcttattatgcagtatctcacctttgttggcggtagagccgctcttgatgaccggacggttgaacaacaggttctagaatctaaccctcttttggaggcatttggcaatgcaaaaacagtacgcaatgacaattcaagtcgatttggaaaattcgtagagatacagtttgattcaagtggtagaatatctggagctgctattaggacctatcttttggaaaggtcccgtgttgtgcaaattactgatcctgaaaggaattttcattgcttctaccaattgtgtgcctctggaaaggacgcagagctgtacaaacttgggcatataagcagttttcattacttgaatcaaagcaatacacatgatttggaagggacaaacaatgaagatgagtactggaagacaaaaagggcaatggatattgttgggattagcagagaagatcaggacgctatatttcggacattggcagccattcttcatcttggcaatattgagtttgtcccaggaaaagatgctgattcttcaaaaattaaggattcaacctcaaattttcatctccaaacagcagctaaattatttatgtgtgattcagatctattggtctcaacgctatgtagccgatctatacatactcgtgaaggaataattgttaaagcattggattgtgctgctgccgcagctaatcgtgatgctttagcgaagactgtatatgcaagattatttgactggcttgttgagaatattaataagtctattggtcaagatgtggattccaagctacaaattggtgtgctggatatctacggctttgaaagcttcaaaaacaacagctttgagcagttctgcattaactttgcaaatgaaaaacttcagcaacactttaatgagcatgtattcaagatggaacaggaggagtacaaaagtgaggaaattaattggagctacattgagttcattgacaatcaggatgtgctggatttgattgaaaagaaaccaattggaattattgcactgctggatgaagcctgtatgtttcccaaatctacgcatgagacctttgcgacaaagatgttcagaaacttctcttcccatcttaggctcgagaggacaaaattctcagaaacagattttaccatctcacactatgctgggaaggtcacgtatcaaacagattcttttctggaaaagaatcgagattatattgttgcagaacactgcaatcttctatcatcttcaaggtgcccatttgtttctggacttttcacttcattgcctgaagaatctataagatcttcatacaagttctcatcagttgcttccagattcaagctacaattgcaagccctgatggaaaccctaaactcgactgaacctcactatgtacgctgtgtgaagcccaactctgctaatcgacctcagctttttgaaaatcaaagtgtattgcatcaacttcgttgtgggggtgtcttagaggctgtccgtattagtcttgctggctatcctaccagaaggacttatgctgaatttgttgaccggtttgctgttcttgtgccagaattgatgattggaagttacgatgaaaaaatgatgacaaagggtattctcgaaaagatgaagcttgaaaattttcaacttggtaaaacaaaggtgttccttagggctggtcaaattgcgattttagatatgcgccgtgctgagattttggacaacgctgcacggcacattcaaggccgtttcagaacatttatcacacgcaaagaatttgtgaaaacaagggaggcttcaatttctatacaagcatactgcagaggctgtttggcaaggaagatgttcgcaaacagacgagaaacagcagcagctgtaattgttcagaagtatgtccgaagatggctgctacgtagagctcacctgcaagcatgtttggcagctctccttattcagtcttacattcgagggttcatcgctcgccgctatttctctgtcattagggaacataaagctgctacagtgatacagtccacatggagaagacggaagtttgtcatacttttccagaattaccggcaagccactgtggcaattcagtgttcttggagacagaagcttgcaagaaaggagctaaggaaactcaaaatggctgcaaatgaagctggtgcactgcgtgaggcaaagaataagcttgagaaaaagatggatgatcttgctttaagacttacccttgaaaggagactgcgggcttccagtgaagagtcaaaatcagtagaaatattgaagcgtgacaaaataattgaatcattaagtgcagaatgtgctgccgctaagtcagctgctcaaaatgaacatgccaaaaaattgctgctccaaaagcagttggatgattctttgagagagattactatgttgcagagtaaaaagattatgtcagcagaagcagcagaagaaaactccaacctaaagaacttagttgaatcattatctacgaagaactcaatactggagaatgaacttattgtgactcgcaaaagtagtgatgatacaatggaaaaattgaaggaagtcgaggggaaatgcaaccatctacagcaaaacttggacaaattgcaggagaaacttacaaacttggaaaatgaaaatcatgtcttaagacagaaggcatttaatatgccgacaatgaacaatctgtctgtagctccaaagacattatctgagaaattttctgcatcaattgggcttcccaacagtgagccaaagcatatatatagaatgaaaattgtaggaaagcccaacacctacaaaatatctggcttctcttccacagactttgagtacatcaaggagatcgaggttgcctgttgaaaggcatgagcaaaatcatgaaattttattgagatgcatcaaagaaaatttaggatataaggatggcaaaccagttgcagcatgtatcatttacaaatgtcttttgcactggcgtgcttttgaatcagagcgaactgctatttttgatcacgtgattgaggccataaatgatgtcctaaaggggaacgaagctgatggtagattaccttattggttgtccaatacctctgcattgctatgccttctccaaagaaatctgcggtcaaatggattattcactaccccgtctcgtcgttctggtggagctctagggaagatagcacaaacattgaggtctccttcaaagtttataggccgcagtgatactctaccacatgttgatgcacggtatccagccatactattcaaacagcagcttactgcatgtgtcgaaaagatatttgggcagctcagagataatctaaaaaaggaaatatcacctcttcttaatgtttgcattcaggctccaaagtcaacacgtgggcaatctggaaaagcatccaagtcatctggagttggtgcccacccagcatcgaactccaactgggacaatatcgtcaatttccttgacttacttatggatacattgcgcgaaaattatgtgccatccttctttatacgtaaacttatcacacaattattctccttcatcaatatacagttgtttaacagtcttcttctccgacgtgaatgttgtacattctccaatggggaatacgtgaaagctgggctatcgttgttggagaaatggattactgatgtcacagatgagtttgcgggtacatcttggcacgagctcaattatatcagacaagctgttggatttttggttatacaccaaaaaagaaaaaagacgcttgaggagatcaagcaagatctttgcccgtccttgagtgttcgccaaatctatagaatatgctcgatgtattgggatgacaaatacggtacccaaggcatttcaaccgaggtggttgctgcaatgcgggagatggtcaacaaagatacccagaatcttgtgtcaaattccttcttgttggatgatgacttaagtataccattctctaccgaggatctatcaatggcaatcccgtcaatagattatgctgacgtcgatcttccagaatctcttcagcactatacatcagtacagtttctactaaggcagcaggatccacagcctgcccaatagaatgaatgtggtcagcctgccctgaagatctgtctgtcccctggttttattggggtaacatccatctgcgatgttgtattgatgtttagagagtacctagtttggtggagtggacacaatttaaaagcaaccattgttgctagatgccaattcattggtgttcactccccaagtatttttcattgtacaggaaatgttgtaagtctgttgactagcgcaaaattagttatatcagtggtaaattgggcaatgcgcatcagtgcatcaccgatggtatcttctacacatgaatcgttagccagttaaccgctaggtcgggcgatcataagctccaggctgtctgatatgggt

SEQ ID NO: 217933 - DNA, 5196 bp, Zea Mays
cacactccgagattcccctcaaggcaccccaaaccgatgctttctggccactgaaaagcgcacgggagaagaagcgccaaggcaaagcaaaaatttcgcgatgagtccaccacgactccaagcagctgcggccgcgccgctctaaccggagctccgttaagactccgccgccccaaatctcagcgcctgagtccgccgctctcctcccgtgctcgccgccactggtttccgcgccgggacttgggttcggtggggcgacgtggagcttagggtttcggcaggatgagctaccggaaggggttgaaggtttgggtggaggagaagggggaagggtgggtggaggcggaggtggtggaagcgaaggagcgcgccgtcgtcgtgttctcgagccagcggaaaaagattacagtttcaccagaaaaattgttgcccagggatacagatgaagatctgggtgggggtcatgtggatgacatgaccaaattgacatatctaaatgaaccaggtgttctttacaatctgaagaaaagatatgcattgaatgagatatatacgtacaccggaagcatcttgattgccgttaatccttttacaaggctgcctcacctgtacaatgaatacatgatggaacaatacaagggcatccgattaggggagctgagtccgcatgtttttgcggtggcggatgcatcatacagggctatggtgaatgattctcgaagccaatccatcctggttagtggtgaaagtggtgctggcaaaaccgaaacaacgaagcttattatgcagtatctcacctttgttggcggtagagccgctcttgatgaccggacggttgaacaacaggttctagaatctaaccctcttttggaggcatttggcaatgcaaaaacagtacgcaatgacaattcaagtcgatttggaaaattcgtagagatacagtttgattcaagtggtagaatatctggagctgctattaggacctatcttttggaaaggtcccgtgttgtgcaaattactgatcctgaaaggaattttcattgcttctaccaattgtgtgcctctggaaaggacgcagagctgtacaaacttgggcatataagcagttttcattacttgaatcaaagcaatacacatgatttggaagggacaaacaatgaagatgagtactggaagacaaaaagggcaatggatattgttgggattagcagagaagatcaggacgctatatttcggacattggcagccattcttcatcttggcaatattgagtttgtcccaggaaaagatgctgattcttcaaaaattaaggattcaacctcaaattttcatctccaaacagcagctaaattatttatgtgtgattcagatctattggtctcaacgctatgtagccgatctatacatactcgtgaaggaataattgttaaagcattggattgtgctgctgccgcagctaatcgtgatgctttagcgaagactgtatatgcaagattatttgactggcttgttgagaatattaataagtctattggtcaagatgtggattccaagctacaaattggtgtgctggatatctacggctttgaaagcttcaaaaacaacagctttgagcagttctgcattaactttgcaaatgaaaaacttcagcaacactttaatgagcatgtattcaagatggaacaggaggagtacaaaagtgaggaaattaattggagctacattgagttcattgacaatcaggatgtgctggatttgattgaaaagaaaccaattggaattattgcactgctggatgaagcctgtatgtttcccaaatctacgcatgagacctttgcgacaaagatgttcagaaacttctcttcccatcttaggctcgagaggacaaaattctcagaaacagattttaccatctcacactatgctgggaaggtcacgtatcaaacagattcttttctggaaaagaatcgagattatattgttgcagaacactgcaatcttctatcatcttcaaggtgcccatttgtttctggacttttcacttcattgcctgaagaatctataagatcttcatacaagttctcatcagttgcttccagattcaagctacaattgcaagccctgatggaaaccctaaactcgactgaacctcactatgtacgctgtgtgaagcccaactctgctaatcgacctcagctttttgaaaatcaaagtgtattgcatcaacttcgttgtgggggtgtcttagaggctgtccgtattagtcttgctggctatcctaccagaaggacttatgctgaatttgttgaccggtttgctgttcttgtgccagaattgatgattggaagttacgatgaaaaaatgatgacaaagggtattctcgaaaagatgaagcttgaaaattttcaacttggtaaaacaaaggtgttccttagggctggtcaaattgcgattttagatatgcgccgtgctgagattttggacaacgctgcacggcacattcaaggccgtttcagaacatttatcacacgcaaagaatttgtgaaaacaagggaggcttcaatttctatacaagcatactgcagaggctgtttggcaaggaagatgttcgcaaacagacgagaaacagcagcagctgtaattgttcagaagtatgtccgaagatggctgctacgtagagctcacctgcaagcatgtttggcagctctccttattcagtcttacattcgagggttcatcgctcgccgctatttctctgtcattagggaacataaagctgctacagtgatacagtccacatggagaagacggaagtttgtcatacttttccagaattaccggcaagccactgtggcaattcagtgttcttggagacagaagcttgcaagaaaggagctaaggaaactcaaaatggctgcaaatgaagctggtgcactgcgtgaggcaaagaataagcttgagaaaaagatggatgatcttgctttaagacttacccttgaaaggagactgcgggcttccagtgaagagtcaaaatcagtagaaatattgaagcgtgacaaaataattgaatcattaagtgcagaatgtgctgccgctaagtcagctgctcaaaatgaacatgccaaaaaattgctgctccaaaagcagttggatgattctttgagagagattactatgttgcagagtaaaaagattatgtcagcagaagcagcagaagaaaactccaacctaaagaacttagttgaatcattatctacgaagaactcaatactggagaatgaacttattgtgactcgcaaaagtagtgatgatacaatggaaaaattgaaggaagtcgaggggaaatgcaaccatctacagcaaaacttggacaaattgcaggagaaacttacaaacttggaaaatgaaaatcatgtcttaagacagaaggcatttaatatgccgacaatgaacaatctgtctgtagctccaaagacattatctgagaaattttctgcatcaattgggcttcccaacagtgagccaaagcatatatatgaaagcccaacacctacaaaatatctggcttctcttccacagactttgagtacatcaaggagatcgaggttgcctgttgaaaggcatgagcaaaatcatgaaattttattgagatgcatcaaagaaaatttaggatataaggatggcaaaccagttgcagcatgtatcatttacaaatgtcttttgcactggcgtgcttttgaatcagagcgaactgctatttttgatcacgtgattgaggccataaatgatgtcctaaaggggaacgaagctgatggtagattaccttattggttgtccaatacctctgcattgctatgccttctccaaagaaatctgcggtcaaatggattattcactaccccgtctcgtcgttctggtggagctctagggaagatagcacaaacattgaggtctccttcaaagtttataggccgcagtgatactctaccacatgttgatgcacggtatccagccatactattcaaacagcagcttactgcatgtgtcgaaaagatatttgggcagctcagagataatctaaaaaaggaaatatcacctcttcttaatgtttgcattcaggctccaaagtcaacacgtgggcaatctggaaaagcatccaagtcatctggagttggtgcccacccagcatcgaactccaactgggacaatatcgtcaatttccttgacttacttatggatacattgcgcgaaaattatgtgccatccttctttatacgtaaacttatcacacaattattctccttcatcaatatacagttgtttaacagtcttcttctccgacgtgaatgttgtacattctccaatggggaatacgtgaaagctgggctatcgttgttggagaaatggattactgatgtcacagatgagtttgcgggtacatcttggcacgagctcaattatatcagacaagctgttggatttttggttatacaccaaaaaagaaaaaagacgcttgaggagatcaagcaagatctttgcccgtccttgagtgttcgccaaatctatagaatatgctcgatgtattgggatgacaaatacggtacccaaggcatttcaaccgaggtggttgctgcaatgcgggagatggtcaacaaagatacccagaatcttgtgtcaaattccttcttgttggatgatgacttaagtataccattctctaccgaggatctatcaatggcaatcccgtcaatagattatgctgacgtcgatcttccagaatctcttcagcactatacatcagtacagtttctactaaggcagcaggatccacagcctgcccaatagaatgaatgtggtcagcctgccctgaagatctgtctgtcccctggttttattggggtaacatccatctgcgatgttgtattgatgtttagagagtacctagtttggtggagtggacacaatttaaaagcaaccattgttgctagatgccaattcattggtgttcactccccaagtatttttcattgtacaggaaatgttgtaagtctgttgactagcgcaaaattagttatatcagtggtaaattgggcaatgcgcatcagtgcatcaccgatggtatcttctacacatgaatcgttagccagttaaccgctaggtcgggcgatcataagctccaggctgtctgatatgggt

SEQ ID NO: 217934 - DNA, 2514 bp, Zea Mays
tctcctccaccacccgtttctctttctctaggctcgcgcctgccccgccttcgttgtcgcgcctgccacctgctcgacgaatcgccgcttccgccccacgccgcgatgccgacgcccctcgccgcggcgctgctgccactgcccgcctctcccgcactgcactttccgcggccgcggcccggtccctcatggcgtgcgcggccggccgtggttagggcggccgctctccgcgccctgccacggcgcctcgagctctgtccgccgtgccttgcggcggtcgagagtaacccggccccgccacccttagctccgccaccgccggacgaggcgagcgccggctcaggcctcgatgcgagggccgggggaggtggcggtggtggtgacggaggtggcggcgctgatcttgggtggttgagggctttcccgcatgtgttcactgcgtcaatggcaaacttcctattcggttaccacattggggttatgaacggtccaatagaagatattgcaacccagcttggttttcaaggaaatccgttcctccaaggtcttgtggtgagcatattcattgttggtgccttttttgggagcttaggctcatctgcattagtagataagttcggctgcaagaggacccttcagatcgacagtattccattgattattggagctctcctgagtgcacaggctgattctttggatgagatgcttttgggaagattccttgttggcatcgggatcggcgtaaacactgttcttgttccaatatacatctctgaggttgctccaacaaaatataggggcactttggggactctgtgtcaaattggaacatgtctaggcataattgctgcactttccttggggataccttctgagagtgatccacattggtgaggcatctcttgttggcatttatgcatcttaatgatgtggcgaacaatgctttatgctgcatgtgtacctgggattcttattgttgctgggatgcaatttgctgttgagagtccacggtggcttgccaaggttggaaggttcgatgatgctagaaaggttgtagagagcctttgggaaccttctgaagttgagaagtccatggaagagatcaaagctgttgtgctaaatgatgattcacggggcagctggtcagaccttctggtggaaccacataatagagttgcattgattggaggatcccttttctttctgcaacagtttgctggaataaatggtgttctttatttttcatcattgacattccgtgatgttggtatcagtagtggtgctttagcaagcttatatgttggaataaccaattttggaggggcactagttgcttcaaatttgatggacaagcaagggcgaaagaagcttttgataggaagctaccttggaatggcttttgcaatgttccttatagtatatggtattagcttcccgcttgatgaaggagttgcccacagcttatcaatcgctggaactcttttgtatgtgctttcactttctattctctctagcaaaccccttaggggcttgggctggtttggtgacaagggaattggaggggatccatggaggaggaaatccattgctatacaaaattgttgttcttcactagcagaaggcttgcttagaaccttttgtggaaattatacctgtgggtttctcaatgtatggaaatcatttacttacatcatgaacaatgtgaaaggttttctagtacgatctctgcttcatgatatgatgataaatgaattacaccttgttaatgtgtaaagaaaccactaattcagaatatttattagaaattccacttataaaatttgtgtttataatttttaaaaagattgttagttgcgagatctattttttttcatttgcaggtacatttttacttttgcaattggtgctggaccagttaccggtatcattataccagagctcagcagtgctcggacacgctcaaaagttatgggcttcagtttcactgtgcattggatatgtaactttctggtgggactatttttcctggagcttgtgcacaagtttggggttggagcagtctatgcaggttttggtggggtctccctgctgacagcactcttcgcctacaatttcatagttgaaacaaaaggacgttcgcttgaggaaattgagatgtccatgagcagtgctacccctggcaagcaagagtagaacatctcaactgtatggacaaactgaacaactgacgggaggaatttaataagagaagagggggcctaatcccatgaatcttcagcagcagcagtttgttgcaaacaacatcaactcctatagataatgagcacaatcaaattcagcttttctttggtagcatgagaatcgttgtacaatattaaaaagggtgaagaaaacgacccttttaatttgttttttgtacatctgatgtatatattttacgccttctgtagtacgtaaaataaagggaacagatctttctgatattacttgattgatgaatttggaatattcgca

SEQ ID NO: 217935 - DNA, 2306 bp, Zea Mays
tctcctccaccacccgtttctctttctctaggctcgcgcctgccccgccttcgttgtcgcgcctgccacctgctcgacgaatcgccgcttccgccccacgccgcgatgccgacgcccctcgccgcggcgctgctgccactgcccgcctctcccgcactgcactttccgcggccgcggcccggtccctcatggcgtgcgcggccggccgtggttagggcggccgctctccgcgccctgccacggcgcctcgagctctgtccgccgtgccttgcggcggtcgagagtaacccggccccgccacccttagctccgccaccgccggacgaggcgagcgccggctcaggcctcgatgcgagggccgggggaggtggcggtggtggtgacggaggtggcggcgctgatcttgggtggttgagggctttcccgcatgtgttcactgcgtcaatggcaaacttcctattcggttaccacattggggttatgaacggtccaatagaagatattgcaacccagcttggttttcaaggaaatccgttcctccaaggtcttgtggtgagcatattcattgttggtgccttttttgggagcttaggctcatctgcattagtagataagttcggctgcaagaggacccttcagatcgacagtattccattgattattggagctctcctgagtgcacaggctgattctttggatgagatgcttttgggaagattccttgttggcatcgggatcggcgtaaacactgttcttgttccaatatacatctctgaggttgctccaacaaaatataggggcactttggggactctgtgtcaaattggaacatgtctaggcataattgctgcactttccttggggataccttctgagagtgatccacattggtggcgaacaatgctttatgctgcatgtgtacctgggattcttattgttgctgggatgcaatttgctgttgagagtccacggtggcttgccaaggttggaaggttcgatgatgctagaaaggttgtagagagcctttgggaaccttctgaagttgagaagtccatggaagagatcaaagctgttgtgctaaatgatgattcacggggcagctggtcagaccttctggtggaaccacataatagagaatgcatgtttgggtgtgcgtatgttcacgcttggttgttggactgcactgcatgtacattcgtctgattctgccatccttaaaggcccatactggacgatctattatctgggcactaagtttgcttcttgacttttgctatgatgagttattgctgagatgttctgtcataatatttggaacattcatgtttcacacaccacaacaatatctacatgtttctgcagttgcattgattggaggatcccttttctttctgcaacagtttgctggaataaatggtgttctttatttttcatcattgacattccgtgatgttggtatcagtagtggtgctttagcaagcttatatgttggaataaccaattttggaggggcactagttgcttcaaatttgatggacaagcaagggcgaaagaagcttttgataggaagctaccttggaatggcttttgcaatgttccttatagtatatggtattagcttcccgcttgatgaaggagttgcccacagcttatcaatcgctggaactcttttgtacatttttacttttgcaattggtgctggaccagttaccggtatcattataccagagctcagcagtgctcggacacgctcaaaagttatgggcttcagtttcactgtgcattggatatgtaactttctggtgggactatttttcctggagcttgtgcacaagtttggggttggagcagtctatgcaggttttggtggggtctccctgctgacagcactcttcgcctacaatttcatagttgaaacaaaaggacgttcgcttgaggaaattgagatgtccatgagcagtgctacccctggcaagcaagagtagaacatctcaactgtatggacaaactgaacaactgacgggaggaatttaataagagaagagggggcctaatcccatgaatcttcagcagcagcagtttgttgcaaacaacatcaactcctatagataatgagcacaatcaaattcagcttttctttggtagcatgagaatcgttgtacaatattaaaaagggtgaagaaaacgacccttttaatttgttttttgtacatctgatgtatatattttacgccttctgtagtacgtaaaataaagggaacagatctttctgatattacttgattgatgaatttggaatattcgca

SEQ ID NO: 217936 - DNA, 1833 bp, Zea Mays
ccgagccctccgcccccgtccgtctcgccgtgacgcgcgcggctcgcgataacttccaccagataactcccacgtcctacccgcgctcgttcattgctttcacgaggccaaggccgccgacgcccccgaggtcgtggtttaggggtcccctccccgccgccgagtacatcgagtccatggacagggccaacgccgcaaccacagggcccaccgccgagtccgcgcgggcggggcgcacgactccatggacagggctacctccccgttcgagggcgactcgccaatgttgcagtcgcaggccccgccgtcaagtccaccgagcggggcgcacgactccatggacagggccacctcgccgaggagcggctccgccacaggccgatccgacgccgcagccgtaggcccccgccgccaagtgtgccgagcggggcgcacatccctcgacgtcgccttcttcgacgacctctcgtcgagttcacgacgccaagaaggtcgtgcccgacgacaagcttgctcaacgcaccgggcgcgcgctccatagtaccagcgtgatgtcgcaccgccatccacgctcgacgcatccagctcctttggcgtcatctaggttcaaaacacctcacctcaatccaatgttaacaagcttggaggacatcaccaacgcaccatatgcagatcttctctctattaattcaatgaggaaaggaaaggggacttagaaattagtcttggcaaatggaggggaacgtctcaatgaccgaggcacattttttcttgttagttagctcatggtatgttaaaaggtaaggacctcaatccaatgaccagaatgtgtccatctttaaaaggtaaggaattggttaggcttcatattgtctctcttttgattggtatgttacatgattcttctccaaaaacaaatgcataatcatgtgtttaacaacattcttgtttatccttgtcttcgaaaaaacagaacgtactaattttggccgacaccaagatcacttattggaataactttacttatgatcagtagcattacctttttttgatgtacaatatattggatgatcagtagcatgtgagcagtttctaataaaaaggaagctgcaatgataacttacgttcctaatatgacacattgtgttttttaacttatcacacttgttgttatgtgcgagttgtagagaattcaaactgagcagaaatccatgtattgctggccacacaggggagggactcatcctccatctcccctcgccaccgcgccaggcgtgatgcttcgtctcctccccccaggaagccattgtagatggcactgtcggccaagggcaaggaggtctgccacaggtcctgtgacgtcctcgacatcaacgccgatgagtggggcaacgagaataggagcatgaccaccgagctcagggagcagcagtaccggctcaggaaggcactggaagaccgggtgcaagtcagtagggagaccgccaagatgtggcgatgggacaagctccatcagatatggattggaggaccttacaaaacccaacaagctcaattcaaaattcaagaggaacagcagcacgccacgagcagcgacgccagagaagagggagttccaaatggcgattacaatgaagatcagacgacaaaagacatgagcgagggcttattggctgctccgccgaggtcatgcaatggccctactgggagctcgacgagatggacgacacactcacctacagaggggagctagggattttgcagctcctactagagaatggcattagagtaaatgaactaacaaggatagaggttgctctcgtcgtcccataa

SEQ ID NO: 217937 - DNA, 1866 bp, Zea Mays
gccgccgcaccgagccctccgcccccgtccgtctcgccgtgacgcgcgcggctcgcgataacttccaccagataactcccacgtcctacccgcgctcgttcattgctttcacgaggccaaggccgccgacgcccccgaggtcgtggtttaggggtcccctccccgccgccgagtacatcgagtccatggacagggccaacgccgcaaccacagggcccaccgccgagtccgcgcgggcggggcgcacgactccatggacagggctacctccccgttcgagggcgactcgccaatgttgcagtcgcaggccccgccgtcaagtccaccgagcggggcgcacgactccatggacagggccacctcgccgaggagcggctccgccacaggccgatccgacgccgcagccgtaggcccccgccgccaagtgtgccgagcggggcgcacatccctcgacgtcgccttcttcgacgacctctcgtcgagttcacgacgccaagaaggtcgtgcccgacgacaagcttgctcaacgcaccgggcgcgcgctccatagtaccagcgtgatgtcgcaccgccatccacgctcgacgcatccagctcctttggcgtcatctaggtgctcctctgcccgatcccggaggttcaaaacacctcacctcaatccaatgttaacaagcttggaggacatcaccaacgcaccatatgcagatcttctctctattaattcaatgaggaaaggaaaggggacttagaaattagtcttggcaaatggaggggaacgtctcaatgaccgaggcacattttttcttgttagttagctcatggtatgttaaaaggtaaggacctcaatccaatgaccagaatgtgtccatctttaaaaggtaaggaattggttaggcttcatattgtctctcttttgattggtatgttacatgattcttctccaaaaacaaatgcataatcatgtgtttaacaacattcttgtttatccttgtcttcgaaaaaacagaacgtactaattttggccgacaccaagatcacttattggaataactttacttatgatcagtagcattacctttttttgatgtacaatatattggatgatcagtagcatgtgagcagtttctaataaaaaggaagctgcaatgataacttacgttcctaatatgacacattgtgttttttaacttatcacacttgttgttatgtgcgagttgtagagaattcaaactgagcagaaatccatgtattgctggccacacaggaattattgcattgggagactgctctgctagaggaaggttggggctcactaaatcctctttggtctgatgcgaaacaaggggagggactcatcctccatctcccctcgccaccgcgccaggcgtgatgcttcgtctcctccccccaggaagccattgtagatggcactgtcggccaagggcaaggaggtctgccacaggtcctgtgacgtcctcgacatcaacgccgatgagtggggcaacgagaataggagcatgaccaccgagctcagggagcagcagtaccggctcaggaaggcactggaagaccgggtgcaagtcagtagggagaccgccaagatgtggcgatgggacaagctccatcagatatggattggaggaccttacaaaacccaacaagctcaattcaaaattcaagaggaagtactaaagccgaatcgagatctaatgtgtgggcggaggaggcaaataaatagtgggaggtcggggacgctgcgctctggcctatggacatgagactgaaatgtgatcggtcgaatcgagatctaatgtgtgggcggaggaggcaaagaaatagtgggaggccggggacgctgcgcgctgg

SEQ ID NO: 217938 - DNA, 2394 bp, Zea Mays
aggttcaatgaaaatgtaatgaacaagccaggttttgtggatgtatatccagcttcacgaataacaaggaatatacagcatcatttcgagtctgtttcccgttttaatactagcaaactgatgaacactgagaagcaaaaaggcctaaggattgtaacagaaccaagaaatctgtcatcagcactaagatggatttctgatgaggaaaaaacaggtatatatcgttgggaactctgaacctcgtgaaaatattggcgttcttaatgaacttatacatgctcgtgatgaacttgcaaagattatgggatgcaaatcttatgctgaatttgctattcgtcctaacatggccgcgtcagccgatgtggttatgtcatttcttgaaaatttgagcaacactgttaagcataaagctgaagaggaatttaagaccatacataatttcaagagaagaacatgtaatgaaaagagtgccgatctagaaccctgggatgaggattacttcattggaatgatgaaatcatctgtatatgacctggacgcttcagttattgcaaaatactttcccttgtcgcagtgcctaaaagggttaaatgttctcgttgaatcattatttggtgcaacatttcatcaaattcctatgagggatggggagtcatggcatccagatgtgataaagctccgtctccatcatcctgatgagggtgatttaggattcatgtatctggacctctactccagaaaggggaaacatccaggatgcgcacattttgctatccaaggggggcggagattatcagactcaaactaccaattgccggtgcttgtagaaaaactgcaaggcttaaccatggggatgttgaaactctttttcatgagtttgggcatgcccttcactctctgttgtcaagaacggaatatcagcatttctctggtactagggttgctcttgatgtggctgaaaccccctcaaacctatttgaatattatgcctgggactatcgtgtcttgaagacatttgctctagatgaaacaactggagatgcaataccagaaaagctggtaaaggcactaaatgcttctcggaacatgtttcctgctactgagctccagaggcagatcttctactctataatggacctaaccttgtttggcgagcaatcatccaagcctatggacacgatttccactgttgccgatttgagaaggaagcatacaagtgggaaatacgcagaaggcacacactggcatacacgatttactcatctcgtaacctacggtgctggctactatacctatctatatgctagatgttttgccacaactatatggcaagaagtatgccaagaagacccgttgtcccgcagtgcaggcagtgccatcagggacaaattcttgcggttcggcgggtcaaaggacccatcatccctgctgaaggattttgcaggtgatgccgtcattagaaactccgggagtggaataatcccgaacgctagttccttgtgcaaagaaattggattgtgaaatagcactgtgggggcggaggctggcatctttctgcttgagcttggctgaagggccaagaactaaacctcgagggcttgaggtagtttgagggagattggagatgatttaatcctctcctattcaattcacctctaaccggacaagtccgaacaagtcatgaaggggcagagtcgctggagttccggtgcttgacctctcggcatacattaatggtgtggtgctagcggaagatggttctcctagacatactttcttcaaagtttcacctgcggatggttttgcaatctgtcaaattttactagaggacggttgacggtaccatattattactcccattgcctgggatttttccttcaaaatgttatgatgaagtctgtcagccctgtagcttatagcactgattcataggagccataggtcttccttgctcgtttcatggaaatgagaccccgtttggtaaagattagtgcctttatttttgtcctatttagtctctgaattgccaaaaggtgggactaaaacataaacagaactattttagtctctagtctctcaaggagtgactaaaagagagtaaaccacataaatttcaccttttgtctctcctttattttagttgtactaatagtgtgagaatgctaaaagatattttgacactcttatatatgttttgaatacttttagtctctacaaacaaacagggtagagactaaactttagtccttggcttaaaggaaccaaactgggcctaagaaagatcttgaatgcaaggcagctttgtatcaccgacctgaacagcctgttcagatacttgttcgtatcactattctactacatgtttatttgtgacagctccaattagtggaaatt

SEQ ID NO: 217939 - DNA, 2513 bp, Zea Mays
aggttcaatgaaaatgtaatgaacaagccaggttttgtggatgtatatccagcttcacgaataacaaggaatatacagcatcatttcgagtctgtttcccgttttaatactagcaaactgatgaacactgagaagcaaaaaggcctaaggattgtaacagaaccaagaaatctgtcatcagcactaagatggatttctgatgaggaagtcagaaaacaggtatatatcgttgggaactctgaacctcgtgaaaatattggcgttcttaatgaacttatacatgctcgtgatgaacttgcaaagattatgggatgcaaatcttatgctgaatttgctattcgtcctaacatggccgcgtcagccgatgtggttatgtcatttcttgaaaatttgagcaacactgttaagcataaagctgaagaggtttgaatggatccagctaatactggcatattttggcaaaatgcactgcggctcctgttgaaatgcatcattaaattctatgatccatctctcttgataacatctcttatgcaggaatttaagaccatacataatttcaagagaagaacatgtaatgaaaagagtgccgatctagaaccctgggatgaggattacttcattggaatgatgaaatcatctgtatatgacctggacgcttcagttattgcaaaatactttcccttgtcgcagtgcctaaaagggttaaatgttctcgttgaatcattatttggtgcaacatttcatcaaattcctatgagggatggggagtcatggcatccagatgtgataaagctccgtctccatcatcctgatgagggtgatttaggattcatgtatctggacctctactccagaaaggggaaacatccaggatgcgcacattttgctatccaaggggggcggagattatcagactcaaactaccaattgccggtgcttgtagaaaaactgcaaggcttaaccatggggatgttgaaactctttttcatgagtttgggcatgcccttcactctctgttgtcaagaacggaatatcagcatttctctggtactagggttgctcttgatgtggctgaaaccccctcaaacctatttgaatattatgcctgggactatcgtgtcttgaagacatttgctctagatgaaacaactggagatgcaataccagaaaagctggtaaaggcactaaatgcttctcggaacatgtttcctgctactgagctccagaggcagatcttctactctataatggacctaaccttgtttggcgagcaatcatccaagcctatggacacgatttccactgttgccgatttgagaaggaagcatacaagtgggaaatacgcagaaggcacacactggcatacacgatttactcatctcgtaacctacggtgctggctactatacctatctatatgctagatgttttgccacaactatatggcaagaagtatgccaagaagacccgttgtcccgcagtgcaggcagtgccatcagggacaaattcttgcggttcggcgggtcaaaggacccatcatccctgctgaaggattttgcaggtgatgccgtcattagaaactccgggagtggaataatcccgaacgctagttccttgtgcaaagaaattggattgtgaaatagcactgtgggggcggaggctggcatctttctgcttgagcttggctgaagggccaagaactaaacctcgagggcttgaggtagtttgagggagattggagatgatttaatcctctcctattcaattcacctctaaccggacaagtccgaacaagtcatgaaggggcagagtcgctggagttccggtgcttgacctctcggcatacattaatggtgtggtgctagcggaagatggttctcctagacatactttcttcaaagtttcacctgcggatggttttgcaatctgtcaaattttactagaggacggttgacggtaccatattattactcccattgcctgggatttttccttcaaaatgttatgatgaagtctgtcagccctgtagcttatagcactgattcataggagccataggtcttccttgctcgtttcatggaaatgagaccccgtttggtaaagattagtgcctttatttttgtcctatttagtctctgaattgccaaaaggtgggactaaaacataaacagaactattttagtctctagtctctcaaggagtgactaaaagagagtaaaccacataaatttcaccttttgtctctcctttattttagttgtactaatagtgtgagaatgctaaaagatattttgacactcttatatatgttttgaatacttttagtctctacaaacaaacagggtagagactaaactttagtccttggcttaaaggaaccaaactgggcctaagaaagatcttgaatgcaaggcagctttgtatcaccgacctgaacagcctgttcagatacttgttcgtatcactattctactacatgtttatttgtgacagctccaattagtggaaatt

SEQ ID NO: 217940 - DNA, 1746 bp, Zea Mays
tttccaagagcggaatggtagcagggtgatttaggattcatgtatctggacctctactccagaaaggggaaacatccaggatgcgcacattttgctatccaaggggggcggagattatcagactcaaactaccaattgccgatcattgccttaatatgcaacttctcaggtgcttgtagaaaaactgcaaggcttaaccatggggatgttgaaactctttttcatgagtttgggcatgcccttcactctctgttgtcaagaacggaatatcagcatttctctggtactagggttgctcttgatgtggctgaaaccccctcaaacctatttgaatattatgcctgggactatcgtgtcttgaagacatttgctctagatgaaacaactggagatgcaataccagaaaagctggtaaaggcactaaatgcttctcggaacatgtttcctgctactgagctccagaggcagatcttctactctataatggacctaaccttgtttggcgagcaatcatccaagcctatggacacgatttccactgttgccgatttgagaaggaagcatacaagtgggaaatacgcagaaggcacacactggcatacacgatttactcatctcgtaacctacggtgctggctactatacctatctatatgctagatgttttgccacaactatatggcaagaagtatgccaagaagacccgttgtcccgcagtgcaggcagtgccatcagggacaaattcttgcggttcggcgggtcaaaggacccatcatccctgctgaaggattttgcaggtgatgccgtcattagaaactccgggagtggaataatcccgaacgctagttccttgtgcaaagaaattggattgtgaaatagcactgtgggggcggaggctggcatctttctgcttgagcttggctgaagggccaagaactaaacctcgagggcttgaggtagtttgagggagattggagatgatttaatcctctcctattcaattcacctctaaccggacaagtccgaacaagtcatgaaggggcagagtcgctggagttccggtgcttgacctctcggcatacattaatggtgtggtgctagcggaagatggttctcctagacatactttcttcaaagtttcacctgcggatggttttgcaatctgtcaaattttactagaggacggttgacggtaccatattattactcccattgcctgggatttttccttcaaaatgttatgatgaagtctgtcagccctgtagcttatagcactgattcataggagccataggtcttccttgctcgtttcatggaaatgagaccccgtttggtaaagattagtgcctttatttttgtcctatttagtctctgaattgccaaaaggtgggactaaaacataaacagaactattttagtctctagtctctcaaggagtgactaaaagagagtaaaccacataaatttcaccttttgtctctcctttattttagttgtactaatagtgtgagaatgctaaaagatattttgacactcttatatatgttttgaatacttttagtctctacaaacaaacagggtagagactaaactttagtccttggcttaaaggaaccaaactgggcctaagaaagatcttgaatgcaaggcagctttgtatcaccgacctgaacagcctgttcagatacttgttcgtatcactattctactacatgtttatttgtgacagctccaattagtggaaatt

SEQ ID NO: 217941 - DNA, 2922 bp, Zea Mays
cgtccacacatgcttctagatgcctctcctctcctcgcttcatccacctcatctcactccagcgtcttccatttgacctcggtgccttctcctcttgcttgtggccacagtctgagccatgccgcgcgtgcgacgaccagtagaaaccgctctcgagcgcgacgctgcagcaggcacaggcgaggtcccgctcatccagatcacaccagcccatcgacgacagcaacaccttctcgggcgccgccgccgcgacgcagtcctcgcacatgtctccggcgtccacgagctagcggtgggtcccgaagaggctgccgatgccgaggcgggagcagagcgcgcacggcggcgagagatcgaagaagccggcgaaccgagctatgaggattaggattttggttttaagggtaatttttcccaatcactatatgctcctatactcttctcaaatattgatgtggtatgcgagtaacaaaacttcttctcaatataaataggtttggtagtgtggccttactgttacgttactttccttcttttaaaaaaattaaatgtaactacaagatattgaccatggatatctattgtttgtagcatgatatatatttcgaatgtgtgttaatcatggccaggtcgcacaatgtgtcatgctatatagtaaatatcaaataattgcaattgagcttcttttctgtgaataaaattcagctcaacataaataggtttagtagtgtgtgtttactgttaatattttcatgacatttgttattaacaactttggaactaagttgattatatctatactcatacttttattatttccctttacatcgataatttgtacatgtgtgtgcttattcattttcacatatcctgatttgagtttttttctcctcaacaggtgagttgtaggtactatctgtctattgtatgatagttacgcttataaattctatatgtgcaatatattaatattgctgcttcgatgttgattgctttacaacagtttgctgttgctcaagccatttattttcttttcgaaatctgcgctttcataaatattaatagttgttggccacttactgttagcaaaaaaaaattacctaaaatctaagagcttagttgattgtattattaaccatacatttattgtttctatttacatcaagaattttcacttatgtgtgcttattgatttgcacagttgttagcatggctttttttatttatcttgctcccctacaggtgagttgtatgtactatctacctgaccaacagcatttacgcttacaaattatttctatgtgatctattagtatttcttgttcgattgcttcacacatctttgttgttgctcaggtcatatttttttcaattgtatgtttgcatacagactaatagctacgcacagtccatttgttgttatcagaacaacaaaaaacttatatgtgcaccgatatatttattatttgtctttgcatcgatgattcacgtggatatacacttattcattttacaattttccataagattgttttattcctttgcaggtaagctctaaagcctgtctctttaattgacactatatacatttatgtatttttccaaacaagtataaagtcatataggttactttgtggttgattaatatattatgcgtggtaaagtatatattctatgcggagaagtggaaacgacctcatcgttgattgcggtgttctggtactcgctgttctaaactttctgttgcagtaagatacccctccctccttgattgtaggtcctcaattcacacatgagtttatgttttaggttgtttttttcctggaatactctatgtcgactaaacaattttggttctttcgatttccttcatgtgaagtaaagatgttatactatgccttggctacatgtgccatgtttgactattattattatttaaggtaacttatagtttctgtttgcactacattcatcgttgtttacgctttcctttatgatttaccttcaaagatcataaaatatttgggccagaaaaaaatggttaagctctaggccatgaatgaccttcaaccgttaggacatagaattcagcttattttcaggaatggaactatttgtcttggtgatagctggcttgtgtttgcttccaataataaaggtgaacaaggttgcatattgttttgttgatatacttctgtggactctttgctttaagtggtcatctttgaccataccacatgtccaaaaaggtacttaagcagtgatggaactatcacatttggtacacttaattttatagtgttgcttgtctctcttttatacctttttgtggtttttgcgccatacactcatctcttttttacagcttgccaactaaaatttgttttttgttttgcatttgctttaggcctaatgaaaggcaaaacagttgtcgatgttgtgggaaagttcacctggtattttattctttgctcgagctaacattcaagcttcttttgtgtgtttatccttgatcctttataatccttttagtgatgcatatgggaatgactaagtcaacaaatatgtgtgcaggacccaataagacaagaaaaaggcaaagagcacaatagttctcatatgcctaattattcccttgattcatgattatagctttgcctcctgatttaatgtccctttcctatcatttgagatatacaggtcaccctaaggtaagagaggtatttcctttattggagattacaattttgcctcatgttccattggattcttttttttgttgtcatcatatatgtttagcaggcataaaagaagaaagaccatttcttgtggagatttatgctgatgacataaatccaactacaactataaaagggaagcactacatcggctctgaacaagcaatcatggaatattgagcta

SEQ ID NO: 217942 - DNA, 3136 bp, Zea Mays
cgtccacacatgcttctagatgcctctcctctcctcgcttcatccacctcatctcactccagcgtcttccatttgacctcggtgccttctcctcttgcttgtggccacagtctgagccatgccgcgcgtgcgacgaccagtagaaaccgctctcgagcgcgacgctgcagcaggcacaggcgaggtcccgctcatccagatcacaccagcccatcgacgacagcaacaccttctcgggcgccgccgccgcgacgcagtcctcgcacatgtctccggcgtccacgagctagcggtgggtcccgaagaggctgccgatgccgaggcgggagcagagcgcgcacggcggcgagagatcgaagaagccggcgaaccgagctatgaggattaggattttggttttaaggttctttttttagctcgagcatccttataaaaaaattatttcaatggctgtttccttagagctagtttgacaactccattttcccaagaaaaaatgaactaatttcccttgaaaaatgaaaatcccccctatattatttctctatgtgtcgcactacattataaatatcaagtaattgtaatggtgcttctttcctttaaatatgcgtattaattcttgcagcagttaagtctacatgcacatttgtgtatctatttacgtagcgaactgccaaatatcatgtgtggagctatttttacaagtttattaaccacattccttgtcatgcgcagggtaatttttcccaatcactatatgctcctatactcttctcaaatattgatgtggtatgcgagtaacaaaacttcttctcaatataaataggtttggtagtgtggccttactgttacgttactttccttcttttaaaaaaattaaatgtaactacaagatattgaccatggatatctattgtttgtagcatgatatatatttcgaatgtgtgttaatcatggccaggtcgcacaatgtgtcatgctatatagtaaatatcaaataattgcaattgagcttcttttctgtgaataaaattcagctcaacataaataggtttagtagtgtgtgtttactgttaatattttcatgacatttgttattaacaactttggaactaagttgattatatctatactcatacttttattatttccctttacatcgataatttgtacatgtgtgtgcttattcattttcacatatcctgatttgagtttttttctcctcaacaggtgagttgtaggtactatctgtctattgtatgatagttacgcttataaattctatatgtgcaatatattaatattgctgcttcgatgttgattgctttacaacagtttgctgttgctcaagccatttattttcttttcgaaatctgcgctttcataaatattaatagttgttggccacttactgttagcaaaaaaaaattacctaaaatctaagagcttagttgattgtattattaaccatacatttattgtttctatttacatcaagaattttcacttatgtgtgcttattgatttgcacagttgttagcatggctttttttatttatcttgctcccctacaggtgagttgtatgtactatctacctgaccaacagcatttacgcttacaaattatttctatgtgatctattagtatttcttgttcgattgcttcacacatctttgttgttgctcaggtcatatttttttcaattgtatgtttgcatacagactaatagctacgcacagtccatttgttgttatcagaacaacaaaaaacttatatgtgcaccgatatatttattatttgtctttgcatcgatgattcacgtggatatacacttattcattttacaattttccataagattgttttattcctttgcaggtaagctctaaagcctgtctctttaattgacactatatacatttatgtatttttccaaacaagtataaagtcatataggttactttgtggttgattaatatattatgcgtggtaaagtatatattctatgcggagaagtggaaacgacctcatcgttgattgcggtgttctggtactcgctgttctaaactttctgttgcagtaagatacccctccctccttgattgtaggtcctcaattcacacatgagtttatgttttaggttgtttttttcctggaatactctatgtcgactaaacaattttggttctttcgatttccttcatgtgaagtaaagatgttatactatgccttggctacatgtgccatgtttgactattattattatttaaggtaacttatagtttctgtttgcactacattcatcgttgtttacgctttcctttatgatttaccttcaaagatcataaaatatttgggccagaaaaaaatggttaagctctaggccatgaatgaccttcaaccgttaggacatagaattcagcttattttcaggaatggaactatttgtcttggtgatagctggcttgtgtttgcttccaataataaaggtgaacaaggttgcatattgttttgttgatatacttctgtggactctttgctttaagtggtcatctttgaccataccacatgtccaaaaaggtacttaagcagtgatggaactatcacatttggtacacttaattttatagtgttgcttgtctctcttttatacctttttgtggtttttgcgccatacactcatctcttttttacagcttgccaactaaaatttgttttttgttttgcatttgctttaggcctaatgaaaggcaaaacagttgtcgatgttgtgggaaagttcacctggacccaataagacaagaaaaaggcaaagagcacaatagttctcatatgcctaattattcccttgattcatgattatagctttgcctcctgatttaatgtccctttcctatcatttgagatatacaggtcaccctaaggtaagagaggtatttcctttattggagattacaattttgcctcatgttccattggattcttttttttgttgtcatcatatatgtttagcaggcataaaagaagaaagaccatttcttgtggagatttatgctgatgacataaatccaactacaactataaaagggaagcactacatcggctctgaacaagcaatcatggaatattgagcta

SEQ ID NO: 217943 - DNA, 3113 bp, Zea Mays
cgtccacacatgcttctagatgcctctcctctcctcgcttcatccacctcatctcactccagcgtcttccatttgacctcggtgccttctcctcttgcttgtggccacagtctgagccatgccgcgcgtgcgacgaccagtagaaaccgctctcgagcgcgacgctgcagcaggcacaggcgaggtcccgctcatccagatcacaccagcccatcgacgacagcaacaccttctcgggcgccgccgccgcgacgcagtcctcgcacatgtctccggcgtccacgagctagcggtgggtcccgaagaggctgccgatgccgaggcgggagcagagcgcgcacggcggcgagagatcgaagaagccggcgaaccgagctatgaggattaggattttggttttaaggttctttttttagctcgagcatccttataaaaaaattatttcaatggctgtttccttagagctagtttgacaactccattttcccaagaaaaaatgaactaatttcccttgaaaaatgaaaatcccccctatattatttctctatgtgtcgcactacattataaatatcaagtaattgtaatggtgcttctttcctttaaatatgcgtattaattcttgcagcagttaagtctacatgcacatttgtgtatctatttacgtagcgaactgccaaatatcatgtgtggagctatttttacaagtttattaaccacattccttgtcatgcgcagggtaatttttcccaatcactatatgctcctatactcttctcaaatattgatgtggtatgcgagtaacaaaacttcttctcaatataaataggtttggtagtgtggccttactgttacgttactttccttcttttaaaaaaattaaatgtaactacaagatattgaccatggatatctattgtttgtagcatgatatatatttcgaatgtgtgttaatcatggccaggtcgcacaatgtgtcatgctatatagtaaatatcaaataattgcaattgagcttcttttctgtgaataaaattcagctcaacataaataggtttagtagtgtgtgtttactgttaatattttcatgacatttgttattaacaactttggaactaagttgattatatctatactcatacttttattatttccctttacatcgataatttgtacatgtgtgtgcttattcattttcacatatcctgatttgagtttttttctcctcaacaggtgagttgtaggtactatctgtctattgtatgatagttacgcttataaattctatatgtgcaatatattaatattgctgcttcgatgttgattgctttacaacagtttgctgttgctcaagccatttattttcttttcgaaatctgcgctttcataaatattaatagttgttggccacttactgttagcaaaaaaaaattacctaaaatctaagagcttagttgattgtattattaaccatacatttattgtttctatttacatcaagaattttcacttatgtgtgcttattgatttgcacagttgttagcatggctttttttatttatcttgctcccctacaggtgagttgtatgtactatctacctgaccaacagcatttacgcttacaaattatttctatgtgatctattagtatttcttgttcgattgcttcacacatctttgttgttgctcaggtcatatttttttcaattgtatgtttgcatacagactaatagctacgcacagtccatttgttgttatcagaacaacaaaaaacttatatgtgcaccgatatatttattatttgtctttgcatcgatgattcacgtggatatacacttattcattttacaattttccataagattgttttattcctttgcaggtaagctctaaagcctgtctctttaattgacactatatacatttatgtatttttccaaacaagtataaagtcatataggttactttgtggttgattaatatattatgcgtggtaaagtatatattctatgcggagaagtggaaacgacctcatcgttgattgcggtgttctggtactcgctgttctaaactttctgttgcagtaagatacccctccctccttgattgtaggtcctcaattcacacatgagtttatgttttaggttgtttttttcctggaatactctatgtcgactaaacaattttggttctttcgatttccttcatgtgaagtaaagatgttatactatgccttggctacatgtgccatgtttgactattattattatttaaggtaacttatagtttctgtttgcactacattcatcgttgtttacgctttcctttatgatttaccttcaaagatcataaaatatttgggccagaaaaaaatggttaagctctaggccatgaatgaccttcaaccgttaggacatagaattcagcttattttcaggaatggaactatttgtcttggtgatagctggcttgtgtttgcttccaataataaaggtgaacaaggttgcatattgttttgttgatatacttctgtggactctttgctttaagtggtcatctttgaccataccacatgtccaaaaaggtacttaagcagtgatggaactatcacatttggtacacttaattttatagtgttgcttgtctctcttttatacctttttgtggtttttgcgccatacactcatctcttttttacagcttgccaactaaaatttgttttttgttttgcatttgctttaggcctaatgaaaggcaaaacagttgtcgatgttgtgggaaagttcacctggacccaataagacaagaaaaaggcaaagagcacaatagttctcatatgcctaattattcccttgattcatgattatagctttgcctcctgatttaatgtccctttcctatcatttgagatatacaggtcaccctaaggcataaaagaagaaagaccatttcttgtggagatttatgctgatgacataaatccaactacaactataaaagggaagcactacatcggctctggtacttcagtgaaaagatttcaccatatgcaggtccatgtttatgacaaatcatagttctccgttacattacatcgatataatcttcacacgaag

SEQ ID NO: 217944 - DNA, 7058 bp, Zea Mays
ctcgtcttcctcgctccgccaccgccacgctgaaaacccacgcgctaagcgcaccccgccaagtctaccagacgctctccggagcggcacgcgcgcgccaatggcggggccttgaggtgctcgtggggtgagggagggaggacggcgctggttagtgagggcgttaagcggcggctcggcgcggcgggcggggaggatgatacggcaccagatacggaacgagtatgggctggcggatccggaggtgtacgcggccccgggggaggaggatgacccggaggcgctcctcgagggcgtcgccatggccggcctcgtcggcgtgctccgccagctcggggatctcgccgagtttgcagctgaaatttttcatgaccttcacgaagaggctatggctactgcttctagaggacatggtttaatgctccggttgcagcagttggaggcagaatttccagcagttgaaaaggctattatatctcagacggagcactcaaattatccacatgatgatggagctgagtggcattctaatgttcaacttaaacagaatgtgatcacacaaggagatatgcctcgtttcattatggattcatatgaagaatgtcgtggtccgccacaattgttcacattggataaaagaaggccatgcgttggaggaaaggggcaactcttgaatcattactcactgcaaactcagagtctcaaattacccccaaggatcgaacttctagaaaagttccacctaggacaacaaagttgaaatccaggcaaccacggagtcctgatcataaaaccactagcagaatcttgagggagcatctgcaagaagtgattttatcgcagaaaaaaatcatctccagatattcggtgaggcattactatgtgaaatttggatcgcctgactcaagtgaaactgcacctccttttggagaaatggacagttttggcgcccttgttcaatcttctggtaaattggatctgacaaaagttgttccagtaaacgaatctgatgctgtggatactaaatctgaacccattgatggatcggcttatttggagctaggtgataaacggaatctggggaaacaacatgaaccttttcaacaaaatggcatggtccatagctcagaaaagctgccggattgtccatacttggatattggagaaagtaataacagatcacatttgacatgtgaagagaaaccccgattggctgaggttcctgctgatcagaaagatgttgatggccgcaggcctgatgacatcgtgagtgatcaagacaacttcattggtgcttctaatgacacggacatggaaaacaaagaaggtcttcaaatgaaaactgaatgtgatcccagtgccagtgttgaactggttgaattgaaccgtcacaacaaggaaggtgacaaagtattgtatgccgaacctccagaagtaggtcctgcaatagactcgtcattgggattggataatgcaagcagtggtgaagaaccaacctgtgtggacttgccactgtcaagtgattctgctcccacagtgtcagccaccaatggtccaaactctggttcacaatctggcagacaaatgaatggtgttgactggtccacagacgaagagtcttctaacgatgtggatctaattgacgtgagctcatcttctagtgtagtttctgaaaatggtgacgtacaaaacaatgattgtctcgttagttgtctacaacacgaggaagcgattcactctctgagtgatgatcatgctggtgctatccataattctgatgaacagtcaccgaatacgtctagcaactgggatgatatggctattggctgcaacaattacaccgagaaagtacatcatccagtggagcatgtccaggatgttgtactagatgatatttctatgatactgagcaaacctaatgatgtttcagaagacgaagataaaatcagttcagggaatgctgatgatttgtctctccaccctaccaaattgaaccaagaggaaatacaggagttgaagacagaatcggaagaaggcagatctctagaatcaggaagttcacctagcaaagcatcattgccaaataaggatcatgtgtcgatgaatgatgtagaagccgacactgttacaattcctaaagaaactgttgcagatactgcaccaacaggtttggatcctgatggcatcgacgagcgtcaagatggagttgcaccgaaatattcaagcatccacaatagtgtactgtatgaatcatatgatgacaagattgctgaagacacacactctttactagatgatggcctatcaactactttcgatgacgataagcatgttgcagaggatcatcaatttgttgttcttgaacaaaggacttgtccaactagcctcaacacatgcaaggatgattctatgcaaggatgtgccgtggccagggatttcactgatgctgaaaagcttccgggagtcgtttcaggtgtattagcttctcaactggagacagaatctcatgtaggagagacacttgcatccacgtcctatgcattcagtgatgatactgaagcactagagattggtgtccctctagcccctggtacttcctttctacctaacaccagtagttccttggtagaaaaacatgaattgactgaaacagaagaaattgcagaggttggtgaatttgtggttgcaaaagaatcaactactagcgtatttgcagttgatgtggtacctcccaaagagttcattgatgctaacatacatcctgaaaaggtagaggttctggctacaagtttgactgaagaagccactaggctggatttacaactacagtctccttccagggaagttttggaaacaacggaagctattcacagaaattttggggcagtagatgaatcaagagaagatatctctaagaagagtatgttgcagacagacaatagtcctcttattgtagagactacaagtgaaaaatgtagtgacagggatggtgatacacaatttctagtaaaatctgattatcaagaggaattactaaaagagggcagtcataatgctgaagatcgatctctctgcgatttgaacaaggatggtgcagtaaccttgaaaagtaatgcagttgagaaacaaccagtgaatgctggtcaagatttggcgtgggggatgcacgctcaagattctagtagtacaaacccgttcctggatcctgcctacttgatgagccacactcaaatttattcatcttccagtatgagtagccaaccatgtttccctgaagaagaggatttcctttcagagcttgtaatacaacatgacaatatgggagtaactgctgatgccctttgggaacctgcaactccacctgatgatgcgccattaccatcagaaattatgactgaagatgatttcagatccttctgccaagaatatcatgagatagatttttcatctgtcactaactgttctcacagtgaaccagcctcagattctaacaaaattccaaatgcttttctgatcagagagtcagattttccatgttataactctgccttgccagtgaagttagatcaggaagcctgtattcattctaagttctgttctgagtgtgtcgaatattcatgtgctgtggaaagacaaggcactacatcaatggttgtttctggtaaagaagatcgcgtgggcaaggacgagacaccaggagtagatttccatttaaattttctcgagttttccaatgataacagaagtcctgaattaaatatgctctccgttccagtggatttacggcaggaactgcatggcttgcctgaagttgattctcgtgatagttcccctttgctgcataaggagaagactagtgaagaatgctgcttttctttaagcaacaacgttgttgaagtgaaacaagagctggaaatccgtgctgaccttgttccacattcttctattaatgaaaaagtagatggattagatgaggctgtaccggtggaaccagaggcccatgcctgtgccttggatgaatatgacaaccaagatgtcccacacatttcaactagtgagaagaatgaaacccttactttgggcaaacctgttttagtccaggggccagaagtttgtgcctttggtggatttgaatgtgatcctccaatcattccatcaccttcagttgatgagactaaggacaatctagaagtcagaatgaatatgatcctccaatcattccatcattctttgaggacttcttttcaagcagaacagaagtcagaatgctacacctcaggtgaacatgattctcaaaccgttccatttcctttgcatgatgagaatatcaatgaactggatgatcctcctttgagcaatgctgacgaactggaccgggaatcaaaagcttgtgttccacatgaatgtgatgctcaaatcgctccatgttcaactgatgaggatatacatgaattggatcaccctcctttgagcagtcccgctttagtggatcttgaatcagaagaccatgtctcggatgaccgtgattccgaagtcaccccatgtttggttaaagataagattgatgaatctgtagatgctcaaccaaacctgcttcctggggagctagagcaggaaactcatgcaccccctgaattagactttcgagttgctccacaatcagcgaaagaatctgattgctcaactgaatttgattcccaggccgcaccatgttcttcaaatataccagtactagctaacacaacagtgtcgacttgtatttctgccatgcctagcagtgaggaaacgtatcagttgtctcctgttccaccacctactgtacaatttcaaaatgattcctacaaagatcctcaagctctactcgctgattcctacaaagatcctcaagcgccaccccctctccctcctctccagtggaggcttggaaagcctcggctaggacttctgagtagaaaaggctgtatgactgaacctgcaagggtaatagatcctgttttgcagatatcaagccaagagatggatattaggccaggtttgcttgatccaacggatagatctatagaaccagtatcctgtcaagaaatcaaagaagatagatgtgagagttctttgatagatcataatgatcaaaatgtggattttgatagattatcgaccagggttgcagtaactgatgttgcaaggactgaacacaggctatccttagagacttcagaggacattaagcaacaggggcatatttcttcatcggcaacaggagttggggaacacctggatgctgggttcacatcaacaatggcagatgaggaacatctggatgattctgggatgacacatggaacagctctatacttatcagaccctctgtttccattacctacatatgaactgcaggaccctcaaccagatactcgagaaaatagcgagcatcccagtcaaacacatggagctgcatctggggatgataagtcaatggatgctgttggcagcatggaaagcaccctaacaaaaggacatgtttctggaaataggtgctaccagcaacctcagcatggtgaatcgtcctcagagacttcagaccataaagagcatattacaaatgcatcagaggatggtgttaagcatcagtcaggtacaagtgaggcaccttcagacacagcaaagcattctgcaccaggcacgctgttgaaagggaatgtccaagagagtcaaattttacaggaacataatgtggggagttccgaggacgatcaaccaggaggcctgttgtacagcttagaaccagtggcacctcaaggggaaaacaaaaaccaggttaacaacccaggcctgttactggaatggcctggagatacaagtgagttggtcactggccttgaaaaaagttgctatgcgcatgctgagcagccacctgtgatgggatggactgttggacctcagatgcttcatcctaaatatggtattttagaagaagagagccaatttgagcctaatatcgccgacaatcatttaatcaggaagcctatttcgataaaaaacatcccaaggaatccactggttgatgctgttgctgctcatgatagaagctcgatgagaaaggtttcagagcttgcaccaccgactgacaagccgaagcctaacgagagaaacatgttgctagaacagataagaaacaagaccttcagcttgaaacctgttgctccagctcagcaaacagcaatgagatcccctgctagaaccagtactagaaacttgaaggttgccgctatcatagaaaaggcaaatgccatacgacaggcagtgggaagtgacgacgaagacgcagatagttggagtgatacataaatcccccaccgtttgccctaccctcttggtgcttctttccatggcagaaaggtaccgattcatcaagagcattggggacaggatggggatgcacaaccatgtcatcgtttttgtttgccctaccctcttggtgcttctttccatggcagaaaggtaccgattcatcaagagcattggggacaggatggggatgcacaaccatgtcatcgtttttgttagtaatataatgctagtcttgtgtatagtatacgcccataatccttttcattttttgtatgtgtattctttcgaccgattgtttgtatacctgcctctctctcccacagcagcaaaggctgttgcggttggcatgatcctaggatagcatgcatggtctatgtaaattaaacagtagtagttaagtaaagaattgttccatcttttctggaaaaaaaggtgagataatggcatcatcgattccacacagcaagcatagcagaccttgaattgcaaaaatatgaaaaccaatacacccgcttagacgaatttgttgatccatggcaggtcaaactaacaaactaactattggaggcaataactaaacttaacaccaagatttagtttcaacagtagccgccgcggcggaggcggccgacgagggtcgagcagatgaagccggttgcgcccgtctcccccgccatctcctcgcgtccttcccgtgagctgactagctg

SEQ ID NO: 217945 - DNA, 6981 bp, Zea Mays
cctcgctccgccaccgccacgctgaaaacccacgcgctaagcgcaccccgccaagtctaccagacgctctccggagcggcacgcgcgcgccaatggcggggccttgaggtgctcgtggggtgagggagggaggacggcgctggttagtgagggcgttaagcggcggctcggcgcggcgggcggggaggatgatacggcaccagatacggaacgagtatgggctggcggatccggaggtgtacgcggccccgggggaggaggatgacccggaggcgctcctcgagggcgtcgccatggccggcctcgtcggcgtgctccgccagctcggggatctcgccgagtttgcagctgaaatttttcatgaccttcacgaagaggctatggctactgcttctagaggacatggtttaatgctccggttgcagcagttggaggcagaatttccagcagttgaaaaggctattatatctcagacggagcactcaaattatccacatgatgatggagctgagtggcattctaatgttcaacttaaacagaatgtgatcacacaaggagatatgcctcgtttcattatggattcatatgaagaatgtcgtggtccgccacaattgttcacattggataagtatggagctgttgtcttttgtgaacatctactatgtgcgaaagggcatctagctgagttggttaggtggcctgagtagcactcctcaggtcctcagttcgaaagttcgaatcccagtgggaacgaatttcaggaccttctttggccggggctccgattgagcttcttcttaataataatacctataataccgcgggggcggtcttatcccctatcggccgagttttttgaacatttacgcaaccgagtttttttttgaacattttctgcaatgacacactaggattattcttcaggtttgatgttgctggtgctggagcctccttaaaacgatattcagacccttctttcttcaagacagaacatgcctccaacatgatagaagcggatgttttaattgaaaataaacctcgtagaattaagaagaaggccatgcgttggaggaaaggggcaactcttgaatcattactcactgcaaactcagagtctcaaattacccccaaggatcgaacttctagaaaagttccacctaggacaacaaagttgaaatccaggcaaccacggagtcctgatcataaaaccactagcagaatcttgagggagcatctgcaagaagtgattttatcgcagaaaaaaatcatctccagatattcggtgaggcattactatgtgaaatttggatcgcctgactcaagtgaaactgcacctccttttggagaaatggacagttttggcgcccttgttcaatcttctggtaaattggatctgacaaaagttgttccagtaaacgaatctgatgctgtggatactaaatctgaacccattgatggatcggcttatttggagctaggtgataaacggaatctggggaaacaacatgaaccttttcaacaaaatggcatggtccatagctcagaaaagctgccggattgtccatacttggatattggagaaagtaataacagatcacatttgacatgtgaagagaaaccccgattggctgaggttcctgctgatcagaaagatgttgatggccgcaggcctgatgacatcgtgagtgatcaagacaacttcattggtgcttctaatgacacggacatggaaaacaaagaaggtcttcaaatgaaaactgaatgtgatcccagtgccagtgttgaactggttgaattgaaccgtcacaacaaggaaggtgacaaagtattgtatgccgaacctccagaagtaggtcctgcaatagactcgtcattgggattggataatgcaagcagtggtgaagaaccaacctgtgtggacttgccactgtcaagtgattctgctcccacagtgtcagccaccaatggtccaaactctggttcacaatctggcagacaaatgaatggtgttgactggtccacagacgaagagtcttctaacgatgtggatctaattgacgtgagctcatcttctagtgtagtttctgaaaatggtgacgtacaaaacaatgattgtctcgttagttgtctacaacacgaggaagcgattcactctctgagtgatgatcatgctggtgctatccataattctgatgaacagtcaccgaatacgtctagcaactgggatgatatggctattggctgcaacaattacaccgagaaagtacatcatccagtggagcatgtccaggatgttgtactagatgatatttctatgatactgagcaaacctaatgatgtttcagaagacgaagataaaatcagttcagggaatgctgatgatttgtctctccaccctaccaaattgaaccaagaggaaatacaggagttgaagacagaatcggaagaaggcagatctctagaatcaggaagttcacctagcaaagcatcattgccaaataaggatcatgtgtcgatgaatgatgtagaagccgacactgttacaattcctaaagaaactgttgcagatactgcaccaacaggtttggatcctgatggcatcgacgagcgtcaagatggagttgcaccgaaatattcaagcatccacaatagtgtactgtatgaatcatatgatgacaagattgctgaagacacacactctttactagatgatggcctatcaactactttcgatgacgataagcatgttgcagaggatcatcaatttgttgttcttgaacaaaggacttgtccaactagcctcaacacatgcaaggatgattctatgcaaggatgtgccgtggccagggatttcactgatgctgaaaagcttccgggagtcgtttcaggtgtattagcttctcaactggagacagaatctcatgtaggagagacacttgcatccacgtcctatgcattcagtgatgatactgaagcactagagattggtgtccctctagcccctggtacttcctttctacctaacaccagtagttccttggtagaaaaacatgaattgactgaaacagaagaaattgcagaggttggtgaatttgtggttgcaaaagaatcaactactagcgtatttgcagttgatgtggtacctcccaaagagttcattgatgctaacatacatcctgaaaaggtagaggttctggctacaagtttgactgaagaagccactaggctggatttacaactacagtctccttccagggaagttttggaaacaacggaagctattcacagaaattttggggcagtagatgaatcaagagaagatatctctaagaagagtatgttgcagacagacaatagtcctcttattgtagagactacaagtgaaaaatgtagtgacagggatggtgatacacaatttctagtaaaatctgattatcaagaggaattactaaaagagggcagtcataatgctgaagatcgatctctctgcgatttgaacaaggatggtgcagtaaccttgaaaagtaatgcagttgagaaacaaccagtgaatgctggtcaagatttggcgtgggggatgcacgctcaagattctagtagtacaaacccgttcctggatcctgcctacttgatgagccacactcaaatttattcatcttccagtatgagtagccaaccatgtttccctgaagaagaggatttcctttcagagcttgtaatacaacatgacaatatgggagtaactgctgatgccctttgggaacctgcaactccacctgatgatgcgccattaccatcagaaattatgactgaagatgatttcagatccttctgccaagaatatcatgagatagatttttcatctgtcactaactgttctcacagtgaaccagcctcagattctaacaaaattccaaatgcttttctgatcagagagtcagattttccatgttataactctgccttgccagtgaagttagatcaggaagcctgtattcattctaagttctgttctgagtgtgtcgaatattcatgtgctgtggaaagacaaggcactacatcaatggttgtttctggtaaagaagatcgcgtgggcaaggacgagacaccaggagtagatttccatttaaattttctcgagttttccaatgataacagaagtcctgaattaaatatgctctccgttccagtggatttacggcaggaactgcatggcttgcctgaagttgattctcgtgatagttcccctttgctgcataaggagaagactagtgaagaatgctgcttttctttaagcaacaacgttgttgaagtgaaacaagagctggaaatccgtgctgaccttgttccacattcttctattaatgaaaaagtagatggattagatgaggctgtaccggtggaaccagaggcccatgcctgtgccttggatgaatatgacaaccaagatgtcccacacatttcaactagtgagaagaatgaaacccttactttgggcaaacctgttttagtccaggggccagaagtttgtgcctttggtggatttgaatgtgatcctccaatcattccatcaccttcagttgatgagactaaggacaatctagaagtcagaatgaatatgatcctccaatcattccatcattctttgaggacttcttttcaagcagaacagaagtcagaatgctacacctcaggtgaacatgattctcaaaccgttccatttcctttgcatgatgagaatatcaatgaactggatgatcctcctttgagcaatgctgacgaactggaccgggaatcaaaagcttgtgttccacatgaatgtgatgctcaaatcgctccatgttcaactgatgaggatatacatgaattggatcaccctcctttgagcagtcccgctttagtggatcttgaatcagaagaccatgtctcggatgaccgtgattccgaagtcaccccatgtttggttaaagataagattgatgaatctgtagatgctcaaccaaacctgcttcctggggagctagagcaggaaactcatgcaccccctgaattagactttcgagttgctccacaatcagcgaaagaatctgattgctcaactgaatttgattcccaggccgcaccatgttcttcaaatataccagtactagctaacacaacagtgtcgacttgtatttctgccatgcctagcagtgaggaaacgtatcagttgtctcctgttccaccacctactgtacaatttcaaaatgattcctacaaagatcctcaagctctactcgctgattcctacaaagatcctcaagcgccaccccctctccctcctctccagtggaggcttggaaagcctcggctaggacttctgagtagaaaaggctgtatgactgaacctgcaagggtaatagatcctgttttgcagatatcaagccaagagatggatattaggccaggtttgcttgatccaacggatagatctatagaaccagtatcctgtcaagaaatcaaagaagatagatgtgagagttctttgatagatcataatgatcaaaatgtggattttgatagattatcgaccagggttgcagtaactgatgttgcaaggactgaacacaggctatccttagagacttcagaggacattaagcaacaggggcatatttcttcatcggcaacaggagttggggaacacctggatgctgggttcacatcaacaatggcagatgaggaacatctggatgattctgggatgacacatggaacagctctatacttatcagaccctctgtttccattacctacatatgaactgcaggaccctcaaccagatactcgagaaaatagcgagcatcccagtcaaacacatggagctgcatctggggatgataagtcaatggatgctgttggcagcatggaaagcaccctaacaaaaggacatgtttctggaaataggtgctaccagcaacctcagcatggtgaatcgtcctcagagacttcagaccataaagagcatattacaaatgcatcagaggatggtgttaagcatcagtcaggtacaagtgaggcaccttcagacacagcaaagcattctgcaccaggcacgctgttgaaagggaatgtccaagagagtcaaattttacaggaacataatgtggggagttccgaggacgatcaaccaggaggcctgttgtacagcttagaaccagtggcacctcaaggggaaaacaaaaaccaggttaacaacccaggcctgttactggaatggcctggagatacaagtgagttggtcactggccttgaaaaaagttgctatgcgcatgctgagcagccacctgtgatgggatggactgttggacctcagatgcttcatcctaaatatggtattttagaagaagagagccaatttgagcctaatatcgccgacaatcatttaatcaggaagcctatttcgataaaaaacatcccaaggaatccactggttgatgctgttgctgctcatgatagaagctcgatgagaaaggtttcagagcttgcaccaccgactgacaagccgaagcctaacgagagaaacatgttgctagaacagataagaaacaagaccttcagcttgaaacctgttgctccagctcagcaaacagcaatgagatcccctgctagaaccagtactagaaacttgaaggttgccgctatcatagaaaaggcaaatgccatacgacaggcagtgggaagtgacgacgaagacgcagatagttggagtgatacataaatcccccaccgtttgccctaccctcttggtgcttctttccatggcagaaaggtcaaactaacaaactaactattggaggcaataactaaacttaacaccaagatttagtttcaacagtagccgccgcggcggaggcggccgacgagggtcgagcagatgaagccggttgcgcccgtctcccccgccatctcctcgcgtccttcccgtgagctgactagctg

SEQ ID NO: 217946 - DNA, 6968 bp, Zea Mays
ccaatggcggggccttgaggtgctcgtggggtgagggagggaggacggcgctggttagtgagggcgttaagcggcggctcggcgcggcgggcggggaggatgatacggcaccagatacggaacgagtatgggctggcggatccggaggtgtacgcggccccgggggaggaggatgacccggaggcgctcctcgagggcgtcgccatggccggcctcgtcggcgtgctccgccagctcggggatctcgccgagtttgcagctgaaatttttcatgaccttcacgaagaggctatggctactgcttctagaggacatggtttaatgctccggttgcagcagttggaggcagaatttccagcagttgaaaaggctattatatctcagacggagcactcaaattatccacatgatgatggagctgagtggcattctaatgttcaacttaaacagaatgtgatcacacaaggagatatgcctcgtttcattatggattcatatgaagaatgtcgtggtccgccacaattgttcacattggataagtttgatgttgctggtgctggagcctccttaaaacgatattcagacccttctttcttcaagacagaacatgcctccaacatgatagaagcggatgttttaattgaaaataaacctcgtagaattaagaagaaggccatgcgttggaggaaaggggcaactcttgaatcattactcactgcaaactcagagtctcaaattacccccaaggatcgaacttctagaaaagttccacctaggacaacaaagttgaaatccaggcaaccacggagtcctgatcataaaaccactagcagaatcttgagggagcatctgcaagaagtgattttatcgcagaaaaaaatcatctccagatattcggtgaggcattactatgtgaaatttggatcgcctgactcaagtgaaactgcacctccttttggagaaatggacagttttggcgcccttgttcaatcttctggtaaattggatctgacaaaagttgttccagtaaacgaatctgatgctgtggatactaaatctgaacccattgatggatcggcttatttggagctaggtgataaacggaatctggggaaacaacatgaaccttttcaacaaaatggcatggtccatagctcagaaaagctgccggattgtccatacttggatattggagaaagtaataacagatcacatttgacatgtgaagagaaaccccgattggctgaggttcctgctgatcagaaagatgttgatggccgcaggcctgatgacatcgtgagtgatcaagacaacttcattggtgcttctaatgacacggacatggaaaacaaagaaggtcttcaaatgaaaactgaatgtgatcccagtgccagtgttgaactggttgaattgaaccgtcacaacaaggaaggtgacaaagtattgtatgccgaacctccagaagtaggtcctgcaatagactcgtcattgggattggataatgcaagcagtggtgaagaaccaacctgtgtggacttgccactgtcaagtgattctgctcccacagtgtcagccaccaatggtccaaactctggttcacaatctggcagacaaatgaatggtgttgactggtccacagacgaagagtcttctaacgatgtggatctaattgacgtgagctcatcttctagtgtagtttctgaaaatggtgacgtacaaaacaatgattgtctcgttagttgtctacaacacgaggaagcgattcactctctgagtgatgatcatgctggtgctatccataattctgatgaacagtcaccgaatacgtctagcaactgggatgacgaagataaaatcagttcagggaatgctgatgatttgtctctccaccctaccaaattgaaccaagaggaaatacaggagttgaagacagaatcggaagaaggcagatctctagaatcaggaagttcacctagcaaagcatcattgccaaataaggatcatgtgtcgatgaatgatgtagaagccgacactgttacaattcctaaagaaactgttgcagatactgcaccaacaggtttggatcctgatggcatcgacgagcgtcaagatggagttgcaccgaaatattcaagcatccacaatagtgtactgtatgaatcatatgatgacaagattgctgaagacacacactctttactagatgatggcctatcaactactttcgatgacgataagcatgttgcagaggatcatcaatttgttgttcttgaacaaaggacttgtccaactagcctcaacacatgcaaggatgattctatgcaaggatgtgccgtggccagggatttcactgatgctgaaaagcttccgggagtcgtttcaggtgtattagcttctcaactggagacagaatctcatgtaggagagacacttgcatccacgtcctatgcattcagtgatgatactgaagcactagagattggtgtccctctagcccctggtacttcctttctacctaacaccagtagttccttggtagaaaaacatgaattgactgaaacagaagaaattgcagaggttggtgaatttgtggttgcaaaagaatcaactactagcgtatttgcagttgatgtggtacctcccaaagagttcattgatgctaacatacatcctgaaaaggtagaggttctggctacaagtttgactgaagaagccactaggctggatttacaactacagtctccttccagggaagttttggaaacaacggaagctattcacagaaattttggggcagtagatgaatcaagagaagatatctctaagaagagtatgttgcagacagacaatagtcctcttattgtagagactacaagtgaaaaatgtagtgacagggatggtgatacacaatttctagtaaaatctgattatcaagaggaattactaaaagagggcagtcataatgctgaagatcgatctctctgcgatttgaacaaggatggtgcagtaaccttgaaaagtaatgcagttgagaaacaaccagtgaatgctggtcaagatttggcgtgggggatgcacgctcaagattctagtagtacaaacccgttcctggatcctgcctacttgatgagccacactcaaatttattcatcttccagtatgagtagccaaccatgtttccctgaagaagaggatttcctttcagagcttgtaatacaacatgacaatatgggagtaactgctgatgccctttgggaacctgcaactccacctgatgatgcgccattaccatcagaaattatgactgaagatgatttcagatccttctgccaagaatatcatgagatagatttttcatctgtcactaactgttctcacagtgaaccagcctcagattctaacaaaattccaaatgcttttctgatcagagagtcagattttccatgttataactctgccttgccagtgaagttagatcaggaagcctgtattcattctaagttctgttctgagtgtgtcgaatattcatgtgctgtggaaagacaaggcactacatcaatggttgtttctggtaaagaagatcgcgtgggcaaggacgagacaccaggagtagatttccatttaaattttctcgagttttccaatgataacagaagtcctgaattaaatatgctctccgttccagtggatttacggcaggaactgcatggcttgcctgaagttgattctcgtgatagttcccctttgctgcataaggagaagactagtgaagaatgctgcttttctttaagcaacaacgttgttgaagtgaaacaagagctggaaatccgtgctgaccttgttccacattcttctattaatgaaaaagtagatggattagatgaggctgtaccggtggaaccagaggcccatgcctgtgccttggatgaatatgacaaccaagatgtcccacacatttcaactagtgagaagaatgaaacccttactttgggcaaacctgttttagtccaggggccagaagtttgtgcctttggtggatttgaatgtgatcctccaatcattccatcaccttcagttgatgagactaaggacaatctagaagtcagaatgaatatgatcctccaatcattccatcattctttgaggacttcttttcaagcagaacagaagtcagaatgctacacctcaggtgaacatgattctcaaaccgttccatttcctttgcatgatgagaatatcaatgaactggatgatcctcctttgagcaatgctgacgaactggaccgggaatcaaaagcttgtgttccacatgaatgtgatgctcaaatcgctccatgttcaactgatgaggatatacatgaattggatcaccctcctttgagcagtcccgctttagtggatcttgaatcagaagaccatgtctcggatgaccgtgattccgaagtcaccccatgtttggttaaagataagattgatgaatctgtagatgctcaaccaaacctgcttcctggggagctagagcaggaaactcatgcaccccctgaattagactttcgagttgctccacaatcagcgaaagaatctgattgctcaactgaatttgattcccaggccgcaccatgttcttcaaatataccagtactagctaacacaacagtgtcgacttgtatttctgccatgcctagcagtgaggaaacgtatcagttgtctcctgttccaccacctactgtacaatttcaaaatgattcctacaaagatcctcaagctctactcgctgattcctacaaagatcctcaagcgccaccccctctccctcctctccagtggaggcttggaaagcctcggctaggacttctgagtagaaaaggctgtatgactgaacctgcaagggtaatagatcctgttttgcagatatcaagccaagagatggatattaggccaggtttgcttgatccaacggatagatctatagaaccagtatcctgtcaagaaatcaaagaagatagatgtgagagttctttgatagatcataatgatcaaaatgtggattttgatagattatcgaccagggttgcagtaactgatgttgcaaggactgaacacaggctatccttagagacttcagaggacattaagcaacaggggcatatttcttcatcggcaacaggagttggggaacacctggatgctgggttcacatcaacaatggcagatgaggaacatctggatgattctgggatgacacatggaacagctctatacttatcagaccctctgtttccattacctacatatgaactgcaggaccctcaaccagatactcgagaaaatagcgagcatcccagtcaaacacatggagctgcatctggggatgataagtcaatggatgctgttggcagcatggaaagcaccctaacaaaaggacatgtttctggaaataggtgctaccagcaacctcagcatggtgaatcgtcctcagagacttcagaccataaagagcatattacaaatgcatcagaggatggtgttaagcatcagtcaggtacaagtgaggcaccttcagacacagcaaagcattctgcaccaggcacgctgttgaaagggaatgtccaagagagtcaaattttacaggaacataatgtggggagttccgaggacgatcaaccaggaggcctgttgtacagcttagaaccagtggcacctcaaggggaaaacaaaaaccaggttaacaacccaggcctgttactggaatggcctggagatacaagtgagttggtcactggccttgaaaaaagttgctatgcgcatgctgagcagccacctgtgatgggatggactgttggacctcagatgcttcatcctaaatatggtattttagaagaagagagccaatttgagcctaatatcgccgacaatcatttaatcaggaagcctatttcgataaaaaacatcccaaggaatccactggttgatgctgttgctgctcatgatagaagctcgatgagaaaggtttcagagcttgcaccaccgactgacaagccgaagcctaacgagagaaacatgttgctagaacagataagaaacaagaccttcagcttgaaacctgttgctccagctcagcaaacagcaatgagatcccctgctagaaccagtactagaaacttgaaggttgccgctatcatagaaaaggcaaatgccatacgacaggcagtgggaagtgacgacgaagacgcagatagttggagtgatacataaatcccccaccgtttgccctaccctcttggtgcttctttccatggcagaaaggtaccgattcatcaagagcattggggacaggatggggatgcacaaccatgtcatcgtttttgtttgccctaccctcttggtgcttctttccatggcagaaaggtaccgattcatcaagagcattggggacaggatggggatgcacaaccatgtcatcgtttttgttagtaatataatgctagtcttgtgtatagtatacgcccataatccttttcattttttgtatgtgtattctttcgaccgattgtttgtatacctgcctctctctcccacagcagcaaaggctgttgcggttggcatgatcctaggatagcatgcatggtctatgtaaattaaacagtagtagttaagtaaagaattgttccatcttttctggaaaaaaaggtgagataatggcatcatcgattccacacagcaagcatagcagaccttgaattgcaaaaatatgaaaaccaatacacccgcttagacgaatttgttgatccatggcaggtcaaactaacaaactaactattggaggcaataactaaacttaacaccaagatttagtttcaacagtagccgccgcggcggaggcggccgacgagggtcgagcagatgaagccggttgcgcccgtctcccccgccatctcctcgcgtccttcccgtgagctgactagctg

SEQ ID NO: 217947 - DNA, 6497 bp, Zea Mays
atgatacggcaccagatacggaacgagtatgggctggcggatccggaggtgtacgcggccccgggggaggaggatgacccggaggcgctcctcgagggcgtcgccatggccggcctcgtcggcgtgctccgccagctcggggatctcgccgagtttgcagctgaaatttttcatgaccttcacgaagaggctatggctactgcttctagaggacatggtttaatgctccggttgcagcagttggaggcagaatttccagcagttgaaaaggctattatatctcagacggagcactcaaattatccacatgatgatggagctgagtggcattctaatgttcaacttaaacagaatgtgatcacacaaggagatatgcctcgtttcattatggattcatatgaagaatgtcgtggtccgccacaattgttcacattggataagtttgatgttgctggtgctggagcctccttaaaacgatattcagacccttctttcttcaagacagaacatgcctccaacatgatagaagcggatgttttaattgaaaataaacctcgtagaattaagaagaaggccatgcgttggaggaaaggggcaactcttgaatcattactcactgcaaactcagagtctcaaattacccccaaggatcgaacttctagaaaagttccacctaggacaacaaagttgaaatccaggcaaccacggagtcctgatcataaaaccactagcagaatcttgagggagcatctgcaagaagtgattttatcgcagaaaaaaatcatctccagatattcggtgaggcattactatgtgaaatttggatcgcctgactcaagtgaaactgcacctccttttggagaaatggacagttttggcgcccttgttcaatcttctggtaaattggatctgacaaaagttgttccagtaaacgaatctgatgctgtggatactaaatctgaacccattgatggatcggcttatttggagctaggtgataaacggaatctggggaaacaacatgaaccttttcaacaaaatggcatggtccatagctcagaaaagctgccggattgtccatacttggatattggagaaagtaataacagatcacatttgacatgtgaagagaaaccccgattggctgaggttcctgctgatcagaaagatgttgatggccgcaggcctgatgacatcgtgagtgatcaagacaacttcattggtgcttctaatgacacggacatggaaaacaaagaaggtcttcaaatgaaaactgaatgtgatcccagtgccagtgttgaactggttgaattgaaccgtcacaacaaggaaggtgacaaagtattgtatgccgaacctccagaagtaggtcctgcaatagactcgtcattgggattggataatgcaagcagtggtgaagaaccaacctgtgtggacttgccactgtcaagtgattctgctcccacagtgtcagccaccaatggtccaaactctggttcacaatctggcagacaaatgaatggtgttgactggtccacagacgaagagtcttctaacgatgtggatctaattgacgtgagctcatcttctagtgtagtttctgaaaatggtgacgtacaaaacaatgattgtctcgttagttgtctacaacacgaggaagcgattcactctctgagtgatgatcatgctggtgctatccataattctgatgaacagtcaccgaatacgtctagcaactgggatgatatggctattggctgcaacaattacaccgagaaagtacatcatccagtggagcatgtccaggatgttgtactagatgatatttctatgatactgagcaaacctaatgatgtttcagaagacgaagataaaatcagttcagggaatgctgatgatttgtctctccaccctaccaaattgaaccaagaggaaatacaggagttgaagacagaatcggaagaaggcagatctctagaatcaggaagttcacctagcaaagcatcattgccaaataaggatcatgtgtcgatgaatgatgtagaagccgacactgttacaattcctaaagaaactgttgcagatactgcaccaacaggtttggatcctgatggcatcgacgagcgtcaagatggagttgcaccgaaatattcaagcatccacaatagtgtactgtatgaatcatatgatgacaagattgctgaagacacacactctttactagatgatggcctatcaactactttcgatgacgataagcatgttgcagaggatcatcaatttgttgttcttgaacaaaggacttgtccaactagcctcaacacatgcaaggatgattctatgcaaggatgtgccgtggccagggatttcactgatgctgaaaagcttccgggagtcgtttcaggtgtattagcttctcaactggagacagaatctcatgtaggagagacacttgcatccacgtcctatgcattcagtgatgatactgaagcactagagattggtgtccctctagcccctggtacttcctttctacctaacaccagtagttccttggtagaaaaacatgaattgactgaaacagaagaaattgcagaggttggtgaatttgtggttgcaaaagaatcaactactagcgtatttgcagttgatgtggtacctcccaaagagttcattgatgctaacatacatcctgaaaaggtagaggttctggctacaagtttgactgaagaagccactaggctggatttacaactacagtctccttccagggaagttttggaaacaacggaagctattcacagaaattttggggcagtagatgaatcaagagaagatatctctaagaagagtatgttgcagacagacaatagtcctcttattgtagagactacaagtgaaaaatgtagtgacagggatggtgatacacaatttctagtaaaatctgattatcaagaggaattactaaaagagggcagtcataatgctgaagatcgatctctctgcgatttgaacaaggatggtgcagtaaccttgaaaagtaatgcagttgagaaacaaccagtgaatgctggtcaagatttggcgtgggggatgcacgctcaagattctagtagtacaaacccgttcctggatcctgcctacttgatgagccacactcaaatttattcatcttccagtatgagtagccaaccatgtttccctgaagaagaggatttcctttcagagcttgtaatacaacatgacaatatgggagtaactgctgatgccctttgggaacctgcaactccacctgatgatgcgccattaccatcagaaattatgactgaagatgatttcagatccttctgccaagaatatcatgagatagatttttcatctgtcactaactgttctcacagtgaaccagcctcagattctaacaaaattccaaatgcttttctgatcagagagtcagattttccatgttataactctgccttgccagtgaagttagatcaggaagcctgtattcattctaagttctgttctgagtgtgtcgaatattcatgtgctgtggaaagacaaggcactacatcaatggttgtttctggtaaagaagatcgcgtgggcaaggacgagacaccaggagtagatttccatttaaattttctcgagttttccaatgataacagaagtcctgaattaaatatgctctccgttccagtggatttacggcaggaactgcatggcttgcctgaagttgattctcgtgatagttcccctttgctgcataaggagaagactagtgaagaatgctgcttttctttaagcaacaacgttgttgaagtgaaacaagagctggaaatccgtgctgaccttgttccacattcttctattaatgaaaaagtagatggattagatgaggctgtaccggtggaaccagaggcccatgcctgtgccttggatgaatatgacaaccaagatgtcccacacatttcaactagtgagaagaatgaaacccttactttgggcaaacctgttttagtccaggggccagaagtttgtgcctttggtggatttgaatgtgatcctccaatcattccatcaccttcagttgatgagactaaggacaatctagaagtcagaatgaatatgatcctccaatcattccatcattctttgaggacttcttttcaagcagaacagaagtcagaatgctacacctcaggtgaacatgattctcaaaccgttccatttcctttgcatgatgagaatatcaatgaactggatgatcctcctttgagcaatgctgacgaactggaccgggaatcaaaagcttgtgttccacatgaatgtgatgctcaaatcgctccatgttcaactgatgaggatatacatgaattggatcaccctcctttgagcagtcccgctttagtggatcttgaatcagaagaccatgtctcggatgaccgtgattccgaagtcaccccatgtttggttaaagataagattgatgaatctgtagatgctcaaccaaacctgcttcctggggagctagagcaggaaactcatgcaccccctgaattagactttcgagttgctccacaatcagcgaaagaatctgattgctcaactgaatttgattcccaggccgcaccatgttcttcaaatataccagtactagctaacacaacagtgtcgacttgtatttctgccatgcctagcagtgaggaaacgtatcagttgtctcctgttccaccacctactgtacaatttcaaaatgattcctacaaagatcctcaagctctactcgctgattcctacaaagatcctcaagcgccaccccctctccctcctctccagtggaggcttggaaagcctcggctaggacttctgagtagaaaaggctgtatgactgaacctgcaagggtaatagatcctgttttgcagatatcaagccaagagatggatattaggccaggtttgcttgatccaacggatagatctatagaaccagtatcctgtcaagaaatcaaagaagatagatgtgagagttctttgatagatcataatgatcaaaatgtggattttgatagattatcgaccagggttgcagtaactgatgttgcaaggactgaacacaggctatccttagagacttcagaggacattaagcaacaggggcatatttcttcatcggcaacaggagttggggaacacctggatgctgggttcacatcaacaatggcagatgaggaacatctggatgattctgggatgacacatggaacagctctatacttatcagaccctctgtttccattacctacatatgaactgcaggaccctcaaccagatactcgagaaaatagcgagcatcccagtcaaacacatggagctgcatctggggatgataagtcaatggatgctgttggcagcatggaaagcaccctaacaaaaggacatgtttctggaaataggtgctaccagcaacctcagcatggtgaatcgtcctcagagacttcagaccataaagagcatattacaaatgcatcagaggatggtgttaagcatcagtcaggtacaagtgaggcaccttcagacacagcaaagcattctgcaccaggcacgctgttgaaagggaatgtccaagagagtcaaattttacaggaacataatgtggggagttccgaggacgatcaaccaggaggcctgttgtacagcttagaaccagtggcacctcaaggggaaaacaaaaaccaggttaacaacccaggcctgttactggaatggcctggagatacaagtgagttggtcactggccttgaaaaaagttgctatgcgcatgctgagcagccacctgtgatgggatggactgttggacctcagatgcttcatcctaaatatggtattttagaagaagagagccaatttgagcctaatatcgccgacaatcatttaatcaggaagcctatttcgataaaaaacatcccaaggaatccactggttgatgctgttgctgctcatgatagaagctcgatgagaaaggtttcagagcttgcaccaccgactgacaagccgaagcctaacgagagaaacatgttgctagaacagataagaaacaagaccttcagcttgaaacctgttgctccagctcagcaaacagcaatgagatcccctgctagaaccagtactagaaacttgaaggttgccgctatcatagaaaaggcaaatgccatacgacaggcagtgggaagtgacgacgaagacgcagatagttggagtgatacataaatcccccaccgtttgccctaccctcttggtgcttctttccatggcagaaaggtcaaactaacaaactaactattggaggcaataactaaacttaacaccaagatttagtttcaacagtagccgccgcggcggaggcggccgacgagggtcgagcagatgaagccggttgcgcccgtctcccccgccatctcctcgcgtccttcccgtgagctgactagctg

SEQ ID NO: 217948 - DNA, 1510 bp, Zea Mays
aaaagagaaaaatggaatacactttattacctgatttagcaccgcataagatacacgcaaagattcaagtacatgtatctagaaagtggcttttccgaggtgctactgatagtggaccactacaacatgttgatatggttttgtctgatcgagagggtaatgctatttatgctgaaatccctggaaatttagctgaacaaaaagcaacaaatattgaagaaggaggagtttatgatatcagcagattcagagtgtgcgcagcaaaaactgttttcaaaatagtggatggggacaaaatgatccaattcacatttcataccatagttaaacgtgccacaagccctccaacaacatttccattatatgtttatcggctaacatcatttgatctaattgagcctcatgttcaaactacaaataactttgttgatgttcttggtgtcataactgaaattcatgaactgacacctgtgcatgtccgaagtcaactaacaccaacagtgacaaggaccattatcatagaagatctcaggaaacatgatttgaatgtactgtcacaatagcagaaataccagctgaacacaaatggtggtttccatcttgcacaaaatgcaataaagcaacaatccctcacactgcaggttatcactgtgaatcatgcaattgggatggatacaaatttaaatacaagctcaaattcctggcatctgatgaaacaaatattgcagaaatgttttgttttgacactgtagcaagacacatcgttggtaaatcctgtgagattgttttacgaagtgtcactgaacagtctcctatcccacctgatctagcacaaatcatatctctgaaatttacattcagagtcacaattgacaatcaatctcttttccaacaaaccaatcgcccaaacgtgttccgcattaattctattgttgctgcacatgggagacaacgttctttaccaatgcaaataggaaattccgatcaacaaggaccatcaacacctcaaaacaaatcaaaaccgatgttattggaagactctccatctacagctttggaaaaattatctactacaactcctacaactgtagtaaggaagcttctatattccgaaactgacaacatgccgaaagctgcaaacaagagtaatatcaatagcccagaaaaagatgatggcgataaggaaaccgcacagcttgatacaatacccaataacaaaggaaaaggaccagcagatacaattgaatcgccacctaaaaggttcaaataagggacgatacgcatcggaaaagaaatggacatcaaatcctccgagaactaaagtttcactcagatcttcgtcgaccttttgagttgcacaatgtctattttgcaacatatgtataattatatatgatgacctactcagctctttgaaaacaatttatgtaaatataacagcctaattctacgtagtggacaaaaatgttgactctgattatagctcaggtaactctatttcatataaaca

SEQ ID NO: 217949 - DNA, 1073 bp, Zea Mays
ccagaccttaccgatacgcatacatctgtaccagcaagcgctacagaagcacggagagcccggagaatgttgattaatcagaacagacttgctaaaagaggcctattgtcgacaataccagcgttgtcgcaatatgcttacttctctgatgagtacatacaatcattaaaagaaaaatggaatacactttattacctgatttagcaccgcataagatacacgcaaagattcaagtacatgtatctagaaagtggcttttccgaggtgctactgatagtggaccactacaacatgttgatatggttttgtctgatcgagagggtaatgctatttatgctgaaatccctggaaatttagctgaacaaaaagcaacaaatattgaagaaggaggagtttatgatatcagcagattcagagtgtgcgcagcaaaaactgttttcaaaatagtggatggggacaaaatgatccaattcacatttcataccatagttaaacgtgccacaagccctccaacaacatttccattatatgtttatcggctaacatcatttgatctaattgagcctcatgttcaaactacaaataactttgttgatgttcttggtgtcataactgaaattcatgaactgacacctgtgcatgtccgaagtcaactaacaccaacagtgacaaggaccattatcatagaagatctcagtgcaaacaagagtaatatcaatagcccagaaaaagatgatggcgataaggaaaccgcacagcttgatacaatacccaataacaaaggaaaaggaccagcagatacaattgaatcgccacctaaaaggttcaaataagggacgatacgcatcggaaaagaaatggacatcaaatcctccgagaactaaagtttcactcagatcttcgtcgaccttttgagttgcacaatgtctattttgcaacatatgtataattatatatgatgacctactcagctctttgaaaacaatttatgtaaatataacagcctaattctacgtagtggacaaaaatgttgactctgattatagctcaggtaactctatttcatataaaca

SEQ ID NO: 217950 - DNA, 1055 bp, Zea Mays
agaaaaatggaatacactttattacctgatttagcaccgcataagatacacgcaaagattcaagtacatgtatctagaaagtggcttttccgaggtgctactgatagtggaccactacaacatgttgatatggttttgtctgatcgagagggtaatgctatttatgctgaaatccctggaaatttagctgaacaaaaagcaacaaatattgaagaaggaggagtttatgatatcagcagattcagagtgtgcgcagcaaaaactgttttcaaaatagtggatggggacaaaatgatccaattcacatttcataccatagttaaacgtgccacaagccctccaacaacatttccattatatgtttatcggctaacatcatttgatctaattgagcctcatgttcaaactacaaataactttgttgatgttcttggtgtcataactgaaattcatgaactgacacctgtgcatgtccgaagtcaactaacaccaacagtgacaaggaccattatcatagaagatctcaggaaacatgatttgaatgtactgtcacaatagcagaaataccagctgaacacaaatggtggtttccatcttgcacaaaatgcaataaagcaacaatccctcacactgcaggttatcactgtgaatcatgcaattgggatggatacaaatttaatgcaaacaagagtaatatcaatagcccagaaaaagatgatggcgataaggaaaccgcacagcttgatacaatacccaataacaaaggaaaaggaccagcagatacaattgaatcgccacctaaaaggttcaaataagggacgatacgcatcggaaaagaaatggacatcaaatcctccgagaactaaagtttcactcagatcttcgtcgaccttttgagttgcacaatgtctattttgcaacatatgtataattatatatgatgacctactcagctctttgaaaacaatttatgtaaatataacagcctaattctacgtagtggacaaaaatgttgactctgattatagctcaggtaactctatttcatataaaca

SEQ ID NO: 217951 - DNA, 1750 bp, Zea Mays
atgtgggactcagtattgcatgttcttaccattgtgcatgaagatggtcgtgtaccaacacaggcagcggggttgattgaaaaaatggagagcttcaaatttgttttcattttaaaattgatgttgaaaatgcttgcaatcacaaatgagctctctcaaaccttgcaaaggaagaatgccaacattgttcatgctatggagttacttgatgttgtgaaaacccgaatggctacaatgaggacagatagtggttgggagtcattctttcaaagcgtgaaagaattatgtgctcaaaagggtattcctgtggtagatatggatgaagaagtgcctattagaggtcgttcaaggcgagatggcttcacaatcacaaaccttcactactaccgcaccgagatattctttgttgttcttgataaaatcaacactgagttatgccatcgctttaatgaagtttctagcgagttgcttgtttgcttttcttgcctcgatccaaagaacttattttgcagttttgatatagagaaacttgttcgacttggtactctatatgataaggatttttcagttattgaatgtgcaatgttaagagagcaacttgagacatacattgtccacgtgcgaaggcatgccgcttttgattggatttttggtggtgattttggtgccgcactgcaaattaagagagaaatttcggttcccaagcagcccacagattctattgattgcgggtgtctttcagcatctgagggtttctaccagtccaggttacgcacaagcttcaaattatcgcaaaattcctcttacatatctgcatctcataccgaaccaggtctcataccggaccagaaaaatggaatacactttattacctgatttagcaccgcataagatacacgcaaagattcaagtacatgtatctagaaagtggcttttccgaggtgctactgatagtggaccactacaacatgttgatatggttttgtctgatcgagagggtaatgctatttatgctgaaatccctggaaatttagctgaacaaaaagcaacaaatattgaagaaggaggagtttatgatatcagcagattcagagtgtgcgcagcaaaaactgttttcaaaatagtggatggggacaaaatgatccaattcacatttcataccatagttaaacgtgccacaagccctccaacaacatttccattatatgtttatcggctaacatcatttgatctaattgagcctcatgttcaaactacaaataactttgttgatgttcttggtgtcataactgaaattcatgaactgacacctgtgcatgtccgaagtcaactaacaccaacagtgacaaggaccattatcatagaagatctcagtgcaaacaagagtaatatcaatagcccagaaaaagatgatggcgataaggaaaccgcacagcttgatacaatacccaataacaaaggaaaaggaccagcagatacaattgaatcgccacctaaaaggttcaaataagggacgatacgcatcggaaaagaaatggacatcaaatcctccgagaactaaagtttcactcagatcttcgtcgaccttttgagttgcacaatgtctattttgcaacatatgtataattatatatgatgacctactcagctctttgaaaacaatttatgtaaatataacagcctaattctacgtagtggacaaaaatgttgactctgattatagctcaggtaactctatttcatataaaca

SEQ ID NO: 217952 - DNA, 1583 bp, Zea Mays
atgtgggactcagtattgcatgttcttaccattgtgcatgaagatggtcgtgtaccaacacaggcagcggggttgattgaaaaaatggagagcttcaaatttgttttcattttaaaattgatgttgaaaatgcttgcaatcacaaatgagctctctcaaaccttgcaaaggaagaatgccaacattgttcatgctatggagttacttgatgttgtgaaaacccgaatggctacaatgaggacagatagtggttgggagtcattctttcaaagcgtgaaagaattatgtgctcaaaagggtattcctgtggtagatatggatgaagaagtgcctattagaggtcgttcaaggcgagatggcttcacaatcacaaaccttcactactaccgcaccgagatattctttgttgttcttgataaaatcaacactgagttatgccatcgctttaatgaagtttctagcgagttgcttgtttgcttttcttgcctcgatccaaagaacttattttgcagttttgatatagagaaacttgttcgacttggtactctatatgataaggatttttcagttattgaatgtgcaatgttaagagagcaacttgagacatacattgtccacgtgcgaaggcatgccgcttttgattggatttttggtggtgattttggtgccgcactgcaaattaagagagaaatttcggttcccaagcagcccacagattctattgattgcgggtgtctttcagcatctgagggtttctaccagtccaggttacgcacaagcttcaaattatcgcaaaattcctcttacatatctgcatctcataccgaaccaggtctcataccggaccagaaaaatggaatacactttattacctgatttagcaccgcataagatacacgcaaagattcaagtacatgtatctagaaagtggcttttccgaggtgctactgatagtggaccactacaacatgttgatatggttttgtctgatcgagagggtaatgctatttatgctgaaatccctggaaatttagctgaacaaaaagcaacaaatattgaagaaggaggagtttatgatatcagcagattcagagtgtgcgcagcaaaaactgttttcaaaatagtggatggggacaaaatgatccaattcacatttcataccatagttaaacgtgccacaagccctccaacaacatttccattatatgtttatcggctaacatcatttgatctaattgagcctcatgttcaaactacaaataactttgttgatgttcttggtgtcataactgaaattcatgaactgacacctgtgcatgtccgaagtcaactaacaccaacagtgacaaggaccattatcatagaagatctcagcaacaaaacaatgaagatcactttatgggcagatcaggcgataatgttcaatcttcatgacgtgtacgatacaaatacaaataaactgattcttgtgctattcgtcgggtgcttatcaaaaattttcaaaggtgtctacctaagtggtggtcctgcctgtagatggtacttcaatccaacaattccagaggcagaaccttatcttacca

SEQ ID NO: 217953 - DNA, 845 bp, Zea Mays
tgacaacttagtgattggatttttggtggtgattttggtgccgcactgcaaattaagagagaaatttcggttcccaagcagcccacagattctattgattgcgggtgtctttcagcatctgagggtttctaccagtccaggttacgcacaagcttcaaattatcgcaaaattcctcttacatatctgcatctcataccgaaccaggtctcataccggaccagaaaaatggaatacactttattacctgatttagcaccgcataagatacacgcaaagattcaagtacatgtatctagaaagtggcttttccgaggtgctactgatagtggaccactacaacatgttgatatggttttgtctgatcgagagggtaatgctatttatgctgaaatccctggaaatttagctgaacaaaaagcaacaaatattgaagaaggaggagtttatgatatcagcagattcagagtgtgcgcagcaaaaactgttttcaaaatagtggatggggacaaaatgatccaattcacatttcataccatagttaaacgtgccacaagccctccaacaacatttccattatatgtttatcggctaacatcatttgatctaattgagcctcatgttcaaactacaaataactttgttgatgttcttggtgtcataactgaaattcatgaactgacacctgtgcatgtccgaagtcaactaacaccaacagtgacaaggaccattatcatagaagatctcagatcaggcgataatgttcaatcttcatgacgtgtacgatacaaatacaaataaactgattcttgtgctattcgtcgggtgcttatcaaaaattttcaaa

SEQ ID NO: 217954 - DNA, 635 bp, Zea Mays
acctcaaccattccaaacctccgaggaggaccaggacgtaccgttgtccgttccacacgcgatcaaaacagcgccatgtcgtcggcgtccaactcggccaagggctcgtcgccgtcatcgtcgacgtcgtcccagtggacgaagccgcagaacaagctgttcgagcgcgccctggcggtgtacgacacggacaccccagaccggtggcacaacgtggcgcgctacatggggggcaccacgtctgtggaggaagtgcgccgccgctaccagcagctcgccgtggacgtcgcgcagatcgagtccggcgaagtgcccttccactactggtacgccgccgccccgccgctgcatccaggcaccaacaacagtacctacgtgcccaacttggcccagaaaatggaatagattctgcaaccgctcgctccaaggatcagggctttggactcgaccggccggcagcaagttgtaacaagcatttgcccccgggattttgtttatttgtagtgtttttctcgtagttaaaatgtcgctactttatgcacgatatttatattctgatgtccatcttttttcgttgttctcaagtgacctgaaagtctgaaacatttctactgcaacatatttatcggaacata

SEQ ID NO: 217955 - DNA, 2054 bp, Zea Mays
atggccagcttctccttgaaaccacagcacaatggcagcagcagcaggatctaccatactatctgtagtgctactgcctccgaatggaggtcgctcctgcggtcccgaagcagtgtttcatggagctggaagaagcacacaaggttgcgattgcgatgctgtcagggttccaatgggggtgatgacagccgtctgagccaaaacaccggcattttccacccatcgatatggggggatttcttccttggttgctctagcagccctgaagaagctgctgcttcgtcccaacaaaaggcttggatggaacgatgcgatgaactgaaggaagaagtgggtcgtctgatggtagtagaagcaaactcaccattgcatgagaggctgcatttcatagacgcgctggagagcctgtgcttggaccacctgctgaaagaagagatcggtgctgcgctgacgcagatcgagaccgccggtgtcagtgacgactgcgacattgggaccgtctctctctggttttacttgctccggaaacaccgccgcagggcgtcgccagatgtgttcgtgaggttcagagacgcggagggaggtttccaggcgaacgatcctggggacctactgaggctctacaacgctgcgcatttcaggacccatggggagacaatactcgatgaagccatcgcgttcgcgagaagccgtctggagatgatgctgccctacgtgaaagggccattgttggcgcatgaagtcagatcctcgctggagatcccgctgcctagaagggtcaggatctacgagtcaaagtattacatccatgcgtatgagacaagtggaacgctgcatgagaaggtactgcaacttgccaagctgaactccaacgttctgcagctccatcatcagcaagagctgaagatccttacaagatggtgggaggatatgcagatcggatcaaaacttcctttcgcacgagatagaatcgtggagtgttttctatggatcttaggagtatactatgaaccgtgtcattcaagagcccggataatattgacaatggttatcgccatcgtgacactcttggacgatattttcgattctttcgcgaccccacaagaatgtgaaatactcactaattgcatcgaaagctgggatcccaaaggggctcaagacctcccaggttgcatgaaatttgctctagagaagatattggatagctaccagaccattacaaatatgctccaccgagaggacaagtatcgaatgacgtatctaagacactttacagaagatctagtgagaagcttcaacatggaggtaaaaatgcttcaaaaaggttacatcccagattctgttgaagagcatcttaaggtttcactcagaactggtgggtgtcccatcttatcatgtgcttgctttgtcgggatggatgatatagcaacaaaggatttctttgattggatttctagcgtacccaaaatggtgcgcgcactttctataattctgagactagcagacgatctccactcgtatgagcgggagcagctaatccctcatgtagcttccacaatcgacacctacatgaaaaagcacaatgtctcaattgaagtggcgcaggaaaacatacacaaactaaaagaagagtcatggaaagatttaaatagcgagtggctaaatccatgcaatgatgtgtatccaaagcaactattggagaggatattcaacttggcaaggacgatggagttcatgtacaaccaagaggacaatttcaccaactgccacaaccttaaggataccattcgctgcttgttggtagagccatataggatccacatttagtttttggcaacaaactaatgaattacagtgtccagttaatgtaatgcagagttatatgtcatccttatatgtgttagtatgttttctctagtgtatgtaatatggtgtcatctcatcctcatgtgtgtcaatcttcttttcatgtatagtgtcaatatgtacacatatatgtggcatcatttttgttttcaccctagagtttactcttgtcgtatcatttgcccttc

SEQ ID NO: 217956 - DNA, 3466 bp, Zea Mays
cgcgacgcgagcgcagtccaccctctacgactacacacactctctttctctctctgttctcctttcatctccactcgtccgctttgtcggaaccgttgctggtggctccggggttctgcgactgcgcatagggaatggcgatggcggcggcggttttggaggaggcgctgcgatggggtggaggaagcgttggggacgacaacgtggccgcgcgcagggcagaggaggccgcgataagaaggcatgaagcagccagttggttgcgaaaaacggttgggatagtgtgtgcaaaggacctgccggaagagccctctgaggaggaattccagcttggtctgagaaatggcattgtcctctgcaacgcactgaataaggtccagccaggcgccatacccaagattgtcggagtccagtcagatactgcggtccctgcagatggctcagctttgtgtgcttatcagtacttcgaaaatctgcgaaacttcgttgtcgttatacaagattttggcctcccaacatttgaggtgtctgatttggaaaagggtggcaaaagtgttcgaattgtggactgtgttcttgctctgaagtcattcagtgaaagtaagaaaacagggagacaagctgcatgtaaatatggtggcattttgaagcctttggtttccggaaattatttcatacttaagaattgtgatgcttttatgaataaaaatgcgagaattcacacagaagaggctaccctgaatggttttcgaggagagcaaaacttatctcttgattgttctccagaatcctatgaggtaattacttcagacaaccttagcacgattattcgcacaattctcttagataaaaaaccagaagaaatcccactgattgttgaatcactactaaacaaagttattcaggaatacgagcttcgctttgcaaatcagaacttgatggatgaagagaagcaaaataacttgactacgaaggaggaagccagttttgcagtaaatggtagtaatgcagctcaaaagttccatctgaaggctgaaataaattttgatctacagcacaaacagatcaaggggttgagaggtactgtttcttctatcaagtctggaatggaacaactgaaattgcactactctgaggagttcactaaacttgggaagcatttgtacactatatccaatgctgcttctggataccataaagttcttgaggaaaatcgcaagctgtacaaccagatacaggatcttaaaggaaatattagagtttattgtcgagtgaggcctttcctacctgggcaaataagttccttaagcagtgttgctggaatggaagaaagaaccattacaataatgactcctacaaaatatggaaaagatggaaacaaatctttcactttcaacaaagtctttggtccagcagccactcaagatgaggtcttttcagatatgcaaccattgatacgatcagttcttgatggttttaatgtctgtatatttgcatatggccaaacaggatctgggaagacttatacaatgagcggacctaaagttttaacagaggaaagcctaggtgtcaactataaagcattaaatgacttatttaatcttcaagcacagagaaaggggacaatagattatgatatttctgtacagatgattgagatatacaatgaacaagtgagagatctccttcaggatagtggaaacagaagattagaaattaaaaatacatcacagaaaggacttgcggttccagatgcaagcatagttcctgtcacatctacgtctgatgttgttgaactgatgaatcaaggccaaaagaatcgtgcagtgggttcaacagccataaatgaccgcagtagccgctcccacaggaagagatttgacatctgggacagttttaagaggttgcatgcatctggtcgatctagcaggcagtgaaagggttgataagtccgaggttgttggagatagactaaaggaggctcagtacataaacaagtcactttcagcactgggagatgtgattgcatccctttcccaaaagaacacacatgtaccttaccgaaacagcaagctcacccagctcttgcaagattcacttgggggacaagcaaaaacacttatgtttgttcacataagcccagaacttgacgctgctggtgagaccataagcaccttgaaattcgctgaacgtgttgcctccgttgaacttggtgcagccaagcaaaataaagaaggcagcgagattagagagctcaaagaacagattgcttccctcaaggctgcattggctaagaaggaaggagaaccagagaacattctaagcacacggtcaagcccaagcatatacagaattagaaaaggcaatgcaacacctgcaactcctaaagacaggcagccaatggaagaagttgggagcctagaggtccagaatgtcttcactccagctcaaaagaggtcaaaaatgcatttgcttggcatcctcactgagaacaactcgtctaactcggttcagaattgcaatgttcctcagaaggaaataggattaggtggttgggttgacaagatggctcttggagacaaccactttgagaactctaattccatcctagagttggagcctgacacagcacagcttccaacttctttttatcatcaaagatatagtcctgtgcaacaaagctgtaggaccgaatcagtaccatcattgggcctacatggctttgattctgctactagttgttctaaccaagagattgtagtgtcaaccatgggactaaaagcttctggtgttgccaatagaggcgcctcaactgtaaaaaagtatgaagctacatcaacgaggagtacaaatctagcaagcaagtctccattgttgcagaaaaaactgcaaacaccaaccaggaacaggaaccagctaacttcgagcaccataggtggaagaagaacaccaaatggaaaaattggcattgcaaagtaatcaattaatgtgaaggcagatttgctgtgaccatgcttagaatggaaaaattggcattgcaaagtaatcaattaatgtcaaggtgggatagcacggagcctaaaaggactgcggtttttgaacctgcagaaggatcaagatcaatcatgtaaactgatgcacattccgataggtagcacattttatttattacattgaagttggaaacagacaccaaagaggacagaaagatgataaatatgaaggaaattcgaattgaggcttctgtacattttccacacttataaagtaatgttgtatcatgtgcctattagccatgacacatcatcacctgaaagttgcttgtattagacatgtgctaagtttacagtttctctgtctcatgtatgttaccctttctcataatggatcgccactcacagactaagagggtgattggtttcacccaactaaaatttagtcccttttacattgaattgaatgtttg

SEQ ID NO: 217957 - DNA, 1560 bp, Zea Mays
gcacgaactaattagctttcaaaaacttagcatatctcaggcgcaatctgaagcagcagtcatatcagagatcagaatgagaaggtttcttccccctctcgataatgtacacgcatgggcatggcacgttcttcacttcagaccctcacacacagctctttccccggtaaaatcaaggacggcagcagcgcatgacttggcatcgctgccggcttgtggcgcgtcctcacaggctgggcgtcctctcggcggcgccggagatgacggtgagcaggttgttgccgaaggggtcgctgaggtgcttggcgaggttctcgacggggccttcgccggtgacgtaggcctggatgaagaaggcgaacatggagaacatggcgagccggccgttcttgatctccttcaccttgaggatggcggcctggtcggggtcgctggccaagcccagggggtcgaaggggccaccggggtgcagcttgtcctcgaggtccagtccgttgatgatccggtagtactcggcgccgccgacgaggacgacctccgcgatcacggcgaccaccaggttgatggggatgctgttgccgaaatagctgagggtgtttccgtcgaggagcagggctccggtctgcaaccagacggcctcggggccgcagttagcgccgaacttgttgcacgcctctgggatgacagcgccagcggcaccgagcatggcccatctggcatggatcagctcgtaggcctggtacctgcacggcgttgatggtagtaggataagtttggtgatgatgtgaaattgtatgtttgagaccgtgatcgatgtgagactcacttggcgaagtcctctggcttcttgcccaggccaaaagggtcgtagccatagctgccagttgtaggagcaagatagttcagttcagataccttaacttcgattcttctccagggacctctccggtgaggtactccggtacctccgagcggtccaagagcccatccggcaggtagatcctcctgtcaggacctaattggacatagaacaggagacagttactatacagggagcttctgaaggttttcatgggcaaagttctatatctcaaacatgaaacaccaaacaagatacaattagtgcagaggaagcttctgaagattttcatgccaaagttctatcaaacgcccaacacaagggagccctgaagcaaatctgggtcctagaagtcgtgcgctgccagcagttggggccaggtctactcaccgtaccacttggcgagctcgtcgctgatgtccggagaagaggacgacaccgcagagggcttgggcttctgggcaggcttcttgctgaagagggagacgatcttctgagcccccgcggtgggcgctgcggtggcgtagcgggaggagccggcgaagttgagcttggtgcccagaatcttggatggagcaagagccgccatcgccggagacccacaattcagagagacttgccgcgggaggggatggctgatgggggcttgtggaggaaaaggcgagctagtttaaatggatgaaaatgaggatcggaggatg

SEQ ID NO: 217958 - DNA, 1855 bp, Zea Mays
gcgagacggctcgcgagccggacccgtcaggccgtcactgcaccacatgacaaacccggaccgaacacggacgcctcccagcaagtggtgacccgtttctccattctcgccgtccgattataaatgcgtccgcaaatgccgccagtccgctctctctcgctgcgcctccgcccccaaatctgcgcaaaggcctcccactcaaattcctcgcggcgaccgatatggttgggagcgtgggcaacgggctggccgatctgggtgcaagagccgtctccatgaacggggcggggaaggcgctgcgtcctgccgaagcggcggcggcggccgccgccgcggagacgctcccgatggagctggatccgtcggaggccttagtggccgctgcggtggaggcgaagggcgagaaggctgccaacgggaggagggagatcgtgatggggaggaacgtacacacctcctgcttcgccgtgaaggagcccgacgcggacgacgaggaaaccggcgagcgggaggcaaccatggctagcgttctcgcgctctaccgccgctcgctcgtcgaacgcaccaagcaccacctcggttacccatacaatctggactttgattatggtgcactgacccagctgcagcacttctcgattaacaaccttggtgatcccttcatcgagagcaactatggtgttcattcccggcagtttgaggttggagtgctggattggtttgctcgtctctgggagttagaaaaggatgagtactggggatatattactaactgtggtacagaaggaaatctgcatgggattcttgttgggagggaggtgttccctgatggaatattgtatgcgtctcgtgagtcccattattcagtattcaaagcagcaagaatgtacagaatggattgtgtcaaagttgacacccttatgtctggggaaatagattgtgctgatttccagagaaagttattgcagaaccgagacaaacctgccatcattaatgttaacattggaacaactgtgaagggggctgttgatgatctagacttggttatcaaaacccttgaggaaaacggctttaaaggtcggttttatattcattgtgatggtgccctttttggattgatgataccatttgttaagaaggcacctcaagtgacatttaaaaagcctattgggagtgtcagcgtctctgggcacaagtttgtcggatgccccatgccatgtggtgtccagataacaaggttggagcacataaatgccctttctagcaatgtggagtatctggcgtcaagggatgcaacaatcatgggaagcaggaatggccatgcccctatcttcctctggtacaccctcaacaggaagggctacagaggcttccagaaagaagtccaaaagtgcttgagaaacgcacactacctaaaagatcgcctcaaggaagcaggaatcggagcgatgcttaacgagctcagtagcacggtcgtgtttgaaaggccaaaggatgaagaatttgtccgaaggtggcagctggcttgtgaagggaatatagctcacgttgtggtgatgcccagtgtcaacattgacaagctagactatttcctgaatgagttagttgagaaacgggcgacttggtaccaggacgggataagccagccaccctgcattgccagagacgtaggtgttgagagctgtctctgtggccttcacaagtagcgagccttttgctttgcaagtgggttcattcttgagtcgagttaaaagtgttatgttgtactgtgttcattcttgagttgagttaaaaagtgttatgttgtactgtgttcgtgcgttctgcttctgtgtttctccacagtacaacagaa

SEQ ID NO: 217959 - DNA, 1255 bp, Zea Mays
caggacctttttgtggcgggggggcctactcatattggtgcagaaacagaccttcgctttgtatactgtgcagctgcaatctgctcaatgctagatgactggacaggaatggacaagttaaaggcaaaggagtacattcttaactgccagtcatatgatggaggctttggtatggttcctggttctgaatctcatggtggaggaactttttgtgctgttgctgctctccatctaatgggcttcatccaagttgattttggcatctgacttaagagattctacatcaatcgacacatgcatgctcctcgaatggtgtcttcagagacaagtcactgatggagggtttcaagggagaaggaacaagctcagtgatacatgctatgctttttgggttggaggcgtcttgaagatcttgggtgcataccacttgatcgacagctgtgctctgcggagtttcttgctcacctgccagtcgccttatggaggcttcacgaagttcccggatgatcggataccagacatctaccattcttactacggcctggcagccctctccttgttggaagaggaagggctggaacccctctgcgtcgaactggggatcctctccgctgctgcattatagaaacttgtgtttctaccgaatccagttactgtacaatgtttgtgggggggggggggggggggggtaatccagtacttaacacaggataaacagctgagaaatcgaagggagtaatttattgatagagtgagttggtccgtgctgtcagtgtgctgcgcagatcgtgtaacattacttcgtgagttcgaaaggcgtgtgacaattttgtttgcaaaagtgcgatgggcaggctaactgagccagtcttcttcccagttggttgatctgattgttgacagttgagttagctgaacgctttgtatgattgtatcgtcacttggaaaggtactcgaatgtttgacgtttctgtttccgtctgtttggcataactaaatggcttgtgtctgctgccgtgaacaactttacatattgcatgcttcttcacaacattttgtttcagttaacactctctttaggcatctgcatactcatcgcttttctctcagaattcaggtgagtgagagagagaaaaaaaaaccagctactactgttttggtcacagggttaccgtgactgatttataaagatcgatgatttccgatggatattagaaatagcagcttctgttggacagctgaaagggaagaaaat

SEQ ID NO: 217960 - DNA, 1263 bp, Zea Mays
caggacctttttgtggcgggggggcctactcatattggtgcagaaacagaccttcgctttgtatactgtgcagctgcaatctgctcaatgctagatgactggacaggaatggacaagttaaaggcaaaggagtacattcttaactgccagtcatatgatggaggctttggtatggttcctggttctgaatctcatgcgagtcaggtggaggaactttttgtgctgttgctgctctccatctaatgggcttcatccaagttgattttggcatctgacttaagagattctacatcaatcgacacatgcatgctcctcgaatggtgtcttcagagacaagtcactgatggagggtttcaagggagaaggaacaagctcagtgatacatgctatgctttttgggttggaggcgtcttgaagatcttgggtgcataccacttgatcgacagctgtgctctgcggagtttcttgctcacctgccagtcgccttatggaggcttcacgaagttcccggatgatcggataccagacatctaccattcttactacggcctggcagccctctccttgttggaagaggaagggctggaacccctctgcgtcgaactggggatcctctccgctgctgcattatagaaacttgtgtttctaccgaatccagttactgtacaatgtttgtgggggggggggggggggggggtaatccagtacttaacacaggataaacagctgagaaatcgaagggagtaatttattgatagagtgagttggtccgtgctgtcagtgtgctgcgcagatcgtgtaacattacttcgtgagttcgaaaggcgtgtgacaattttgtttgcaaaagtgcgatgggcaggctaactgagccagtcttcttcccagttggttgatctgattgttgacagttgagttagctgaacgctttgtatgattgtatcgtcacttggaaaggtactcgaatgtttgacgtttctgtttccgtctgtttggcataactaaatggcttgtgtctgctgccgtgaacaactttacatattgcatgcttcttcacaacattttgtttcagttaacactctctttaggcatctgcatactcatcgcttttctctcagaattcaggtgagtgagagagagaaaaaaaaaccagctactactgttttggtcacagggttaccgtgactgatttataaagatcgatgatttccgatggatattagaaatagcagcttctgttggacagctgaaagggaagaaaat

SEQ ID NO: 217961 - DNA, 3281 bp, Zea Mays
atggcgaccaaccgagaggccagtagcggcgtggatgaaggggcccgagtcgggcatggtcacgacgatggggaagggagccgccatgagggagagaggcatcaggtggtgacgagtaggtctgttggcgcagagggccagcggacagaggccacgacaataggctggggccgcggcggcgatctggtggtagggtatggtggaggaccaacattaccaagaaaggcaatcaatactggcttttctcaaactgatttggcgatagaagtttatcctctacgactgcagttaattctaatgtcaagaggagagcgaacctttataaggataagcaagaagggtacagttggccaactccataaaatggcctgtaaggtttttgacttggcaccagatgaggtatgcatttgggactattatggtcgaacaaagcattcattgatggatagcttggacaaaacccttgatgatgccaacattcagatggatcaaaacattctagttgaggtaaccactgatgcaagtggtagtctggatggtttggttaagcgaaacaatttttttgagagtgatgctccgaaatcaggattgccagatgagaattttgcagccaacaactatgcttccagaagctatagctctagtctgacaccaagcatctacctgcgatcacccaatggtgatctggataatgtgcatggttctagtggcatgatcacgaggggatcgcccttaggtcttacagggctacttaatcttggaaatacatgctatatgaacagtgccatacagtgtcttgtgcacacaccacagtttactaaatacttctgtgaagattatcatcgcgaaataaatcggcaaaatccactgggtaatgtgtcatgtagggtgaacttgcattagcttttggtgagctattgagaaaactctgggctcctggaggacgtgcccctgtttcacctagaccattcaaaatgaagctttctcggtttgcatctcagttcagtggatacaaccagcatgattcacaggagctgttggcgttcctattggatggactccatgaagatttgaatcgtgtgaagcatagaccttacataaattcaggggatgctgatggaagatcagatgaagaagttgcagatgaatattgggcaaatcatattgccagaaataattcaatcattgttgatgtatgccaggggcagtacaagtccactttggtttgcccagtctgtgggaaggtttcagtgacttttgacccgttcatgtatctttccttgcccttacaatttgcctcaacccggagcgtgactgccgtggtgttttcttgtgatggtagtgttccaccaacaccattcactgtgaatgtaccaaaacaaggtaggtgcagagatctattacaagcccttggtgctgcatgctcacttaaaaatggggagaaacttctaattgctgagatacggaatcataagatctaccgttttattgatgatccagtgcttcagctgtctacaataagtgatgatgatcatctggcagtttataagctcccaaagttggaaaagagggtgaattacattcagtttgtgcatcgtcatgaagatctggaccatggaaacaataacagcttgacatcttggaaaccgtacggtgttcctcttcttgcacaaatttctcgcaatgaaattgtcacgggttttgatatccatgagttggtccataaaatgcttgtgcccgtgctaaggaatccggactctctgcatttggctgttcaaagttctgtttccacaagaactcatagttatcataccgacagcagcaaatgtcagcttctgttggttgatgatagcaacacagtcattgaaaaatcaaatgatgctatcaggatcccacaatcttcacttgcaactgtattttttatcaactggcccaaggcagatctgaaaaagatagacactcatcatttagagtaccttccagaggtgtttatgtatgctccgcctgcgaagagaacccgtggtgaagctctgtcactctatgcatgcttggatgctttcttgagagaagaacctcttgtacctgaagacatgtggtactgtccaaggtgcaaggagcaaagacaagctagcaaaaagttggatttgtggagacttcctgaagtactagtcatacatctaaagagattttcatttagtaggtcaacaaaacaaaaactagaaacttttgttaattttccaatacatgacttggatttgacaaattacattgccaataagaagacttcagagcgccagatctatgagctgtatgctgtgagcaatcattatggcaacatggcaagtggacattatactgcacacattaagcttgtggatgagaatcggtggtacaacttcgatgatagccatgttgcttccattgatgaagatgaggtgaagactgctgcagcttatgtgctattctatagaagggtcagagaacaagacatagcaaggggaactagtaatggatctcagttatatgcaaaaagaagtcacggatatagccataggtaggctgatgattactgtggttcggtgcaagggggattctggaaatgacacccgcacgcctttagtcattgccaggagtatatggcttgctggaaaaaatgctcatcacgtgcagtcaatgcaccgttgtccagttgtcacagaagatatttcgtgcagtgctggtacaagatgggaattttgtatgaggtgagttgaaggagtaattgactctttatgataactgggtagcttcaacaggaacgccggggcttggtggcattttgttcgtctgttttcttctagaagagaaacaaggggaggcaagaaaacatttaggaaacaccttttcgttaatttgattttttatttccatttttagatttagctagtctgtacactgttgttggaaatgggtccgctgttgttggtcgatgcttgtggtggccaataatactacacccaactataccaggctctgcaatggcgaatcatggtgcacattatggtgctctgttgcgggaagaattgtagctgatgttgtacttatatactggcaaaaaggccccagaaatgtaaaaatgtatcgatatgctgacatcttaaaccctattttggattcgtgctctttcctatggatgaaggtgtgcgccatttaggggttgtttgtttgaagaatcaatccattctaggtaggtgattatcacgagaccatttcataaatttggtgaaatgaattcatttttt

SEQ ID NO: 217962 - DNA, 3390 bp, Zea Mays
cgtcgctacgcttggaagggtcccgcggggcgcaagatcgttttttccccttcttgctggtgttgtttgttggtggcggaatgcttcggcgccgccgttgaggttgcgcctcggcgtcggcattggaggtggtggcaaagttggattgattacctcattcaagatttgactggtgcaacaagtaatggttctcatcatcatgagtttggttcaaaaactcctagaaggccaggagctattgacaataccgatttaattgatgatgtgccacttgaagtctccaacatggagattgagatacatgataacttggttgagggtcgggattacatactgcttcctcagcaagtttgggaaaagttgcatggttggtatggtggaggaccaacattaccaagaaaggcaatcaatactggcttttctcaaactgatttggcgatagaagtttatcctctacgactgcagttaattctaatgtcaagaggagagcgaacctttataaggataagcaagaaggtatgcatttgggactattatggtcgaacaaagcattcattgatggatagcttggacaaaacccttgatgatgccaacattcagatggatcaaaacattctagttgaggtaaccactgatgcaagtggtagtctggatggtttggttaagcgaaacaatttttttgagagtgatgctccgaaatcaggattgccagatgagaattttgcagccaacaactatgcttccagaagctatagctctagtctgacaccaagcatctacctgcgatcacccaatggtgatctggataatgtgcatggttctagtggcatgatcacgaggggatcgcccttaggtcttacagggctacttaatcttggaaatacatgctatatgaacagtgccatacagtgtcttgtgcacacaccacagtttactaaatacttctgtgaagattatcatcgcgaaataaatcggcaaaatccactgggtaatgtgggtgaacttgcattagcttttggtgagctattgagaaaactctgggctcctggaggacgtgcccctgtttcacctagaccattcaaaatgaagctttctcggtttgcatctcagttcagtggatacaaccagcatgattcacaggagctgttggcgttcctattggatggactccatgaagatttgaatcgtgtgaagcatagaccttacataaattcaggggatgctgatggaagatcagatgaagaagttgcagatgaatattgggcaaatcatattgccagaaataattcaatcattgttgatgtatgccaggggcagtacaagtccactttggtttgcccagtctgtgggaaggtttcagtgacttttgacccgttcatgtatctttccttgcccttacaatttgcctcaacccggagcgtgactgccgtggtgttttcttgtgatggtagtgttccaccaacaccattcactgtgaatgtaccaaaacaaggtaggtgcagagatctattacaagcccttggtgctgcatgctcacttaaaaatggggagaaacttctaattgctgagatacggaatcataagatctaccgttttattgatgatccagtgcttcagctgtctacaataagtgatgatgatcatctggcagtttataagctcccaaagttggaaaagagggtgaattacattcagtttgtgcatcgtcatgaagatctggaccatggaaacaataacagcttgacatcttggaaaccgtacggtgttcctcttcttgcacaaatttctcgcaatgaaattgtcacgggttttgatatccatgagttggtccataaaatgcttgtgcccgtgctaaggaatccggactctctgcatttggctgttcaaagttctgtttccacaagaactcatagttatcataccgacagcagcaaatgtcagcttctgttggttgatgatagcaacacagtcattgaaaaatcaaatgatgctatcaggatcccacaatcttcacttgcaactgtattttttatcaactggcccaaggcagatctgaaaaagatagacactcatcatttagagtaccttccagaggtgtttatgtatgctccgcctgcgaagagaacccgtggtgaagctctgtcactctatgcatgcttggatgctttcttgagagaagaacctcttgtacctgaagacatgtggtactgtccaaggtgcaaggagcaaagacaagctagcaaaaagttggatttgtggagacttcctgaagtactagtcatacatctaaagagattttcatttagtaggtcaacaaaacaaaaactagaaacttttgttaattttccaatacatgacttggatttgacaaattacattgccaataagaagacttcagagcgccagatctatgagctgtatgctgtgagcaatcattatggcaacatggcaagtggacattatactgcacacattaagcttgtggatgagaatcggtggtacaacttcgatgatagccatgttgcttccattgatgaagatgaggtgaagactgctgcagcttatgtgctattctatagaagggtcagagaacaagacatagcaaggggaactagtaatggatctcagttatatgcaaaaagaagtcacggatatagccataggtaggctgatgattactgtggttcggtgcaagggggattctggaaatgacacccgcacgcctttagtcattgccaggagtatatggcttgctggaaaaaatgctcatcacgtgcagtcaatgcaccgttgtccagttgtcacagaagatatttcgtgcagtgctggtacaagatgggaattttgtatgaggtgagttgaaggagtaattgactctttatgataactgggtagcttcaacaggaacgccggggcttggtggcattttgttcgtctgttttcttctagaagagaaacaaggggaggcaagaaaacatttaggaaacaccttttcgttaatttgattttttatttccatttttagatttagctagtctgtacactgttgttggaaatgggtccgctgttgttggtcgatgcttgtggtggccaataatactacacccaactataccaggctctgcaatggcgaatcatggtgcacattatggtgctctgttgcgggaagaattgtagctgatgttgtacttatatactggcaaaaaggccccagaaatgtaaaaatgtatcgatatgctgacatcttaaaccctattttggattcgtgctctttcctatggatgaaggtgtgcgccatttaggggttgtttgtttgaagaatcaatccattctaggtaggtgattatcacgagaccatttcataaatttggtgaaatgaattcatttttt

SEQ ID NO: 217963 - DNA, 3666 bp, Zea Mays
atacaaaatcctgcgttgcaaggacctgttaatcacgggtcgagaaggaaagaagaaaaacaaagcggaggagtctaaacaaagcgccagacagcctcctctcctccggccggaaaaaagcaacctcgcagatccgcggccccccctcctccgctcacaggttcaccgcatcgacgccactaccgtttccactgccgcctcgaccccgctccaccaattcttggtcaagccgctccagctaagagacggagagccctgcggaaaggggagacgaggggagggtgcaaaccctagccgtagaccgcgggctcctcctcctcgccggcggcggcggggatggagatggtggtggcggcgccggcgctccccgccgaagtggagagggctctcatccgggacataaccgtcgcggctgatgcccacgccaaggagggagacactttcttcctcatcaccaccaggtggtggcaaagttggattgattacctcattcaagatttgactggtgcaacaagtaatggttctcatcatcatgagtttggttcaaaaactcctagaaggccaggagctattgacaataccgatttaattgatgatgtgccacttgaagtctccaacatggagattgagatacatgataacttggttgagggtcgggattacatactgcttcctcagcaagtttgggaaaagttgcatggttggtatggtggaggaccaacattaccaagaaaggcaatcaatactggcttttctcaaactgatttggcgatagaagtttatcctctacgactgcagttaattctaatgtcaagaggagagcgaacctttataaggataagcaagaagggtacagttggccaactccataaaatggcctgtaaggtttttgacttggcaccagatgaggtatgcatttgggactattatggtcgaacaaagcattcattgatggatagcttggacaaaacccttgatgatgccaacattcagatggatcaaaacattctagttgaggtaaccactgatgcaagtggtagtctggatggtttggttaagcgaaacaatttttttgagagtgatgctccgaaatcaggattgccagatgagaattttgcagccaacaactatgcttccagaagctatagctctagtctgacaccaagcatctacctgcgatcacccaatggtgatctggataatgtgcatggttctagtggcatgatcacgaggggatcgcccttaggtcttacagggctacttaatcttggaaatacatgctatatgaacagtgccatacagtgtcttgtgcacacaccacagtttactaaatacttctgtgaagattatcatcgcgaaataaatcggcaaaatccactgggtaatgtgggtgaacttgcattagcttttggtgagctattgagaaaactctgggctcctggaggacgtgcccctgtttcacctagaccattcaaaatgaagctttctcggtttgcatctcagttcagtggatacaaccagcatgattcacaggagctgttggcgttcctattggatggactccatgaagatttgaatcgtgtgaagcatagaccttacataaattcaggggatgctgatggaagatcagatgaagaagttgcagatgaatattgggcaaatcatattgccagaaataattcaatcattgttgatgtatgccaggggcagtacaagtccactttggtttgcccagtctgtgggaaggtttcagtgacttttgacccgttcatgtatctttccttgcccttacaatttgcctcaacccggagcgtgactgccgtggtgttttcttgtgatggtagtgttccaccaacaccattcactgtgaatgtaccaaaacaagtgcttcagctgtctacaataagtgatgatgatcatctggcagtttataagctcccaaagttggaaaagagggtgaattacattcagtttgtgcatcgtcatgaagatctggaccatggaaacaataacagcttgacatcttggaaaccgtacggtgttcctcttcttgcacaaatttctcgcaatgaaattgtcacgggttttgatatccatgagttggtccataaaatgcttgtgcccgtgctaaggaatccggactctctgcatttggctgttcaaagttctgtttccacaagaactcatagttatcataccgacagcagcaaatgtcagcttctgttggttgatgatagcaacacagtcattgaaaaatcaaatgatgctatcaggatcccacaatcttcacttgcaactgtattttttatcaactggcccaaggcagatctgaaaaagatagacactcatcatttagagtaccttccagaggtgtttatgtatgctccgcctgcgaagagaacccgtggtgaagctctgtcactctatgcatgcttggatgctttcttgagagaagaacctcttgtacctgaagacatgtggtactgtccaaggtgcaaggagcaaagacaagctagcaaaaagttggatttgtggagacttcctgaagtactagtcatacatctaaagagattttcatttagtaggtcaacaaaacaaaaactagaaacttttgttaattttccaatacatgacttggatttgacaaattacattgccaataagaagacttcagagcgccagatctatgagctgtatgctgtgagcaatcattatggcaacatggcaagtggacattatactgcacacattaagcttgtggatgagaatcggtggtacaacttcgatgatagccatgttgcttccattgatgaagatgaggtgaagactgctgcagcttatgtgctattctatagaagggtcagagaacaagacatagcaaggggaactagtaatggatctcagttatatgcaaaaagaagtcacggatatagccataggtaggctgatgattactgtggttcggtgcaagggggattctggaaatgacacccgcacgcctttagtcattgccaggagtatatggcttgctggaaaaaatgctcatcacgtgcagtcaatgcaccgttgtccagttgtcacagaagatatttcgtgcagtgctggtacaagatgggaattttgtatgaggtgagttgaaggagtaattgactctttatgataactgggtagcttcaacaggaacgccggggcttggtggcattttgttcgtctgttttcttctagaagagaaacaaggggaggcaagaaaacatttaggaaacaccttttcgttaatttgattttttatttccatttttagatttagctagtctgtacactgttgttggaaatgggtccgctgttgttggtcgatgcttgtggtggccaataatactacacccaactataccaggctctgcaatggcgaatcatggtgcacattatggtgctctgttgcgggaagaattgtagctgatgttgtacttatatactggcaaaaaggccccagaaatgtaaaaatgtatcgatatgctgacatcttaaaccctattttggattcgtgctctttcctatggatgaaggtgtgcgccatttaggggttgtttgtttgaagaatcaatccattctaggtaggtgattatcacgagaccatttcataaatttggtgaaatgaattcatttttt

SEQ ID NO: 217964 - DNA, 1801 bp, Zea Mays
ggccatgtgggcacctcaggccgccctgaccacctccaccgcgcccccggcggtgcggcgccgttccactcgtttgatcgccccccccccccccccccccccccatgtcaagacgacgatcagaatcagcccgcgtgttccgagaccgccttgttgacgtcctcgcagccccaacgccgctccacaatcctgatcagggtccgtcggagtgtctccctaccgtccccacccatgagcgcgtctacaccaccgcgagaggccgaggcggatgcgccctctccatccggcgcggtaactccccgtccccgtcgctcggtccgagtccaactccgtgtccgcagcctaccctcggaggcgtcgtcctccactctaaggagtcgtcgcaggtcccctaaggctccctcgactacgtcgatcgtcgcgaaagcggaggaatggggtaaggagaaggcggcggcgggtgctcccgaagaagaatgcgtccttccttttctccggaaaggcgcccccaggaaggttgagtgcctgatttgctcaaagagtattctgcctgatgaaaggacgcaatgttcagttaatcactgtgatgtaactttgcacaaggcttgttcagaagaaactgatggatgctgccctcggcatatatgtttctactgcaaaaagaggacatctaaacaccgcgtacaacgcacaatgcctgtgtgtactttatgtttactaaaggagaacaggatgattggttctgaagatccctcaaggacaatgatttcttggagtacttggccctcaactagtgaggatgctggccctacagatgacataaaggaagccttccggcgcttacctctcccatatattgaccaagagttcaatattgaccctattaataaacaggatctgaaaagtgaaagcgagccacctccatataagaaaagcgaaggtcgtccaattaaaggtggatgcatcaactgtgaccacggctcaacctgtggaagtagttgttcctgcagatcttcaatgaccagctgctctttgggttgtccttgctcagttaagtgctccaacaaaccatttcgcagagagaaaaagataaagatcgttaagacacgtcaatgtggatggggcgctattgcgctggaaaccattgggaaagatgattttgtgatagagtttgttggagaagttatagatgatgcaatgtgtgaagataggcttcaagatatgagacagcgcagagatcagaatttctacatgtgtaaagttgacaaggactttgtaattgatccaactttcaaaggaaatgcttgtcgcttttttaaccacagttgccaacctaattgtcggctggagaaatggcaagttaacggcaagacaagattaggtgtgtttgcttcacagactattgaagtaggaatgcccttgacttacaactacagattcaggacttctttcggtccagagaaagaatgtttctgcggggctcctaattgccaagggaaattgtgataataaagattgactaaggacgatttacacacccagaggtatataacaggaaggaaacattgaaaaataaaaaaggaataggatatacagtgaggatttattgagaagaaactctcatcatctggtaaaaagaaaaaaaaaacagtcatgagcgcggcaccattttatctaacatgatgtattacggtcatggacatagtagtgtctcgtagctaccgctaccactaccattgtttgttctgttatagacaatactatatgctgttgtttcggctgtacaggttttactctgcaa

SEQ ID NO: 217965 - DNA, 390 bp, Zea Mays
cctggatccgtgggccttcctcaagggcaacctttcaagttatgttctcgagctgaagagattgatgcaactgccagttctggaagtgatctttctcttcacttagaccttcttccatgccctcaagagcctaaatatgcgttgcatttacgagtttctgttgtgaggattcctgattgtggtgtgcttgcttctttaaagataaattcatcctttggaggaagtgagtaccaagacatggtagatcaagctttgaacgagtactttaagtttgataggttcctagcaagaggagacgtttttggtatacaaaacagttggaagtgtgtctcaagctgctgcctggcatgcaataagcaggataataaactgaatcttggcatgcaataa

SEQ ID NO: 217966 - DNA, 1157 bp, Zea Mays
tttagtgtggctggcgcgcgacaagaacgaaaccgtcggaaggacaaaacgggacgcgcgacgtgaccttttccatacttgcatgcgtgtggctggcgcgcctcctagcaattgcaagtcggggaggcaggccgccttcaaacggtagatctagccgatgtcgtcgtcgatgggacacgagagtagcggtggcggcgccgacgaggaggaccccgccggcctccagcgggtcatttggttgcggcagatgctccaccgctggcagtcctccagctccaggattgccgccgagaggaggtccagcgccagcgacgacggcgacagagccaacccagacgacgccaacgccacgacagaccaaagcagcaacggcgaccccacgcctgccgctgcagacaatgccagcagcagcagcagcagcaggaaccagatgctgccggcggcgccgcatggtgcggcggacgaggaggacgaggacgaggaccggcggctcctgtcgcgggtgctgctggtggaggagcgcaggcgggggtgcccccccgacgcggcggcgtgcgactcgccgatgacgccgatgacccccgacgcgccggcggacgtgccccgcgggtgctgccccgtgtacgtgggcgcggagcggcgccggttcgtggtgccgacggcgtacctgggcatgcccgtgttccggcgcctgcttgagaaggcggaggaagagttcgagttcgactaccacggcggcgccgtcaccatcccctgcgacacggaggcgttcaagtacatcctcgtcgtcatggaccgccaccgccacggcctggtcgacgacgatgggaacgagaagcacgaagagcaagacgcatcatcttcgtaggatcgataacaagctcggagatctccggttgaatgcgaccctccgtactagtcacgcagggcaagggcggtacttttaacgagtaaagaaaggtatctaaccttcttcaaatccacgaggaatcaaacgggagagtgtggggaccgttttttatttcgttctttaaaaaaaacgttttggtctgtgtggaaactaatcttagccttgtaaatagagtttctggggaactaatcttatgtttctatctaaagtttggtgtagtagattatggtagcaagttaaaatatct

SEQ ID NO: 217967 - DNA, 4678 bp, Zea Mays
gcgcaggcgcaaacgcaaacgcctcccttcttccctccgttcgttccatcgtcgctccctactccggggcgccctccctcggtttcttcctcgtctcgagctctcgtctagacgtcactgtcctcgcaccgctcccttctccggcatccgagccgtagccctgccctccgcatccacaatttgatgcggagggctcggccgccatgtcgtggggcctcggctggaaacgcagctccgagatcttccacctcacgctcgactatggggactacgacgacaacgacgaccatcagccctcgtccccgtcccctccggcgtcctcttccccttccgcctcggcatcgtcgaccccggtatcctcctcctcgcccaccgccacccgcaacggcgacgtcggcttccgcatcgagctcgaatggtcggcgggggacgacgaggatcaggtcgcgctccgcctccagtcccagctcatggtcgcgctgcccccgccccacgacgccgtctccgtcgacctgatcccgagagacgacggggaggaggaagtggtgcagatcgagatgcgtgtggtcaggaggcgggaggcactgcggtccgtgcgcgtgtcgcgggctcccggatccgcgctgggcagcggcgatggcgcgggggtgctcgcgcgcctcatcagatccaacctcgcgcccgcgcctgccgtggatggccccacagccgccgcgggcgtgccagtgctcgctgatcactggcggcccgtcgccatgctcagcctctgcaactgcggaatgtcggtacttccagttgagttaactcgccttccacttctcgagaagctatatcttgacaacaataaattgtcagttttgccccctgaagttggtgctttgaagaatatggaagtgctgtcagttaacaacaacatgctagtttctgtccctgtagaactgcggcaatgtgttatgctggaggaattatcattagaacataacaagcttgtccgtccactattggatttcaggtcaatgcccaagctccgaattttgcgtttgtttggaaatcctctagagtttcttccagaaattttgccactgcataacctcaggcatctcacacttgcaaatattagaattgaagcagtggaaagtcttaaatctgtcaatgtgcaaatagagactgagaatagttcctacttcatagcggccaggcacaaacttggtgcctttttttctcttgttttccgtttctcttcttgtcaccatcctttgctagcttctgctttggccaaaataatggaagatcgtagcaaccatattgcaattagcaaagaagaaaatgctgtcaggcagcttataagcatgataagcagtgataaccgtcatgtggttgagcaagcatgccttgctatttcatcactggcatctgatatttcttcagcaatgcagctgattaagtgtgacattatgaagcctattgaagctgtactaaagtcatctgacgaagaagaactagtatcagtattgcaagtggtagtcaccttaactttcgtttctgatcatgttgctcaaaagatgttgacgaaagatgtgttgaagtcactgaaagcactttgcggacacaagaactctgaggtgcaacgtctatctctgtttgcagttggcaatttggctttctgcttggagactcggcgcaccctcatgcattctgaaagtttgcgtgaccttttaatccgtttaactatttcacaagaacgtcgtgtcagcaaagcagctgcacgtgctttggcaatcctaggggagaatgagaacttgcgtcgagcaattagaggaaggccagttgcaaagaagggtctacgcattctatcaatggatggtggtggcatgaagggccttgcaacagttcaaatgcttaaacagatagagcaaggaactgggaaacgcatacatgaaatgtttgatctcatatgtggtacgtccactggtggcatgcttgcaatggctcttgggatcaagcagatgactttggatcagtgtgaagaaatatacacaaaacttggaaaacttgtatttgctgaacctatcccaaaggatgaagctgctacgtggaaggagaagcttgatcaacttttcaaaagttcgtcacaaagttttagagtggttgtacatgggtccaagcacagcgcagatcaattcgagaggttactaaaggaaatgtgtgccgatgaagatggtgaccttctaattgaatctgctgtaaaaggcattccaaaggtttttgctgtatccactttagtcagtgtcatgcctgctcaaccgtatatattccgaaactatcagtatcctcctggcactctggaggtatcaccaggaatggcagaaagtccatcaattagtgcaattggtactgctgtttctggtgcgccagttggtattaaacgtggtgccttcatggggagctgcaagcatcgtgtgtgggaagcgataagagcatcatctgcagcaccatattatttggatgatttctctgttgatgccaatcgttggcaagatggagctattgtagccaacaatcctacgatctttgccattagagaagcacaacttttgtggccagatacacgaatagattgtctagtttcgataggatgtggctcagttccaactaagtggatgaacgatgtggtatggaattagatgaaactgatcctgctatctggcttaagttggaagctgcaactgatgagtacattcagaagaattttctggctttcaagaatctttgtgagcttctggtcccaaggtaccaagaggaagaaaagtcatctgatatttacaaatccctttcattttcaaggctgacatcactaaatcaaggtttcagcgaaagtaatcctaccttaggatggaggcgtgtggttttacttgtcgaggcttcctttagtcctgatttcgggaagaaaataaatcatgcacgctcccttgaatctttctgctcccagaatggtattaggttagctctaatgaatagtgcttctgggtttgggaaaccagccactgcacttcctaccccgataacttctcccttgtttactggaagtttcccatctagtccacttctatatagtccagatggcactcaacggatcggtcgaattgacctagttccaccacttagtttggatggccacccaactacaaagtcctcaccaccaacatcaccattgaagtcaaggcagccatcagcacatgttcggtcattgtatgataaactgcagaatatgcctcaagttggtgtaatacacctggctcttcaaaatgattcaaccggttcagtattgagttggcagaatgatgtatttgtggttgctgaacccggagaacttgcagacagatttctgcaatctgtcaaaactagcttgtcaaccttgttgcgtgggcgtaatagaaagggtgcatattccttgtccaagatttcatgtttatctgagctggttgctgaatgtccatcttttgaaatcggtgggatacaccaccgctatataggtcgacaaacacaagtaatggaagataaccaagaaattggcgcatatatgtttaggaggacagtgcctgctgttcacatggcacctgaagatgttcgatggatggttggagcatggagggagagaatcattgtatgcagcggtaagtatggcctcgctcatggcctggtgaaggcattcatggattgtggcgccaaagcagtcatctcatcgtccatcgagcctccggattcccagacaatagtctatcatgggatggatgtcaatggaagcctagagaatgggaagtttgtcatcggggatgaagaagccgatgaatcggaacctgaacctgttagccctgtaagtgactgggaggacagcgacgtggagaaaggtggcaaccatgacatggatgatgaggagtacctggctcagttcatgtgcctgatgtacgataaattgttccgtgagggtgtgactgtggatacagctctgcagcaagctctccgctcgcatcccaagttaaagtacagctgccacttacctcacgttttgtagttagggacattgacaaaccatacaggagtatagcaaaacgggcatggacaacaggaaatgaataaggattgggtggattcatagtggggttatagaggtttatatcgtgttcgttgtgcaggcgtagtgacagagggtacccccttactgaatctttgggcgagaaagcctatgtaaacctgtgtgctcatgagcagagtagttaagctgacgaataaaagcatgatgaagggcattgtaatctggatgtgcatttttgtttcagctaggagaatggacattcgcaatgttttggtgtctcatgacgttcagttgctagcttgcaggcttgcggcgtacagcctgtagttaactatcttcagagacccggtttcatgtatacactatacaggctggcaccttatgctagaaacctgaatgtgtgtactgtagaagttccccattttaccacagtttatgcgatgctggtagtggcatgaactttgctagcccatatgttctgtttaaggccccgtgctgtcttgaaacaaatctctgcattaataaacagtaaagacatcaagtgctaagctggcgattgagcggcggctctgattttcagtaatt

SEQ ID NO: 217968 - DNA, 4590 bp, Zea Mays
gcgcaggcgcaaacgcaaacgcctcccttcttccctccgttcgttccatcgtcgctccctactccggggcgccctccctcggtttcttcctcgtctcgagctctcgtctagacgtcactgtcctcgcaccgctcccttctccggcatccgagccgtagccctgccctccgcatccacaatttgatgcggagggctcggccgccatgtcgtggggcctcggctggaaacgcagctccgagatcttccacctcacgctcgactatggggactacgacgacaacgacgaccatcagccctcgtccccgtcccctccggcgtcctcttccccttccgcctcggcatcgtcgaccccggtatcctcctcctcgcccaccgccacccgcaacggcgacgtcggcttccgcatcgagctcgaatggtcggcgggggacgacgaggatcaggtcgcgctccgcctccagtcccagctcatggtcgcgctgcccccgccccacgacgccgtctccgtcgacctgatcccgagagacgacggggaggaggaagtggtgcagatcgagatgcgtgtggtcaggaggcgggaggcactgcggtccgtgcgcgtgtcgcgggctcccggatccgcgctgggcagcggcgatggcgcgggggtgctcgcgcgcctcatcagatccaacctcgcgcccgcgcctgccgtggatggccccacagccgccgcgggcgtgccagtgctcgctgatcactggcggcccgtcgccatgctcagcctctgcaactgcggaatgtcggtcaatgcccaagctccgaattttgcgtttgtttggaaatcctctagagtttcttccagaaattttgccactgcataacctcaggcatctcacacttgcaaatattagaattgaagcagtggaaagtcttaaatctgtcaatgtgcaaatagagactgagaatagttcctacttcatagcggccaggcacaaacttggtgcctttttttctcttgttttccgtttctcttcttgtcaccatcctttgctagcttctgctttggccaaaataatggaagatcgtagcaaccatattgcaattagcaaagaagaaaatgctgtcaggcagcttataagcatgataagcagtgataaccgtcatgtggttgagcaagcatgccttgctatttcatcactggcatctgatatttcttcagcaatgcagctgattaagtgtgacattatgaagcctattgaagctgtactaaagtcatctgacgaagaagaactagtatcagtattgcaagtggtagtcaccttaactttcgtttctgatcatgttgctcaaaagatgttgacgaaagatgtgttgaagtcactgaaagcactttgcggacacaagaactctgaggtgcaacgtctatctctgtttgcagttggcaatttggctttctgcttggagactcggcgcaccctcatgcattctgaaagtttgcgtgaccttttaatccgtttaactatttcacaagaacgtcgtgtcagcaaagcagctgcacgtgctttggcaatcctaggggagaatgagaacttgcgtcgagcaattagaggaaggccagttgcaaagaagggtctacgcattctatcaatggatggtggtggcatgaagggccttgcaacagttcaaatgcttaaacagatagagcaaggaactgggaaacgcatacatgaaatgtttgatctcatatgtggtacgtccactggtggcatgcttgcaatggctcttgggatcaagcagatgactttggatcagtgtgaagaaatatacacaaaacttggaaaacttgtatttgctgaacctatcccaaaggatgaagctgctacgtggaaggagaagcttgatcaacttttcaaaagttcgtcacaaagttttagagtggttgtacatgggtccaagcacagcgcagatcaattcgagaggttactaaaggaaatgtgtgccgatgaagatggtgaccttctaattgaatctgctgtaaaaggcattccaaaggtttttgctgtatccactttagtcagtgtcatgcctgctcaaccgtatatattccgaaactatcagtatcctcctggcactctggaggtatcaccaggaatggcagaaagtccatcaattagtgcaattggtactgctgtttctggtgcgccagttggtattaaacgtggtgccttcatggggagctgcaagcatcgtgtgtgggaagcgataagagcatcatctgcagcaccatattatttggatgatttctctgttgatgccaatcgttggcaagatggagctattgtagccaacaatcctacgatctttgccattagagaagcacaacttttgtggccagatacacgaatagattgtctagtttcgataggatgtggctcagttccaactaagagtcgtagaggtggatggcgctacttggacacagggcaagtgttaatagaaagtgcatgctcagtggagagagttgaagaaactttggatacactgataccaatgcttcctgaaatgcaatatttccgctttaatccagtggatgaacgatgtggtatggaattagatgaaactgatcctgctatctggcttaagttggaagctgcaactgatgagtacattcagaagaattttctggctttcaagaatctttgtgagcttctggtcccaaggtaccaagaggaagaaaagtcatctgatatttacaaatccctttcattttcaaggctgacatcactaaatcaaggtttcagcgaaagtaatcctaccttaggatggaggcgtgtggttttacttgtcgaggcttcctttagtcctgatttcgggaagaaaataaatcatgcacgctcccttgaatctttctgctcccagaatggtattaggttagctctaatgaatagtgcttctgggtttgggaaaccagccactgcacttcctaccccgataacttctcccttgtttactggaagtttcccatctagtccacttctatatagtccagatggcactcaacggatcggtcgaattgacctagttccaccacttagtttggatggccacccaactacaaagtcctcaccaccaacatcaccattgaagtcaaggcagccatcagcacatgttcggtcattgtatgataaactgcagaatatgcctcaagttggtgtaatacacctggctcttcaaaatgattcaaccggttcagtattgagttggcagaatgatgtatttgtggttgctgaacccggagaacttgcagacagatttctgcaatctgtcaaaactagcttgtcaaccttgttgcgtgggcgtaatagaaagggtgcatattccttgtccaagatttcatgtttatctgagctggttgctgaatgtccatcttttgaaatcggtgggatacaccaccgctatataggtcgacaaacacaagtaatggaagataaccaagaaattggcgcatatatgtttaggaggacagtgcctgctgttcacatggcacctgaagatgttcgatggatggttggagcatggagggagagaatcattgtatgcagcggtaagtatggcctcgctcatggcctggtgaaggcattcatggattgtggcgccaaagcagtcatctcatcgtccatcgagcctccggattcccagacaatagtctatcatgggatggatgtcaatggaagcctagagaatgggaagtttgtcatcggggatgaagaagccgatgaatcggaacctgaacctgttagccctgtaagtgactgggaggacagcgacgtggagaaaggtggcaaccatgacatggatgatgaggagtacctggctcagttcatgtgcctgatgtacgataaattgttccgtgagggtgtgactgtggatacagctctgcagcaagctctccgctcgcatcccaagttaaagtacagctgccacttacctcacgttttgtagttagggacattgacaaaccatacaggagtatagcaaaacgggcatggacaacaggaaatgaataaggattgggtggattcatagtggggttatagaggtttatatcgtgttcgttgtgcaggcgtagtgacagagggtacccccttactgaatctttgggcgagaaagcctatgtaaacctgtgtgctcatgagcagagtagttaagctgacgaataaaagcatgatgaagggcattgtaatctggatgtgcatttttgtttcagctaggagaatggacattcgcaatgttttggtgtctcatgacgttcagttgctagcttgcaggcttgcggcgtacagcctgtagttaactatcttcagagacccggtttcatgtatacactatacaggctggcaccttatgctagaaacctgaatgtgtgtactgtagaagttccccattttaccacagtttatgcgatgctggtagtggcatgaactttgctagcccatatgttctgtttaaggccccgtgctgtcttgaaacaaatctctgcattaataaacagtaaagacatcaagtgctaagctggcgattgagcggcggctctgattttcagtaatt

SEQ ID NO: 217969 - DNA, 4957 bp, Zea Mays
ggcagtatacgctgacagctgactggaggacccgatcacccgactgtacgtcgtagattttggaagctcgtaaaacccacaacgaaaagaccaaataaacccagaaattccacagagagaaaaccaaacgaaccaaacaagcgcaggcgcaaacgcaaacgcctcccttcttccctccgttcgttccatcgtcgctccctactccggggcgccctccctcggtttcttcctcgtctcgagctctcgtctagacgtcactgtcctcgcaccgctcccttctccggcatccgagccgtagccctgccctccgcatccacaatttgatgcggagggctcggccgccatgtcgtggggcctcggctggaaacgcagctccgagatcttccacctcacgctcgactatggggactacgacgacaacgacgaccatcagccctcgtccccgtcccctccggcgtcctcttccccttccgcctcggcatcgtcgaccccggtatcctcctcctcgcccaccgccacccgcaacggcgacgtcggcttccgcatcgagctcgaatggtcggcgggggacgacgaggatcaggtcgcgctccgcctccagtcccagctcatggtcgcgctgcccccgccccacgacgccgtctccgtcgacctgatcccgagagacgacggggaggaggaagtggtgcagatcgagatgcgtgtggtcaggaggcgggaggcactgcggtccgtgcgcgtgtcgcgggctcccggatccgcgctgggcagcggcgatggcgcgggggtgctcgcgcgcctcatcagatccaacctcgcgcccgcgcctgccgtggatggccccacagccgccgcgggcgtgccagtgctcgctgatcactggcggcccgtcgccatgctcagcctctgcaactgcggaatgtcggtacttccagttgagttaactcgccttccacttctcgagaagctatatcttgacaacaataaattgtcagttttgccccctgaagttggtgctttgaagaatatggaagtgctgtcagttaacaacaacatgctagtttctgtccctgtagaactgcggcaatgtgttatgctggaggaattatcattagaacataacaagcttgtccgtccactattggatttcaggtcaatgcccaagctccgaattttgcgtttgtttggaaatcctctagagtttcttccagaaattttgccactgcataacctcaggcatctcacacttgcaaatattagaattgaagcagtggaaagtcttaaatctgtcaatgtgcaaatagagactgagaatagttcctacttcatagcggccaggcacaaacttggtgcctttttttctcttgttttccgtttctcttcttgtcaccatcctttgctagcttctgctttggccaaaataatggaagatcgtagcaaccatattgcaattagcaaagaagaaaatgctgtcaggcagcttataagcatgataagcagtgataaccgtcatgtggttgagcaagcatgccttgctatttcatcactggcatctgatatttcttcagcaatgcagctgattaagtgtgacattatgaagcctattgaagctgtactaaagtcatctgacgaagaagaactagtatcagtattgcaagtggtagtcaccttaactttcgtttctgatcatgttgctcaaaagatgttgacgaaagatgtgttgaagtcactgaaagcactttgcggacacaagaactctgaggtgcaacgtctatctctgtttgcagttggcaatttggctttctgcttggagactcggcgcaccctcatgcattctgaaagtttgcgtgaccttttaatccgtttaactatttcacaagaacgtcgtgtcagcaaagcagctgcacgtgctttggcaatcctaggggagaatgagaacttgcgtcgagcaattagaggaaggccagttgcaaagaagggtctacgcattctatcaatggatggtggtggcatgaagggccttgcaacagttcaaatgcttaaacagatagagcaaggaactgggaaacgcatacatgaaatgtttgatctcatatgtggtacgtccactggtggcatgcttgcaatggctcttgggatcaagcagatgactttggatcagtgtgaagaaatatacacaaaacttggaaaacttgtatttgctgaacctatcccaaaggatgaagctgctacgtggaaggagaagcttgatcaacttttcaaaagttcgtcacaaagttttagagtggttgtacatgggtccaagcacagcgcagatcaattcgagaggttactaaaggaaatgtgtgccgatgaagatggtgaccttctaattgaatctgctgtaaaaggcattccaaaggtttttgctgtatccactttagtcagtgtcatgcctgctcaaccgtatatattccgaaactatcagtatcctcctggcactctggaggtatcaccaggaatggcagaaagtccatcaattagtgcaattggtactgctgtttctggtgcgccagttggtattaaacgtggtgccttcatggggagctgcaagcatcgtgtgtgggaagcgataagagcatcatctgcagcaccatattatttggatgatttctctgttgatgccaatcgttggcaagatggagctattgtagccaacaatcctacgatctttgccattagagaagcacaacttttgtggccagatacacgaatagattgtctagtttcgataggatgtggctcagttccaactaagagtcgtagaggtggatggcgctacttggacacagggcaagtgttaatagaaagtgcatgctcagtggagagagttgaagaaactttggatacactgataccaatgcttcctgaaatgcaatatttccgctttaatccagtggatgaacgatgtggtatggaattagatgaaactgatcctgctatctggcttaagttggaagctgcaactgatgagtacattcagaagaattttctggctttcaagaatctttgtgagcttctggtcccaaggtaccaagaggaagaaaagtcatctgatatttacaaatccctttcattttcaaggctgacatcactaaatcaaggtttcagcgaaagtaatcctaccttaggatggaggcgtgtggttttacttgtcgaggcttcctttagtcctgatttcgggaagaaaataaatcatgcacgctcccttgaatctttctgctcccagaatggtattaggttagctctaatgaatagtgcttctgggtttgggaaaccagccactgcacttcctaccccgataacttctcccttgtttactggaagtttcccatctagtccacttctatatagtccagatggcactcaacggatcggtcgaattgacctagttccaccacttagtttggatggccacccaactacaaagtcctcaccaccaacatcaccattgaagtcaaggcagccatcagcacatgttcggtcattgtatgataaactgcagaatatgcctcaagttggtgtaatacacctggctcttcaaaatgattcaaccggttcagtattgagttggcagaatgatgtatttgtggttgctgaacccggagaacttgcagacagatttctgcaatctgtcaaaactagcttgtcaaccttgttgcgtgggcgtaatagaaagggtgcatattccttgtccaagatttcatgtttatctgagctggttgctgaatgtccatcttttgaaatcggtgggatacaccaccgctatataggtcgacaaacacaagtaatggaagataaccaagaaattggcgcatatatgtttaggaggacagtgcctgctgttcacatggcacctgaagatgttcgatggatggttggagcatggagggagagaatcattgtatgcagcggtaagtatggcctcgctcatggcctggtgaaggcattcatggattgtggcgccaaagcagtcatctcatcgtccatcgagcctccggattcccagacaatagtctatcatgggatggatgtcaatggaagcctagagaatgggaagtttgtcatcggggatgaagaagccgatgaatcggaacctgaacctgttagccctgtaagtgactgggaggacagcgacgtggagaaaggtggcaaccatgacatggatgatgaggagtacctggctcagttcatgtgcctgatgtacgataaattgttccgtgagggtgtgactgtggatacagctctgcagcaagctctccgctcgcatcccaagttaaagtacagctgccacttacctcacgttttgtagttagggacattgacaaaccatacaggagtatagcaaaacgggcatggacaacaggaaatgaataaggattgggtggattcatagtggggttatagaggtttatatcgtgttcgttgtgcaggcgtagtgacagagggtacccccttactgaatctttgggcgagaaagcctatgtaaacctgtgtgctcatgagcagagtagttaagctgacgaataaaagcatgatgaagggcattgtaatctggatgtgcatttttgtttcagctaggagaatggacattcgcaatgttttggtgtctcatgacgttcagttgctagcttgcaggcttgcggcgtacagcctgtagttaactatcttcagagacccggtttcatgtatacactatacaggctggcaccttatgctagaaacctgaatgtgtgtactgtagaagttccccattttaccacagtttatgcgatgctggtagtggcatgaactttgctagcccatatgttctgtttaaggccccgtgctgtcttgaaacaaatctctgcattaataaacagtaaagacatcaagtgctaagctggcgattgagcggcggctctgattttcagtaatt

SEQ ID NO: 217970 - DNA, 3884 bp, Zea Mays
gtttccgatttcgccaaatatttataatactagtgctattatagtattccgtgctttctttgaaaactgttttttgcgcttcgtaatcgtctctgcttcgcttctccgctccgcctgtcgccaccaccaccaccaactcgccggagaactgtcccgacgactgcgcgcgcggagagctgtgggggcgcgggagagggaggtagtactgggaatggaggaggagtcgaggcttagcggcgctttctcgctccatctctagggtttggttgctagtctgccccggctgggggcgtgcgcgccggcctggagctggactggaggtagcagccagcgtccggctccccgttgcaagcattaagctgcgcggctggagtgccccccccctttggccccgcctccgcgtctttcaactctggtgaaggtgctgctgttgtggcctgcgccatggaaccgtttccccagcttgcggctgcgtccacaggttgcgtgcacgcgtcgggctccggactgtgacgccgacgaggggatctcaggcgcccaactggtccggggtgaggcgcagcgcccgcaggatgccaaccgagcagaggcgctacatgcccccggcccattttcttccggcggagtcggaatcgtcctccttccctgacgagcttcgcttgcgtcctgagttggacttttgaagcagggttgctttcctgagcatgctggcagatttgcttgttctcccctgcaaaagctcaagtgtattggcgcaacagtagtggatcagctagatattatgcagccacacaagctaatggaccagaaagtgccatttagccttgatgacaagttgttggatgttaagctgccaccatcttcctggagagaggatcaggatccagcaaaccaactcgattcttttcccaagccattggtttcacctctagaaggtagaaggggaagtgtaaatgggacccaatatgaaagtggacttttctctagctcccttccagaattttttgacaagaaaataagattaactccaaagaacagagttgttggtcatctggttggaaaagttaaccatgctgatgatgaaccatttgagttgacaaaggaaatcgaggcccaaataattgggcaacctgctccctgatgacgacgacttattgtcaagtgtttgtggtgatattgggtataataccaatgcgaataatcaggatgagattgatgatgatattttttgtactggaggtggaatggaattggaagcagatggaaatagcaaattgttaaactttaatggtggagccagtcagactaggtcaattgtccaactcaatggtgagcgatcctcgagaatcctttttgtcggaaacattgatagcaacgtcgaggattctgaattgaaattcatgtttgagcaatatggagacatgcagacacttaatgcttcttgcaaacatcatggttttgtgatggtatcttactatgatataagatcggcagaaaatgctatgagggcccttcaaagcaagccactcagatgtaggaaacttgacatacgttactcgagtccaaaggactatcctttggataaagatatcaacctgtccatggtaatagttaatcttgaagcttcgataactaatgatgacctgcaccagatatttggtgtctttggtgaaatcaaggagattcaccctacttcagataatgaccattacaaatcgatagaattttttgatgtcagagcagctgaagctgcacaatatgccttaaacaggagtgaaatttcaggaaataaaaacaaattggagcctagctgtctgggtggtactgaacgtttgatgcagcagatgtctcgtgcattggaacatgaacagtttggtgcatgtaaactcggaagcccaaacagtccttcaacatgctttggttctgtcaatatggcacccatcagatccactagcacagaaagtggaactgttcaggttttatgttctagagttcagacaccgataaaccaattccgagagggaaggaattttctggatcttccctcaactaccataagtagatcctctcctgttggaattacacctgcaggattacaaagcggccaccacgctcttgatgagcacatccattcacttggaaagatgaatgtacagaacaagggacgaatggattgtggatttcaagagagtactgctttccatcctcattctctccctgacttcaatgacagactaagaaatggcacatttacaaaggaggttgtgggcatctcagcaatcaatcttctgctcatactgaagcacttgggttttcaagaactggtagctgccctctctatggtcaccaactagcatggagtaattctaataacctacaccagcagccttcttctcccatgatatggcctagcatgggcccatttaccaataatatgccatctcgccagttgatgcaagtgcatggaatttcaagagcaccattgcgcatgcttgaaaataatatccctatgaatcaccaacatgtgggatctgccccagctgtcaatccatcaatttgggatagacgacatggatatgcaggggagatgatggaaacaccaggattccacccagggagtgctggaagcatgggtttccctggcagcacacatctgcatcagttggagaccaatggtatgtttcctcacaatggagggactttcatggacccagctatgtctcctgtgcacatgagtgctcgctctcctcagcagagggggcatattttccatcgaaggagcaatgtggctcctattccatcctctttcgattctgctggtgaacggatgcggagccgaagaaatgactcgaatgtaaatcaatctgacaacaaaaggctgtttgagcttgacattgagcgtatagtccggggcgaggactcccggactacactgatgataaagaatatcccaaacaagtacacatcaaagatgcttctggcagctattgatgaaagtcaccggggaacttatgattttatctacctgccaattgactttaagaataagtgcaatgttggttatgcattcatcaacatgatcaatcctgacaatattgttccattttataagacatttcatgggaaaaggtgggagaaattcaacagtgagaaagtggcctcacttgcttatgctagaatccaaggaaaatcagctctagttgctcatttccagaactcaagtttgatgaatgaggataaacgctgccgccctatactcttccactctgatggtccgaatgcaggagatcaagaaccattccctgtgggatcaaatgtccgttccaggcctggaaggtccaggattttgagttgggaacaaaaccaccaggacattgtgtctgatcataccaaaggtggaactccgagcagggctggtggcactccaggttacatcgccacggatactgatcatacggctgttgattgacgaacttgcgacaacacccgacattctgacaattgcaatccagttttttttttttttgaaattgcatcctctcctacctcttttttccttttgttatgttgtatctatatctacttccgcgtgatattttggcaccggaggctctagacggctgcagatttggtcgctgacaagtagcgaggagatggatgttgtgccgtcagtttctccttactttggcacagacccctcagcgggattttgttggacagtttgaccccctttcaccaggaaagatatccatatttgggggagtttccctattgctgtttggcagtgctgtcatgaacattttcctaatgctgtggatgtgaaatttcagaatgatcaaatcgaatgacggatgaatgagagccaataatatttttttacgctc

SEQ ID NO: 217971 - DNA, 3531 bp, Zea Mays
gcgagcgcttctggcccggaattctgaaccccgaagctgtagatttctgccaagtgttccatggccccggttttgttcgggacccaaatttccgcgcacttcgtcaaggtccggggtgaggcgcagcgcccgcaggatgccaaccgagcagaggcgctacatgcccccggcccattttcttccggcggagtcggaatcgtcctccttccctgacgagcttcgcttgcgtcctgagaggcaagttggacttttgaagcagggttgctttcctgagcatgctggcagatttgcttgttctcccctgcaaaagctcaagtgtattggcgcaacagtagtggatcagctagatattatgcagccacacaagctaatggaccagaaagtgccatttagccttgatgacaagttgttggatgttaagctgccaccatcttcctggagagaggatcaggatccagcaaaccaactcgattcttttcccaagccattggtttcacctctagaaggtagaaggggaagtgtaaatgggacccaatatgaaagtggacttttctctagctcccttccagaattttttgacaagaaaataagattaactccaaagaacagagttgttggtcatctggttggaaaagttaaccatgctgatgatgaaccatttgagttgacaaaggaaatcgaggcccaaataattgggcaacctgctccctgatgacgacgacttattgtcaagtgtttgtggtgatattgggtataataccaatgcgaataatcaggatgagattgatgatgatattttttgtactggaggtggaatggaattggaagcagatggaaatagcaaattgttaaactttaatggtggagccagtcagactaggtcaattgtccaactcaatggtgagcgatcctcgagaatcctttttgtcggaaacattgatagcaacgtcgaggattctgaattgaaattcatgtttgagcaatatggagacatgcagacacttaatgcttcttgcaaacatcatggttttgtgatggtatcttactatgatataagatcggcagaaaatgctatgagggcccttcaaagcaagccactcagatgtaggaaacttgacatacgttactcgagtccaaaggactatcctttggataaagatatcaacctgtccatggtaatagttaatcttgaagcttcgataactaatgatgacctgcaccagatatttggtgtctttggtgaaatcaaggagattcaccctacttcagataatgaccattacaaatcgatagaattttttgatgtcagagcagctgaagctgcacaatatgccttaaacaggagtgaaatttcaggaaataaaaacaaattggagcctagctgtctgggtggtactgaacgtttgatgcagcagatgtctcgtgcattggaacatgaacagtttggtgcatgtaaactcggaagcccaaacagtccttcaacatgctttggttctgtcaatatggcacccatcagatccactagcacagaaagtggaactgttcaggttttatgttctagagttcagacaccgataaaccaattccgagagggaaggaattttctggatcttccctcaactaccataagtagatcctctcctgttggaattacacctgcaggattacaaagcggccaccacgctcttgatgagcacatccattcacttggaaagatgaatgtacagaacaagggacgaatggattgtggatttcaagagagtactgctttccatcctcattctctccctgacttcaatgacagactaagaaatggtatctcctataactgctcaatacctcccatcggtgttaagagcaatgctagagctgctgaagcaatggatgtcaggcacatttacaaaggaggttgtgggcatctcagcaatcaatcttctgctcatactgaagcacttgggttttcaagaactggtagctgccctctctatggtcaccaactagcatggagtaattctaataacctacaccagcagccttcttctcccatgatatggcctagcatgggcccatttaccaataatatgccatctcgccagttgatgcaagtgcatggaatttcaagagcaccattgcgcatgcttgaaaataatatccctatgaatcaccaacatgtgggatctgccccagctgtcaatccatcaatttgggatagacgacatggatatgcaggggagatgatggaaacaccaggattccacccagggagtgctggaagcatgggtttccctggcagcacacatctgcatcagttggagaccaatggtatgtttcctcacaatggagggactttcatggacccagctatgtctcctgtgcacatgagtgctcgctctcctcagcagagggggcatattttccatcgaaggagcaatgtggctcctattccatcctctttcgattctgctggtgaacggatgcggagccgaagaaatgactcgaatgtaaatcaatctgacaacaaaaggctgtttgagcttgacattgagcgtatagtccggggcgaggactcccggactacactgatgataaagaatatcccaaacaagtacacatcaaagatgcttctggcagctattgatgaaagtcaccggggaacttatgattttatctacctgccaattgactttaagaataagtgcaatgttggttatgcattcatcaacatgatcaatcctgacaatattgttccattttataagacatttcatgggaaaaggtgggagaaattcaacagtgagaaagtggcctcacttgcttatgctagaatccaaggaaaatcagctctagttgctcatttccagaactcaagtttgatgaatgaggataaacgctgccgccctatactcttccactctgatggtccgaatgcaggagatcaagaaccattccctgtgggatcaaatgtccgttccaggcctggaaggtccaggattttgagttgggaacaaaaccaccaggacattgtgtctgatcataccaaaggtggaactccgagcagggctggtggcactccaggttacatcgccacggatactgatcatacggctgttgattgacgaacttgcgacaacacccgacattctgacaattgcaatccagttttttttttttttgaaattgcatcctctcctacctcttttttccttttgttatgttgtatctatatctacttccgcgtgatattttggcaccggaggctctagacggctgcagatttggtcgctgacaagtagcgaggagatggatgttgtgccgtcagtttctccttactttggcacagacccctcagcgggattttgttggacagtttgaccccctttcaccaggaaagatatccatatttgggggagtttccctattgctgtttggcagtgctgtcatgaacattttcctaatgctgtggatgtgaaatttcagaatgatcaaatcgaatgacggatgaatgagagccaataatatttttttacgctc

SEQ ID NO: 217972 - DNA, 3235 bp, Zea Mays
gaaactactgtttgaatccgttcttcaacttagaggtttcctccgcaaagatctattcccactagttgaaacctgaaatcatagaggcaagttggacttttgaagcagggttgctttcctgagcatgctggcagatttgcttgttctcccctgcaaaagctcaagtgtattggcgcaacagtagtggatcagctagatattatgcagccacacaagctaatggaccagaaagtgccatttagccttgatgacaagttgttggatgttaagctgccaccatcttcctggagagaggatcaggatccagcaaaccaactcgattcttttcccaagccattggtttcacctctagaaggtagaaggggaagtgtaaatgggacccaatatgaaagtggacttttctctagctcccttccagaattttttgacaagaaaataagattaactccaaagaacagagttgttggtcatctggttggaaaagttaaccatgctgatgatgaaccatttgagttgacaaaggaaatcgaggcccaaataattgggcaacctgctccctgatgacgacgacttattgtcaagtgtttgtggtgatattgggtataataccaatgcgaataatcaggatgagattgatgatgatattttttgtactggaggtggaatggaattggaagcagatggaaatagcaaattgttaaactttaatggtggagccagtcagactaggtcaattgtccaactcaatggtgagcgatcctcgagaatcctttttgtcggaaacattgatagcaacgtcgaggattctgaattgaaattcatgtttgagcaatatggagacatgcagacacttaatgcttcttgcaaacatcatggttttgtgatggtatcttactatgatataagatcggcagaaaatgctatgagggcccttcaaagcaagccactcagatgtaggaaacttgacatacgttactcgagtccaaaggactatcctttggataaagatatcaacctgtccatggtaatagttaatcttgaagcttcgataactaatgatgacctgcaccagatatttggtgtctttggtgaaatcaaggagattcaccctacttcagataatgaccattacaaatcgatagaattttttgatgtcagagcagctgaagctgcacaatatgccttaaacaggagtgaaatttcaggaaataaaaacaaattggagcctagctgtctgggtggtactgaacgtttgatgcagcagatgtctcgtgcattggaacatgaacagtttggtgcatgtaaactcggaagcccaaacagtccttcaacatgctttggttctgtcaatatggcacccatcagatccactagcacagaaagtggaactgttcaggttttatgttctagagttcagacaccgataaaccaattccgagagggaaggaattttctggatcttccctcaactaccataagtagatcctctcctgttggaattacacctgcaggattacaaagcggccaccacgctcttgatgagcacatccattcacttggaaagatgaatgtacagaacaagggacgaatggattgtggatttcaagagagtactgctttccatcctcattctctccctgacttcaatgacagactaagaaatggcacatttacaaaggaggttgtgggcatctcagcaatcaatcttctgctcatactgaagcacttgggttttcaagaactggtagctgccctctctatggtcaccaactagcatggagtaattctaataacctacaccagcagccttcttctcccatgatatggcctagcatgggcccatttaccaataatatgccatctcgccagttgatgcaagtgcatggaatttcaagagcaccattgcgcatgcttgaaaataatatccctatgaatcaccaacatgtgggatctgccccagctgtcaatccatcaatttgggatagacgacatggatatgcaggggagatgatggaaacaccaggattccacccagggagtgctggaagcatgggtttccctggcagcacacatctgcatcagttggagaccaatggtatgtttcctcacaatggagggactttcatggacccagctatgtctcctgtgcacatgagtgctcgctctcctcagcagagggggcatattttccatcgaaggagcaatgtggctcctattccatcctctttcgattctgctggtgaacggatgcggagccgaagaaatgactcgaatgtaaatcaatctgacaacaaaaggctgtttgagcttgacattgagcgtatagtccggggcgaggactcccggactacactgatgataaagaatatcccaaacaagtacacatcaaagatgcttctggcagctattgatgaaagtcaccggggaacttatgattttatctacctgccaattgactttaagacatttcatgggaaaaggtgggagaaattcaacagtgagaaagtggcctcacttgcttatgctagaatccaaggaaaatcagctctagttgctcatttccagaactcaagtttgatgaatgaggataaacgctgccgccctatactcttccactctgatggtccgaatgcaggagatcaagaaccattccctgtgggatcaaatgtccgttccaggcctggaaggtccaggattttgagttgggaacaaaaccaccaggacattgtgtctgatcataccaaaggtggaactccgagcagggctggtggcactccaggttacatcgccacggatactgatcatacggctgttgattgacgaacttgcgacaacacccgacattctgacaattgcaatccagttttttttttttttgaaattgcatcctctcctacctcttttttccttttgttatgttgtatctatatctacttccgcgtgatattttggcaccggaggctctagacggctgcagatttggtcgctgacaagtagcgaggagatggatgttgtgccgtcagtttctccttactttggcacagacccctcagcgggattttgttggacagtttgaccccctttcaccaggaaagatatccatatttgggggagtttccctattgctgtttggcagtgctgtcatgaacattttcctaatgctgtggatgtgaaatttcagaatgatcaaatcgaatgacggatgaatgagagccaataatatttttttacgctc

SEQ ID NO: 217973 - DNA, 3269 bp, Zea Mays
tttgaatccgttcttcaacttagaggtttcctccgcaaagatctattcccactagttgaaacctgaaatcatagaggcaagttggacttttgaagcagggttgctttcctgagcatgctggcagatttgcttgttctcccctgcaaaagctcaagtgtattggcgcaacagtagtggatcagctagatattatgcagccacacaagctaatggaccagaaagtgccatttagccttgatgacaagttgttggatgttaagctgccaccatcttcctggagagaggatcaggatccagcaaaccaactcgattcttttcccaagccattggtttcacctctagaaggtagaaggggaagtgtaaatgggacccaatatgaaagtggacttttctctagctcccttccagaattttttgacaagaaaataagattaactccaaagaacagagttgttggtcatctggttggaaaagttaaccatgctgatgatgaaccatttgagttgacaaaggaaatcgaggcccaaataattgggcaacctgctccctgatgacgacgacttattgtcaagtgtttgtggtgatattgggtataataccaatgcgaataatcaggatgagattgatgatgatattttttgtactggaggtggaatggaattggaagcagatggaaatagcaaattgttaaactttaatggtggagccagtcagactaggtcaattgtccaactcaatggtgagcgatcctcgagaatcctttttgtcggaaacattgatagcaacgtcgaggattctgaattgaaattcatgtttgagcaatatggagacatgcagacacttaatgcttcttgcaaacatcatggttttgtgatggtatcttactatgatataagatcggcagaaaatgctatgagggcccttcaaagcaagccactcagatgtaggaaacttgacatacgttactcgagtccaaaggactatcctttggataaagatatcaacctgtccatggtaatagttaatcttgaagcttcgataactaatgatgacctgcaccagatatttggtgtctttggtgaaatcaaggagattcaccctacttcagataatgaccattacaaatcgatagaattttttgatgtcagagcagctgaagctgcacaatatgccttaaacaggagtgaaatttcaggaaataaaaacaaattggagcctagctgtctgggtggtactgaacgtttgatgcagcagatgtctcgtgcattggaacatgaacagtttggtgcatgtaaactcggaagcccaaacagtccttcaacatgctttgatccactagcacagaaagtggaactgttcaggttttatgttctagagttcagacaccgataaaccaattccgagagggaaggaattttctggatcttccctcaactaccataagtagatcctctcctgttggaattacacctgcaggattacaaagcggccaccacgctcttgatgagcacatccattcacttggaaagatgaatgtacagaacaagggacgaatggattgtggatttcaagagagtactgctttccatcctcattctctccctgacttcaatgacagactaagaaatggcacatttacaaaggaggttgtgggcatctcagcaatcaatcttctgctcatactgaagcacttgggttttcaagaactggtagctgccctctctatggtcaccaactagcatggagtaattctaataacctacaccagcagccttcttctcccatgatatggcctagcatgggcccatttaccaataatatgccatctcgccagttgatgcaagtgcatggaatttcaagagcaccattgcgcatgcttgaaaataatatccctatgaatcaccaacatgtgggatctgccccagctgtcaatccatcaatttgggatagacgacatggatatgcaggggagatgatggaaacaccaggattccacccagggagtgctggaagcatgggtttccctggcagcacacatctgcatcagttggagaccaatggtatgtttcctcacaatggagggactttcatggacccagctatgtctcctgtgcacatgagtgctcgctctcctcagcagagggggcatattttccatcgaaggagcaatgtggctcctattccatcctctttcgattctgctggtgaacggatgcggagccgaagaaatgactcgaatgtaaatcaatctgacaacaaaaggctgtttgagcttgacattgagcgtatagtccggggcgaggactcccggactacactgatgataaagaatatcccaaacaagtacacatcaaagatgcttctggcagctattgatgaaagtcaccggggaacttatgattttatctacctgccaattgactttaagaataagtgcaatgttggttatgcattcatcaacatgatcaatcctgacaatattgttccattttataagacatttcatgggaaaaggtgggagaaattcaacagtgagaaagtggcctcacttgcttatgctagaatccaaggaaaatcagctctagttgctcatttccagaactcaagtttgatgaatgaggataaacgctgccgccctatactcttccactctgatggtccgaatgcaggagatcaagaaccattccctgtgggatcaaatgtccgttccaggcctggaaggtccaggattttgagttgggaacaaaaccaccaggacattgtgtctgatcataccaaaggtggaactccgagcagggctggtggcactccaggttacatcgccacggatactgatcatacggctgttgattgacgaacttgcgacaacacccgacattctgacaattgcaatccagttttttttttttttgaaattgcatcctctcctacctcttttttccttttgttatgttgtatctatatctacttccgcgtgatattttggcaccggaggctctagacggctgcagatttggtcgctgacaagtagcgaggagatggatgttgtgccgtcagtttctccttactttggcacagacccctcagcgggattttgttggacagtttgaccccctttcaccaggaaagatatccatatttgggggagtttccctattgctgtttggcagtgctgtcatgaacattttcctaatgctgtggatgtgaaatttcagaatgatcaaatcgaatgacggatgaatgagagccaataatatttttttacgctc

SEQ ID NO: 217974 - DNA, 3193 bp, Zea Mays
cttcaacttagaggtttcctccgcaaagatctattcccactagttgaaacctgaaatcatagaggcaagttggacttttgaagcagggttgctttcctgagcatgctggcagatttgcttgttctcccctgcaaaagctcaagtgtattggcgcaacagtagtggatcagctagatattatgcagccacacaagctaatggaccagaaagtgccatttagccttgatgacaagttgttggatgttaagctgccaccatcttcctggagagaggatcaggatccagcaaaccaactcgattcttttcccaagccattggtttcacctctagaaggtagaaggggaagtgtaaatgggacccaatatgaaagtggacttttctctagctcccttccagaattttttgacaagaaaataagattaactccaaagaacagagttgttggtcatctggttggaaaagttaaccatgctgatgatgaaccatttgagttgacaaaggaaatcgaggcccaaataattgggcaacctgctccctgatgacgacgacttattgtcaagtgtttgtggtgatattgggtataataccaatgcgaataatcaggatgagattgatgatgatattttttgtactggaggtggaatggaattggaagcagatggaaatagcaaattgttaaactttaatggtggagccagtcagactaggtcaattgtccaactcaatggtgagcgatcctcgagaatcctttttgtcggaaacattgatagcaacgtcgaggattctgaattgaaattcatgtttgagcaatatggagacatgcagacacttaatgcttcttgcaaacatcatggttttgtgatggtatcttactatgatataagatcggcagaaaatgctatgagggcccttcaaagcaagccactcagatgtaggaaacttgacatacgttactcgagtccaaaggactatcctttggataaagatatcaacctgtccatggtaatagttaatcttgaagcttcgataactaatgatgacctgcaccagatatttggtgtctttggtgaaatcaaggaggagtgaaatttcaggaaataaaaacaaattggagcctagctgtctgggtggtactgaacgtttgatgcagcagatgtctcgtgcattggaacatgaacagtttggtgcatgtaaactcggaagcccaaacagtccttcaacatgctttggttctgtcaatatggcacccatcagatccactagcacagaaagtggaactgttcaggttttatgttctagagttcagacaccgataaaccaattccgagagggaaggaattttctggatcttccctcaactaccataagtagatcctctcctgttggaattacacctgcaggattacaaagcggccaccacgctcttgatgagcacatccattcacttggaaagatgaatgtacagaacaagggacgaatggattgtggatttcaagagagtactgctttccatcctcattctctccctgacttcaatgacagactaagaaatggcacatttacaaaggaggttgtgggcatctcagcaatcaatcttctgctcatactgaagcacttgggttttcaagaactggtagctgccctctctatggtcaccaactagcatggagtaattctaataacctacaccagcagccttcttctcccatgatatggcctagcatgggcccatttaccaataatatgccatctcgccagttgatgcaagtgcatggaatttcaagagcaccattgcgcatgcttgaaaataatatccctatgaatcaccaacatgtgggatctgccccagctgtcaatccatcaatttgggatagacgacatggatatgcaggggagatgatggaaacaccaggattccacccagggagtgctggaagcatgggtttccctggcagcacacatctgcatcagttggagaccaatggtatgtttcctcacaatggagggactttcatggacccagctatgtctcctgtgcacatgagtgctcgctctcctcagcagagggggcatattttccatcgaaggagcaatgtggctcctattccatcctctttcgattctgctggtgaacggatgcggagccgaagaaatgactcgaatgtaaatcaatctgacaacaaaaggctgtttgagcttgacattgagcgtatagtccggggcgaggactcccggactacactgatgataaagaatatcccaaacaagtacacatcaaagatgcttctggcagctattgatgaaagtcaccggggaacttatgattttatctacctgccaattgactttaagaataagtgcaatgttggttatgcattcatcaacatgatcaatcctgacaatattgttccattttataagacatttcatgggaaaaggtgggagaaattcaacagtgagaaagtggcctcacttgcttatgctagaatccaaggaaaatcagctctagttgctcatttccagaactcaagtttgatgaatgaggataaacgctgccgccctatactcttccactctgatggtccgaatgcaggagatcaagaaccattccctgtgggatcaaatgtccgttccaggcctggaaggtccaggattttgagttgggaacaaaaccaccaggacattgtgtctgatcataccaaaggtggaactccgagcagggctggtggcactccaggttacatcgccacggatactgatcatacggctgttgattgacgaacttgcgacaacacccgacattctgacaattgcaatccagttttttttttttttgaaattgcatcctctcctacctcttttttccttttgttatgttgtatctatatctacttccgcgtgatattttggcaccggaggctctagacggctgcagatttggtcgctgacaagtagcgaggagatggatgttgtgccgtcagtttctccttactttggcacagacccctcagcgggattttgttggacagtttgaccccctttcaccaggaaagatatccatatttgggggagtttccctattgctgtttggcagtgctgtcatgaacattttcctaatgctgtggatgtgaaatttcagaatgatcaaatcgaatgacggatgaatgagagccaataatatttttttacgctc

SEQ ID NO: 217975 - DNA, 3273 bp, Zea Mays
aacttagaggtttcctccgcaaagatctattcccactagttgaaacctgaaatcatagaggcaagttggacttttgaagcagggttgctttcctgagcatgctggcagatttgcttgttctcccctgcaaaagctcaagtgtattggcgcaacagtagtggatcagctagatattatgcagccacacaagctaatggaccagaaagtgccatttagccttgatgacaagttgttggatgttaagctgccaccatcttcctggagagaggatcaggatccagcaaaccaactcgattcttttcccaagccattggtttcacctctagaagtaagattaactccaaagaacagagttgttggtcatctggttggaaaagttaaccatgctgatgatgaaccatttgagttgacaaaggaaatcgaggcccaaataattgggcaacctgctccctgatgacgacgacttattgtcaagtgtttgtggtgatattgggtataataccaatgcgaataatcaggatgagattgatgatgatattttttgtactggaggtggaatggaattggaagcagatggaaatagcaaattgttaaactttaatggtggagccagtcagactaggtcaattgtccaactcaatggtgagcgatcctcgagaatcctttttgtcggaaacattgatagcaacgtcgaggattctgaattgaaattcatgtttgagcaatatggagacatgcagacacttaatgcttcttgcaaacatcatggttttgtgatggtatcttactatgatataagatcggcagaaaatgctatgagggcccttcaaagcaagccactcagatgtaggaaacttgacatacgttactcgagtccaaaggactatcctttggataaagatatcaacctgtccatggtaatagttaatcttgaagcttcgataactaatgatgacctgcaccagatatttggtgtctttggtgaaatcaaggagattcaccctacttcagataatgaccattacaaatcgatagaattttttgatgtcagagcagctgaagctgcacaatatgccttaaacaggagtgaaatttcaggaaataaaaacaaattggagcctagctgtctgggtggtactgaacgtttgatgcagcagatgtctcgtgcattggaacatgaacagtttggtgcatgtaaactcggaagcccaaacagtccttcaacatgctttggttctgtcaatatggcacccatcagatccactagcacagaaagtggaactgttcaggttttatgttctagagttcagacaccgataaaccaattccgagagggaaggaattttctggatcttccctcaactaccataagtagatcctctcctgttggaattacacctgcaggattacaaagcggccaccacgctcttgatgagcacatccattcacttggaaagatgaatgtacagaacaagggacgaatggattgtggatttcaagagagtactgctttccatcctcattctctccctgacttcaatgacagactaagaaatggtatctcctataactgctcaatacctcccatcggtgttaagagcaatgctagagctgctgaagcaatggatgtcaggcacatttacaaaggaggttgtgggcatctcagcaatcaatcttctgctcatactgaagcacttgggttttcaagaactggtagctgccctctctatggtcaccaactagcatggagtaattctaataacctacaccagcagccttcttctcccatgatatggcctagcatgggcccatttaccaataatatgccatctcgccagttgatgcaagtgcatggaatttcaagagcaccattgcgcatgcttgaaaataatatccctatgaatcaccaacatgtgggatctgccccagctgtcaatccatcaatttgggatagacgacatggatatgcaggggagatgatggaaacaccaggattccacccagggagtgctggaagcatgggtttccctggcagcacacatctgcatcagttggagaccaatggtatgtttcctcacaatggagggactttcatggacccagctatgtctcctgtgcacatgagtgctcgctctcctcagcagagggggcatattttccatcgaaggagcaatgtggctcctattccatcctctttcgattctgctggtgaacggatgcggagccgaagaaatgactcgaatgtaaatcaatctgacaacaaaaggctgtttgagcttgacattgagcgtatagtccggggcgaggactcccggactacactgatgataaagaatatcccaaacaagtacacatcaaagatgcttctggcagctattgatgaaagtcaccggggaacttatgattttatctacctgccaattgactttaagaataagtgcaatgttggttatgcattcatcaacatgatcaatcctgacaatattgttccattttataagacatttcatgggaaaaggtgggagaaattcaacagtgagaaagtggcctcacttgcttatgctagaatccaaggaaaatcagctctagttgctcatttccagaactcaagtttgatgaatgaggataaacgctgccgccctatactcttccactctgatggtccgaatgcaggagatcaagaaccattccctgtgggatcaaatgtccgttccaggcctggaaggtccaggattttgagttgggaacaaaaccaccaggacattgtgtctgatcataccaaaggtggaactccgagcagggctggtggcactccaggttacatcgccacggatactgatcatacggctgttgattgacgaacttgcgacaacacccgacattctgacaattgcaatccagttttttttttttttgaaattgcatcctctcctacctcttttttccttttgttatgttgtatctatatctacttccgcgtgatattttggcaccggaggctctagacggctgcagatttggtcgctgacaagtagcgaggagatggatgttgtgccgtcagtttctccttactttggcacagacccctcagcgggattttgttggacagtttgaccccctttcaccaggaaagatatccatatttgggggagtttccctattgctgtttggcagtgctgtcatgaacattttcctaatgctgtggatgtgaaatttcagaatgatcaaatcgaatgacggatgaatgagagccaataatatttttttacgctc

SEQ ID NO: 217976 - DNA, 3150 bp, Zea Mays
cactagttgaaacctgaaatcatagaggcaagttggacttttgaagcagggttgctttcctgagcatgctggcagatttgcttgttctcccctgcaaaagctcaagtgtattggcgcaacagtagtggatcagctagatattatgcagccacacaagctaatggaccagaaagtgccatttagccttgatgacaagttgttggatgttaagctgccaccatcttcctggagagaggatcaggatccagcaaaccaactcgattcttttcccaagccattggtttcacctctagaaggtagaaggggaagtgtaaatgggacccaatatgaaagtggacttttctctagctcccttccagaattttttgacaagaaaataagattaactccaaagaacagagttgttggtcatctggttggaaaagttaaccatgctgatgatgaaccatttgagttgacaaaggaaatcgaggcccaaataattgggcaacctgctccctgatgacgacgacttattgtcaagtgtttgtggtgatattgggtataataccaatgcgaataatcaggatgagattgatgatgatattttttgtactggaggtggaatggaattggaagcagatggaaatagcaaattgttaaactttaatggtggagccagtcagactaggtcaattgtccaactcaatggtgagcgatcctcgagaatcctttttgtcggaaacattgatagcaacgtcgaggattctgaattgaaattcatgtttgagcaatatggagacatgcagacacttaatgcttcttgcaaacatcatggttttgtgatggtatcttactatgatataagatcggcagaaaatgctatgagggcccttcaaagcaagccactcagatgtaggaaacttgacatacgttactcgagtccaaaggactatcctttggataaagatatcaacctgtccatggtaatagttaatcttgaagcttcgataactaatgatgacctgcaccagatatttggtgtctttggtgaaatcaaggagattcaccctacttcagataatgaccattacaaatcgatagaattttttgatgtcagagcagctgaagctgcacaatatgccttaaacaggagtgaaatttcaggaaataaaaacaaattggagcctagctgtctgggtggtactgaacgtttgatgcagcagatgtctcgtgcattggaacatgaacagtttggtgcatgtaaactcggaagcccaaacagtccttcaacatgctttggattacaaagcggccaccacgctcttgatgagcacatccattcacttggaaagatgaatgtacagaacaagggacgaatggattgtggatttcaagagagtactgctttccatcctcattctctccctgacttcaatgacagactaagaaatggtatctcctataactgctcaatacctcccatcggtgttaagagcaatgctagagctgctgaagcaatggatgtcaggcacatttacaaaggaggttgtgggcatctcagcaatcaatcttctgctcatactgaagcacttgggttttcaagaactggtagctgccctctctatggtcaccaactagcatggagtaattctaataacctacaccagcagccttcttctcccatgatatggcctagcatgggcccatttaccaataatatgccatctcgccagttgatgcaagtgcatggaatttcaagagcaccattgcgcatgcttgaaaataatatccctatgaatcaccaacatgtgggatctgccccagctgtcaatccatcaatttgggatagacgacatggatatgcaggggagatgatggaaacaccaggattccacccagggagtgctggaagcatgggtttccctggcagcacacatctgcatcagttggagaccaatggtatgtttcctcacaatggagggactttcatggacccagctatgtctcctgtgcacatgagtgctcgctctcctcagcagagggggcatattttccatcgaaggagcaatgtggctcctattccatcctctttcgattctgctggtgaacggatgcggagccgaagaaatgactcgaatgtaaatcaatctgacaacaaaaggctgtttgagcttgacattgagcgtatagtccggggcgaggactcccggactacactgatgataaagaatatcccaaacaagtacacatcaaagatgcttctggcagctattgatgaaagtcaccggggaacttatgattttatctacctgccaattgactttaagaataagtgcaatgttggttatgcattcatcaacatgatcaatcctgacaatattgttccattttataagacatttcatgggaaaaggtgggagaaattcaacagtgagaaagtggcctcacttgcttatgctagaatccaaggaaaatcagctctagttgctcatttccagaactcaagtttgatgaatgaggataaacgctgccgccctatactcttccactctgatggtccgaatgcaggagatcaagaaccattccctgtgggatcaaatgtccgttccaggcctggaaggtccaggattttgagttgggaacaaaaccaccaggacattgtgtctgatcataccaaaggtggaactccgagcagggctggtggcactccaggttacatcgccacggatactgatcatacggctgttgattgacgaacttgcgacaacacccgacattctgacaattgcaatccagttttttttttttttgaaattgcatcctctcctacctcttttttccttttgttatgttgtatctatatctacttccgcgtgatattttggcaccggaggctctagacggctgcagatttggtcgctgacaagtagcgaggagatggatgttgtgccgtcagtttctccttactttggcacagacccctcagcgggattttgttggacagtttgaccccctttcaccaggaaagatatccatatttgggggagtttccctattgctgtttggcagtgctgtcatgaacattttcctaatgctgtggatgtgaaatttcagaatgatcaaatcgaatgacggatgaatgagagccaataatatttttttacgctc

SEQ ID NO: 217977 - DNA, 4787 bp, Zea Mays
gaagacgaggactggcacgcggccgcgacggccggaaggacgcagcagccgccgccgccgctcacccacgacgacaaccgcagcttccttcggatgctgcgtgacatgaaagagaagctgggcgtggacgcgcccaaggtggaggtgcgcttcgagaggcttaccgtggaggcggacgtccgcgtcggccgccgcgccgtcccgacgctgctcaacgccgccatcaacgccgcccaggagttagcaacgtctgttcatatgtgtgttacaaggaaaagacctatcagaatcataaatgaagtaagcggggtgattcgaccatcaaggtgaatgtgtccccttatctttcattagctaccagagtacagatatagatcccaacatcccgttccatctcaaacctaagcgcttgatcaaatttagaagataagttactcaaatgcacaagtatggatttgatagtctgttattagtcaacagttttgacttaaggcaaacttagatcccttatatttcagacggacagagtaatttatcaagatatattgactttatatgccattctgtcaggatgacactacttctaggagcacctggttccgggaagacgactctactaaaagcgttagcaggaaaattggattcttctttgaaggtatactgagctacctacatgctaccaaaagtatttgtcaacaagaaaaggcaaaaatagataataatgtctagcattaactaacagaaatatatattttctaacggccaacgattgccaacagttcaaaggaaaagtcatgtacaatggagaagaaattaattactcaacaccacagacacagtacctgcgtacttatgttagccagtatgatcttcaccatgctgagatgacagtaagagagacaatcgacttctcttccaagatgcttggaaccaataatgaatttggtaagatatactcttgcgtatagggagctatttatttattttaaagatcattggaatgtgctgcgatttataacaaggcaaatacttaagaatgaagtgtctacacaatactcaagctaaatcaatttttccatggcatctatactgacacaaatttcctgtttgaatggaatgacaaactcagatatgctaggagaagcaataagaagaaaaaagggtgtcatcaatgaagtggatcaagatcttgattcattcattaagctcttctctcaggccaccacctttggagaaggaagcaacctcacaacaaactatattatcaagatacttggcctgtctgagtgtgctgataccctagtaggagacgagatgagaagaggaatatctggagggcaaaagaagagagccacagttggggagatgctagttggtctggcaagatgcttctttatggatgatatatcaacaggtcttgatagctccacggcatttgagatcatgaagtttctccaacagatggcccatttgatggatctcacaatggggcaaattgtgtatcatggtccccgagaaaatgctacggacttgttcgaaaccatgggattcaaatgccctgacaggaagaatgtagccgatttccttcaagaggtaatcaaccatcaaatgtgcctaactgccaataataaatagctaaactttgagataattaatacatcagatcctcaaaatgtatagtgttcaaggctaactttgagataattaatacatcagatccacaaaattaagcaggcaatagatgacttacaattctatgcatgagcataaaatgtcattgttctgcaatacacgtgcttttgcaaaataatgtaacaagttttctccaattggccactgaccaggtaacctctaagatggaccaaaagcaatactggactggtgaccaaaataagtatcagtaccatacaattgaaaattttgcagaatccttccgcacgtcatatcttcctcttctagtagaagacaaactgtgcagtccaaacaatactggaaagaataaggaggtaaaagtgaatgcaggtcgccgagtatccagatggaatattttcaaagcatgcttttcaagggaactgctgctgctgaaaagaaactctccggtccatatattcaagaccattcagataactgttatggctttggtgatctccacacttttcctgagaacaaaaatgagtcacaattctgtacttgatgccaacaagtacatgggagcactttttatggctgtcgtcatagtaaacttcaatgggatgactgaaattgcaatgacgataaagcggcttcccaccttctacaagcaaagagagctactagcattgccaggatgggcactcctttgttcagtttaccttattagcatcccaatatcgcttgttgagacaggcctttggacaggcttaacctactatgtgattggatatgcaccttctgctatcaggttcatccagcactttctggtactttttgccatgcatcaaatgtcaatgggcttgtatcgcttcttagcggccataggaaggacgcaagtgatggccaacatgctagggactgcagctcttattgcaatctacatacttggaggattcgtcatatcaaaagatgatctccaaccatggttgcgctggggatattggacgtccccgttcacctatgcacagaatgcgatcgccctcaatgagttccatgacaaaagatggaattcagaattttattataacggtgcaaacaccgtcggtgaagctatcctcaagatcagagggctgctcatggagtggcactggtactggatttgtgtcaccattttgtttggatactcgctggtcttcaacatcttcagcatatttgcattggagttcatcggctgtatgtataccaatctatcacaaacctcctaaatattgcatttaaacgaaaaaataattatctgcttgtttactgcttgcagctccacacaagcatcaagttaacatcaagaccacaaaagtgaatttcgtgtacaataggcagatggctgaaaatggcaattcatcaaatgatcaagttatcctcccatttcgacccctctccctggtctttgatcatattcaatattttgttgacatgcctaaggtaatatcttgttcacttattaagatcttacctggtagcttcattaattcctatcacatactgaagacaagaatacaaatatcccaccaggagatgacaaaaaatggagcaacgaagaaaaagcttcagctgctacaagatgtcagtggtgcttttaggccaggagtactaacagctctgatggggataactggcgctggcaagacaacattgctcgatgtattagctggaaggaaaactgggggatatatcgaagggactattaagatagcaggctatcctaagaagcaggatacattctcaaggatctcaggttactgtgaacagagtgacattcattcccctaatctcactgtttatgagtcactgaaattttctgcatggcttcgtctaccttcaaatgttaaacctcatcaaagagacatgttcatcaaagaagtcatgaaccttattgagatcactgacttgaaaaatgccatggtaggcatcccaggagcaactggcctgtcagccgagcagcggaaaagactaacaatagctgtggagctagtggccagtccctccattatattcatggatgagccaaccaccggcttggatgctcgtgctgcagctattgtcatgagaacagtacgaaagacggttgacactggacgaactgttgtctgcacaattcatcaaccaagcattgagatttttgaatcttttgatgagcttctgcttatgaaaagaggtggccagctcatatacagtggttcggccataccaggcgttcctaaaataaacaagggacaaaacccagcaacatggatgttagacatcagttcacacataacagaatatgaaattggagtggactatgcagaaatttattgcaattcctccctgtacagcaaggatgagcaagacgtattaaacatacttggaatcgtatatggatcggcattgttcctgggtttcatgaattgcagcatcctacagccggttgtggcaatggagagagttgtgctctaccgtgaaaaggcggcaggcatgtactccaccatggcatacgctatcgctcaggtgtcggtggaattaccttacatgttggtgcaagtgatgatcttctcatcaatcgtgtacccaatgattgggttccaggtgacagcgagcaaattcttctggttcttcctataccaggtgatgagcttcatgtactacactctatacgggatgatgacggtggccctgacccccaacatcgagatcgccatggggctgtcgttcctcatctttatcttttggaacgtcttctctggcttcataatcgtgagagagatgatgcctgtgtggtggcggtgggtgtactgggcggatccggcggcatggacggtttatgggctaatgttctcacagctcgcagacaggacggagcagatcctggtgccggggctcggggagcagacggtgcgtgagttcctagaggggtacctgggcctgcaggatcgctactttgtgctggtgacctgcctccatcttgccatcattggcctcttcgtctttctcttcttcctcgccatcaagcacctaaacttccagcgcagtttttgaatcttgacagctacatagaatggaattgctgcaattctcagttccgtgtgatgtttacatgagcaagacatatcatagtaaag

SEQ ID NO: 217978 - DNA, 2171 bp, Zea Mays
gagaaagaaaattttagggtttagggtaccaagttggaactcgcactcgtgtagcccaaaactaatggaattagccgacgcaaggcaagctttccgcttcctatttcggattgggatcatcagcggctgtagcgtggacccgacgggggtgtccggaccacatccctatttcatcttggtaccccgtccgtctccgatttcagaagcacggcgggctccccggcagcctctaccgagcagaaagctgagttctaccccagaaccgaggcatggaggacgaagaaaacatcgagggagaactgttgctcgtggagtcacaactccacgacatccaaggacaaattaaaacattactcgatcgccaagaggagttgtatgaacgccaggcacagttgaaggctttgctcgaagcatctaaattgaccagaaatacaacaattaacacatcttcagttgctccggaagattggtctgggagcttcccatgggatctggaggctgacgataccaggttcaatatatttggcatttcctcctaccgatcaaatcaacgagaagtaagtttataggagactggtctgacattttaaactctttcactcctcttgagtactgcaggtgaaaactcaaattgcaagtttttattttttaatcagtaccattcggagttgctataaatttcattagcgaacaacaaatggttgcagttattttcttcttaacgctgttttgatcttgtttggatacagggactaaactttagtctctatcatgttggatgtttaaatgctagttagaagtattaaatatattctaattataaaactaattacataggttaggactaaacgaaatctattaaacctaattagtacatgattcgctcatatgacactatagtaaacatttgctagtcatggattaattaggtttaataaatttttctcgtcgtttagtcttcatctctgtaatttgttttataattaggatatatttaatatccgtaattgacattcaaacgttcgatgtgacacatactaaactttagtcaggggaaccaaacacccccttcgtattgtacagtttcctcttgtacagtttcctctcattttgcacccattaaacatattctgcttatagataattaatgcagtcatgagtggaagagatgttctggtcataatggcagctggtggagggaagagtctatgttaccagctcccagctgtacttcgtgatggaattgcactggttgtcagtcctttactttcccttattcaggaccaggtcatgggactgtcagctttaggtataccagcatacatgctaacttcaactaccaacaaggaagttgagaagttcatctataagacacttgataaaggagaaggagaactaaagatattatatgtgacacctgaaaagatctcaaaaagtaaaaggttcatgtctaagctcgagaaatgccatcatgccggtcgtctttctctgattgcaatagatgaggctcactgctgtagccaatggggtcatgattttcgtcctgactacaagaatcttggcattttgaaaattcaatttcccagtgttccaatgatagctttaactgcaactgcaacaagtaaggtccaaatggatttaatggagatgctccacatcccgagatgcatcaagtttgtcagcacagttaacaggcccaaccttttttataaggtgtctgagaaatcgccagttggaaaggttgtcattgatgagatcacaaagtttataagtgaatcatacccaaataatgagtctggaattatatactgcttttcaaggaaggaatgtgaacaggttgcaaaagaactgcgcgaaaggggtatttcagcagattattatcatgcagacatggatatcgttaatcgtgagaaaattcatatgcgacagtggtataatgactcaacatgttgatttatccgacaaatttctatgctgaatgcaatccatgaagcacatggaaaggaaaaccgtcagggtcaccgaataaaatgagaatcacagcatgactggttaggttcacttaaaaagccttacccggtattcgttctagccaaaaagggtatctaggagtgagttcagtagttaacctcataagggaagggtgttggttggttaagtttagattgtgg

SEQ ID NO: 217979 - DNA, 1511 bp, Zea Mays
cctgtccccgcgcttgagctgttcccgcttggttgcatggaacagtagttaaccagcttgagagagaggaggaagacggtcggagcgcagcggcggcggtggaaggaccttgttacgaccgacgaccgcagcatcgtgcacaccatggaagcgcggccgcggctgctcttagtcgtcgtcgcgatcttcgtgtcgatatctgccgtcgcggcagccgtcataaacgtcaagaactacggggcccatggcaatggtgtcaatgacgacaccaagccactgatggcggcgtggaaggcagcgtgcggatcagccggcgcggcgacgatggtggtgccgccggggacgtactacatcggcccagtgcagttccacggcccctgcaaggcctccaccttgaccttccagctgcaggggacgctcaaggccgccacggacctgaaacggttcggcaacgactggattgagttcgggtgggtgaacgggctcaccgtcgccggtggcgtcattgacggccagggcgccgcctcgtggcctttcaacaagtgtcccattcgcaaggactgcaaagtgctgccaacaagcgtgttgttcgtgaacaaccagaacacggtggtgcgcgacgtcacgtccgtgaaccccaagttcttccacatggcgctgctgtcggtgaagaacatccggatgagcgggctcaagatcagcgcgccctccaacagccccaacacggatggcatccacatcgagcgcagcagcgggatatccatcatggacacgcacatcagcacgggcgacgactgcatctccatcggccagggcaacgacaacgtggacgtggcccgcgtgcagtgcggcccaggccacggcatgagcgtcggcagcttgggtcgctactccggcgagggagacgtcacacgggtgcacgtccgcgacatgaccttcacgggcaccatgaacggcgttcgcatcaagacatgggagaactccccttccaagagcaacgccgcgcacatggtcttcgagaacatggtcatgagggacgtgcagaaccccattatcatcgatcagaagtactgcccctactacaactgcgagcacaagggcacggcgacgacgccggtggcggtgttgctccggtgcggtgtgccgtgcaggggtctggtgctgcaggacgtggaccttaggtacaaggggcagggtggtacatcggccaagtgcgagaacgccaaggccaagtaccttggctaccagtttcccaaaccctgcccctaggtgccggtgcttgtccggccgtattttagctcatctctgtccactctctggtgtccggtgaagtgggctttgattcttcggtcgtgttctctagacgttttttcttcttctcttctgggttttcctgtttgctttcttgattagctgaatttcgcggtataatgtcagttgcttgtatcagtgaatttgtgaataccagtcattgttgaatatatatatggggaataatgccttgataaatc

SEQ ID NO: 217980 - DNA, 947 bp, Zea Mays
cgccattgtttaatcagcctcttctccgctgatggtaagtcatcagaaggggccggctcttcggaagacgacgacatggatccgagcggccgcgagaacgagccgccggagatcgacccgcgcgcggaggacaaggagctcaagtaccagctcctgaagaagtacagcgggtacctgagcagcctgaggcaggagttctccaagaagaagaagaaagggaagctgccgaaggaggccaggcagaagctcctccactggtgggagctgcactacaagtggccgtacccttcggagacggagaagatcgcgctggcagaggcgactggcctggaccagaagcagatcaacaactggttcatcaaccagcggaagcggcactggaagccgtcggaggacatgccattcgtcatgatggaaggcttccacccgcagaccgcggccgcgctgtacctggacggcggcgcgttcatggccgacggcatgacgacgtatcgcctcggttcatgaaccgccgtggacaatccaaaaccaccgggcgaccgtgtcggagtgtttctgcgtaccaggaagatgcgatgcgagggacgttgttaattatgggggggttttgctgccggtttccgcgctgatcgccaccaaccaaggcggggtgcggtcagtgatctagtggcgctcgatctaagttgtctgtggcttctgtaatgttgttgttgatttcggcttgtaatctagctaggtattgtttcgaacttgagttgaaagtctgcaagtatcctgcagtgcagtgcaggcgattaattgggcgagcatgcagtcgcttgcctgtttgtatgattgattgcatggtttggatcggtggaacatgcatggtaaggcgtggcctgtctgaatcaacaaagatggctttgtcttttacggtgaactgcagaatgaacagacgattagct

SEQ ID NO: 217981 - DNA, 889 bp, Zea Mays
atggctgctacgacgcctagggccacaggggaaggggcaggcgtgctgttgtgggtgggagatgcacactcgcgcctcggccaggggcgactgcggtggctaggtccgcacttgactcaacgagactgtggtggaggttgtgtctgggccagccacggctatggggttttcagtgttattgttgaagaaggcgaggatggcgccatcggggtggagagggcctacacggctacgcctaagggagccacatttgtgcattttgatttccatcgaatatgtggtcatattcactttgagcgcctttctcaactctatgatcaaattgaggattatctcaagaagcacaagtacttcctgttgaccgataaagacgagaaaattgcgcagcaaactggcactgtcagaacaaattgtgttgattgtttagatcgtactaatgtaactcagagcatgattgggagaaaacttctggaaagtcagctccaagaaataggggtttttgttgctaatgatactgtcagtgactttccagattttgatgcaaattacaaaattctgtgggccaatcatggagatgcaataagcactcaatactctggaactcctgctttgaaaggagactttgttcgatatggcaagagaactactcagggaattttaaatgatttatggaatgcacttgctagatactacctgaacaactttgcagatggtactaaacaggacggcttgcctctgtgcttccttcttgtcgtgatatctatcgactccactacctcctcctccaccatcggcgccatgtgccatctccttgctgggttgactgttgtcgctccctacatgacaatcgatgtccgctctcatctccatgacgtcctcaagctaggag

SEQ ID NO: 217982 - DNA, 2407 bp, Zea Mays
tgccgctcacctgggctcatcttccagccgccctctccgcccagcagcagagcacaccatcctctcaactcggatccccaagccctcgcctccagctcttgccacggcatccatcccctgctcggacctccacccggccgcgtcctcgccggtggccagcgccgctgcatcgcccttcctagcgtcggccttggcaccgcttccccgagtgccccagtcgagctcgcccatcctctgctctagccctttctccacgccgtcgctgagctcgcccctcccctcagccatggacacgacgacctgcagcccttcttggtggccaagcccatcttcctgctcgcgccccctctttttccacctctgcgcgtatcagctcgtccaacccccatggtgtttcctccctctcggctcccttgctccctccccatggcgttccccctggatgttggtgatctgttccccacggtgcaggcaaatgttctttccctccctgcagcagcaccttggtggttgtcaagcagcacgtcgcgcttgcgcagcctcggtcacgacgttgttcaccccgctaaccattggtgtcatacctcatgtgtcatgtgttcgccgaaatgcctaaacatgtagtctgtcgtcgtcgtatccacagtcaattttagtcatgtaaatctgcacttttaggagactcggagttcgtcctagatgcaaaagtaccttgctggttatggagaggtcagctgaaggttggaggatcaggtggtgttttggaggtagatttaaacattttggaggtggattgaagctttgactggactgaagtttattgcatctggagaacatcatttggctctacctctattttattggggaacttggtacagccatccatggtatcagaatatgatctgggaggagaaggggacctgttcaaagctccagaagccatcatcgaggaaccgctgctcctgaactgtctgtctgattctgttaatttgttgctgtgtaggctgggcttgtgccgagcttgaatcctcttgtgaaggagtttctcaatgctgctgatgacaagcggaaggaagtcctctctaaaatagaagaggatgttgctaagctcagcggttctgcagccaactaagaagctacaagtgaatgccgaggagagcagcgatgacttggctaacccaccgaaggtagaggagaagcttggtgctgtccctcatggcctgtccaccgactctgaggttgcccagagggaagccgagtctatctctaggaagactctcaggagctcagccgagaagtttgagttccaagctgaggtttccagactcatggacatcatcatcaactcactctacagcaacaaggatatcttcctgagggagctcatatctaatgcctctgatgtatgtactacatactgacccctgtgtttgttctgcattgtggatgctcgaaattaactgggtgttctacatgtctgtaggctggataagattaggttcctttcccttactgataaggaagttctgggtgaaggggacactgcaaagcttgagattcaggtagatttcaatgttgagagctgttttttttctgttgggcaacgctttagaatcagacctcaaggcatctggtctatgcttatgcagattaagttggacaaagagaagaaaatcctctccattcgggataggggtattggaacaggagctgctcgagtctcttgtcgaagctgatacggtgagttctctgtgatgattggtctcagtattgtactgggtttcagtgtgtctgctcagagtcttagcccgttgaatccatagtttgtctgtttttcaccaggaactgtataggatgttctctaaccaatggccaggccaatgctcgttgtggtttgaaacctttgttcgatatatagtgtgaactctgaattgatgcagagaaggcaggaaagagctaaaaagatggaagaaaagaaagtgtatctgcaactatacgaagcaatggaggcgttggtcaagatcaatctggagaccaacaagatcatggacttcatcaagtttgacgtcggcaacgtggtcatggtgactggcgggaggaacaccggacgtgtaggagtcatcaagaacagggagaagcacaagggcagctttgagaccatccacgtgctgcttggagctttttgctatgtctagttttctcctatttgttgtacatgaaaacatagaatagaattcaaatttggtggtcgcaaaagtgtggagactttaattcatacaaagttaggcttaacattagtgcaaacagttgtattttagtttagatttagagtacacttatgtatgcattgtttgacaatgtttatttatgatatattgaatggtacttaattatattatattaatta

SEQ ID NO: 217983 - DNA, 2395 bp, Zea Mays
tgccgctcacctgggctcatcttccagccgccctctccgcccagcagcagagcacaccatcctctcaactcggatccccaagccctcgcctccagctcttgccacggcatccatcccctgctcggacctccacccggccgcgtcctcgccggtggccagcgccgctgcatcgcccttcctagcgtcggccttggcaccgcttccccgagtgccccagtcgagctcgcccatcctctgctctagccctttctccacgccgtcgctgagctcgcccctcccctcagccatggacacgacgacctgcagcccttcttggtggccaagcccatcttcctgctcgcgccccctctttttccacctctgcgcgtatcagctcgtccaacccccatggtgtttcctccctctcggctcccttgctccctccccatggcgttccccctggatgttggtgatctgttccccacggtgcaggcaaatgttctttccctccctgcagcagcaccttggtggttgtcaagcagcacgtcgcgcttgcgcagcctcggtcacgacgttgttcaccccgctaaccattggtgtcatacctcatgtgtcatgtgttcgccgaaatgcctaaacatgtagtctgtcgtcgtcgtatccacagtcaattttagtcatggcttccatttgttagtaaatctgcacttttaggagactcggagttcgtcctagatgcaaaagtaccttgctggttatggagaggtcagctgaagcaggatcaggtggtgttttggaggtagatttaaacattttggaggtggattgaagctttgactggactgaagtttattgcatctggagaacatcatttggctctacctctattttattggggaacttggtacagccatccatggtatcagaatatgatctgggaggagaaggggacctgttcaaagctccagaagccatcatcgaggaaccgctgctcctgaactgtctgtctgattctgttaatttgttgctgtgtaggctgggcttgtgccgagcttgaatcctcttgtgaaggagtttctcaatgctgctgatgacaagcggaaggaagtcctctctaaaatagaagaggatgttgctaagctcagcggttctgcagccaactaagaagctacaagtgaatgccgaggagagcagcgatgacttggctaacccaccgaaggtagaggagaagcttggtgctgtccctcatggcctgtccaccgactctgaggttgcccagagggaagccgagtctatctctaggaagactctcaggagctcagccgagaagtttgagttccaagctgaggtttccagactcatggacatcatcatcaactcactctacagcaacaaggatatcttcctgagggagctcatatctaatgcctctgatgtatgtactacatactgacccctgtgtttgttctgcattgtggatgctcgaaattaactgggtgttctacatgtctgtaggctggataagattaggttcctttcccttactgataaggaagttctgggtgaaggggacactgcaaagcttgagattcaggtagatttcaatgttgagagctgttttttttctgttgggcaacgctttagaatcagacctcaaggcatctggtctatgcttatgcagattaagttggacaaagagaagaaaatcctctccattcgggataggggtattggtatgaccaaggaagatcttattaagaaccttggaacgattgctaaatctggcacttcaggaacaggagctgctcgagtctcttgtcgaagctgatacgtttgtctgtttttcaccaggaactgtataggatgttctctaaccaatggccaggccaatgctcgttgtggtttgaaacctttgttcgatatatagtgtgaactctgaattgatgcagagaaggcaggaaagagctaaaaagatggaagaaaagaaagtgtatctgcaactatacgaagcaatggaggcgttggtcaagatcaatctggagaccaacaagatcatggacttcatcaagtttgacgtcggcaacgtggtcatggtgactggcgggaggaacaccggacgtgtaggagtcatcaagaacagggagaagcacaagggcagctttgagaccatccacgtgctgcttggagctttttgctatgtctagttttctcctatttgttgtacatgaaaacatagaatagaattcaaatttggtggtcgcaaaagtgtggagactttaattcatacaaagttaggcttaacattagtgcaaacagttgtattttagtttagatttagagtacacttatgtatgcattgtttgacaatgtttatttatgatatattgaatggtacttaattatattatattaatta

SEQ ID NO: 217984 - DNA, 2101 bp, Zea Mays
catcttcaagccagccgtctccttatccctgcgatgccgctcacctgggctcatcttccagccgccctctccgcccagcagcagagcacaccatcctctcaactcggatccccaagccctcgcctccagctcttgccacggcatccatcccctgctcggacctccacccggccgcgtcctcgccggtggccagcgccgctgcatcgcccttcctagcgtcggccttggcaccgcttccccgagtgccccagtcgagctcgcccatcctctgctctagccctttctccacgccgtcgctgagctcgcccctcccctcagccatggacacgacgacctgcagcccttcttggtggccaagcccatcttcctgctcgcgccccctctttttccacctctgcgcgtatcagctcgtccaacccccatggtgtttcctccctctcggctcccttgctccctccccatggcgttccccctggatgttggtgatctgttccccacggtgcaggcaaatgttctttccctccctgcagcagcaccttggtggttgtcaagcagcacgtcgcgcttgcgcagcctcggtcacgacgttgttcaccccggggaacttggtacagccatccatggtatcagaatatgatctgggaggagaaggggacctgttcaaagctccagaagccatcatcgaggaaccgctgctcctgaactgtctgtctgattctgttaatttgttgctgtgtaggctgggcttgtgccgagcttgaatcctcttgtgaaggagtttctcaatgctgctgatgacaagcggaaggaagtcctctctaaaatagaagaggatgttgctaagctcagcggttctgcagccaactaagaagctacaagtgaatgccgaggagagcagcgatgacttggctaacccaccgaaggtagaggagaagcttggtgctgtccctcatggcctgtccaccgactctgaggttgcccagagggaagccgagtctatctctaggaagactctcaggagctcagccgagaagtttgagttccaagctgaggtttccagactcatggacatcatcatcaactcactctacagcaacaaggatatcttcctgagggagctcatatctaatgcctctgatgtatgtactacatactgacccctgtgtttgttctgcattgtggatgctcgaaattaactgggtgttctacatgtctgtaggctggataagattaggttcctttcccttactgataaggaagttctgggtgaaggggacactgcaaagcttgagattcaggtagatttcaatgttgagagctgttttttttctgttgggcaacgctttagaatcagacctcaaggcatctggtctatgcttatgcagattaagttggacaaagagaagaaaatcctctccattcgggataggggtattggtatgaccaaggaagatcttattaagaaccttggaacgattgctaaatctggcacttcaggaacaggagctgctcgagtctcttgtcgaagctgatacggaactgtataggatgttctctaaccaatggccaggccaatgctcgttgtggtttgaaacctttgttcgatatatagtgtgaactctgaattgatgcagagaaggcaggaaagagctaaaaagatggaagaaaagaaagtgtatctgcaactatacgaagcaatggaggcgttggtcaagatcaatctggagaccaacaagatcatggacttcatcaagtttgacgtcggcaacgtggtcatggtgactggcgggaggaacaccggacgtgtaggagtcatcaagaacagggagaagcacaagggcagctttgagaccatccacgtgctgcttggagctttttgctatgtctagttttctcctatttgttgtacatgaaaacatagaatagaattcaaatttggtggtcgcaaaagtgtggagactttaattcatacaaagttaggcttaacattagtgcaaacagttgtattttagtttagatttagagtacacttatgtatgcattgtttgacaatgtttatttatgatatattgaatggtacttaattatattatattaatta

SEQ ID NO: 217985 - DNA, 2566 bp, Zea Mays
tccatcttcaagccagccgtctccttatccctgcgatgccgctcacctgggctcatcttccagccgccctctccgcccagcagcagagcacaccatcctctcaactcggatccccaagccctcgcctccagctcttgccacggcatccatcccctgctcggacctccacccggccgcgtcctcgccggtggccagcgccgctgcatcgcccttcctagcgtcggccttggcaccgcttccccgagtgccccagtcgagctcgcccatcctctgctctagccctttctccacgccgtcgctgagctcgcccctcccctcagccatggacacgacgacctgcagcccttcttggtggccaagcccatcttcctgctcgcgccccctctttttccacctctgcgcgtatcagctcgtccaacccccatggtgtttcctccctctcggctcccttgctccctccccatggcgttccccctggatgttggtgatctgttccccacggtgcaggcaaatgttctttccctccctgcagcagcaccttggtggttgtcaagcagcacgtcgcgcttgcgcagcctcggtcacgacgttgttcaccccgctaaccattggtgtcatacctcatgtgtcatgtgttcgccgaaatgcctaaacatgtagtctgtcgtcgtcgtatccacagtcaattttagtcatgtaaatctgcacttttaggagactcggagttcgtcctagatgcaaaagtaccttgctggttatggagaggtcagctgaaggatcaggtggtgttttggaggtagatttaaacattttggaggtggattgaagctttgactggactgaagtttattgcatctggagaacatcatttggctctacctctattttattggggaacttggtacagccatccatggtatcagaatatgatctgggaggagaaggggacctgttcaaagctccagaagccatcatcgaggaaccgctgctcctgaactgtctgtctgattctgttaatttgttgctgtgtaggctgggcttgtgccgagcttgaatcctcttgtgaaggagtttctcaatgctgctgatgacaagcggaaggaagtcctctctaaaatagaagaggatgttgctaagctcagcggttctgcagccaactaagaagctacaagtgaatgccgaggagagcagcgatgacttggctaacccaccgaaggtagaggagaagcttggtgctgtccctcatggcctgtccaccgactctgaggttgcccagagggaagccgagtctatctctaggaagactctcaggagctcagccgagaagtttgagttccaagctgaggtttccagactcatggacatcatcatcaactcactctacagcaacaaggatatcttcctgagggagctcatatctaatgcctctgatgtatgtactacatactgacccctgtgtttgttctgcattgtggatgctcgaaattaactgggtgttctacatgtctgtaggctggataagattaggttcctttcccttactgataaggaagttctgggtgaaggggacactgcaaagcttgagattcaggtagatttcaatgttgagagctgttttttttctgttgggcaacgctttagaatcagacctcaaggcatctggtctatgcttatgcagattaagttggacaaagagaagaaaatcctctccattcgggataggggtattggtatgaccaaggaagatcttattaagaaccttggaacgattgctaaatctggcacttcaggtacttcaggtactgccttttcatctttccagctgattactgcactcataatatttgtttatgagtgcaggaacaggagctgctcgagtctcttgtcgaagctgatacggtgagttctctgtgatgattggtctcagtattgtactgggtttcagtgtgtctgctcagagtcttagcccgttgaatccatagtttgtctgtttttcaccaggaactgtataggatgttctctaaccaatggccaggccaatgctcgttgtggtttgaaacctttgttcgatatatagtgtgaactctgaattgatgcagagaaggcaggaaagagctaaaaagatggaagaaaagaaagtgtatctgcaactatacgaagcaatggaggcgttggtcaagatcaatctggagaccaacaagatcatggacttcatcaagtttgacgtcggcaacgtggtcatggtgactggcgggaggaacaccggacgtgtaggagtcatcaagaacagggagaagcacaagggcagctttgagaccatccacgtgctgcttggagctttttgctatgtctagttttctcctatttgttgtacatgaaaacatagaatagaattcaaatttggtggtcgcaaaagtgtggagactttaattcatacaaagttaggcttaacattagtgcaaacagttgtattttagtttagatttagagtacacttatgtatgcattgtttgacaatgtttatttatgatatattgaatggtacttaattatattatattaatta

SEQ ID NO: 217986 - DNA, 2336 bp, Zea Mays
cccagccaaatcattcacgtatccatcttcaagccagccgtctccttatccctgcgatgccgctcacctgggctcatcttccagccgccctctccgcccagcagcagagcacaccatcctctcaactcggatccccaagccctcgcctccagctcttgccacggcatccatcccctgctcggacctccacccggccgcgtcctcgccggtggccagcgccgctgcatcgcccttcctagcgtcggccttggcaccgcttccccgagtgccccagtcgagctcgcccatcctctgctctagccctttctccacgccgtcgctgagctcgcccctcccctcagccatggacacgacgacctgcagcccttcttggtggccaagcccatcttcctgctcgcgccccctctttttccacctctgcgcgtatcagctcgtccaacccccatggtgtttcctccctctcggctcccttgctccctccccatggcgttccccctggatgttggtgatctgttccccacggtgcaggcaaatgttctttccctccctgcagcagcaccttggtggttgtcaagcagcacgtcgcgcttgcgcagcctcggtcacgacgttgttcaccccgctaaccattggtgtcatacctcatgtgtcatgtgttcgccgaaatgcctaaacatgtagtctgtcgtcgtcgtatccacagtcaattttagtcatggcttccatttgttagtaaatctgcacttttaggagactcggagttcgtcctagatgcaaaagtaccttgctggttatggagaggtcagctgaaggatcaggtggtgttttggaggtagatttaaacattttggaggtggattgaagctttgactggactgaagtttattgcatctggagaacatcatttggctctacctctattttattggggaacttggtacagccatccatggtatcagaatatgatctgggaggagaaggggacctgttcaaagctccagaagccatcatcgaggaaccgctgctcctgaactgtctgtctgattctgttaatttgttgctgtgtaggctgggcttgtgccgagcttgaatcctcttgtgaaggagtttctcaatgctgctgatgacaagcggaaggaagtcctctctaaaatagaagaggatgttgctaagctcagcggttctgcagccaactaagaagctacaagtgaatgccgaggagagcagcgatgacttggctaacccaccgaaggtagaggagaagcttggtgctgtccctcatggcctgtccaccgactctgaggttgcccagagggaagccgagtctatctctaggaagactctcaggagctcagccgagaagtttgagttccaagctgaggtttccagactcatggacatcatcatcaactcactctacagcaacaaggatatcttcctgagggagctcatatctaatgcctctgatgtatgtactacatactgacccctgtgtttgttctgcattgtggatgctcgaaattaactgggtgttctacatgtctgtaggctggataagattaggttcctttcccttactgataaggaagttctgggtgaaggggacactgcaaagcttgagattcaggtagatttcaatgttgagagctgttttttttctgttgggcaacgctttagaatcagacctcaaggcatctggtctatgcttatgcagattaagttggacaaagagaagaaaatcctctccattcgggataggggtattggtatgaccaaggaagatcttattaagaaccttggaacgattgctaaatctggcacttcaggtacttcaggaacaggagctgctcgagtctcttgtcgaagctgatacggcaggaaagagctaaaaagatggaagaaaagaaagtgtatctgcaactatacgaagcaatggaggcgttggtcaagatcaatctggagaccaacaagatcatggacttcatcaagtttgacgtcggcaacgtggtcatggtgactggcgggaggaacaccggacgtgtaggagtcatcaagaacagggagaagcacaagggcagctttgagaccatccacgtgctgcttggagctttttgctatgtctagttttctcctatttgttgtacatgaaaacatagaatagaattcaaatttggtggtcgcaaaagtgtggagactttaattcatacaaagttaggcttaacattagtgcaaacagttgtattttagtttagatttagagtacacttatgtatgcattgtttgacaatgtttatttatgatatattgaatggtacttaattatattatattaatta

SEQ ID NO: 217987 - DNA, 2602 bp, Zea Mays
cccagccaaatcattcacgtatccatcttcaagccagccgtctccttatccctgcgatgccgctcacctgggctcatcttccagccgccctctccgcccagcagcagagcacaccatcctctcaactcggatccccaagccctcgcctccagctcttgccacggcatccatcccctgctcggacctccacccggccgcgtcctcgccggtggccagcgccgctgcatcgcccttcctagcgtcggccttggcaccgcttccccgagtgccccagtcgagctcgcccatcctctgctctagccctttctccacgccgtcgctgagctcgcccctcccctcagccatggacacgacgacctgcagcccttcttggtggccaagcccatcttcctgctcgcgccccctctttttccacctctgcgcgtatcagctcgtccaacccccatggtgtttcctccctctcggctcccttgctccctccccatggcgttccccctggatgttggtgatctgttccccacggtgcaggcaaatgttctttccctccctgcagcagcaccttggtggttgtcaagcagcacgtcgcgcttgcgcagcctcggtcacgacgttgttcaccccgctaaccattggtgtcatacctcatgtgtcatgtgttcgccgaaatgcctaaacatgtagtctgtcgtcgtcgtatccacagtcaattttagtcatggcttccatttgttagtaaatctgcacttttaggagactcggagttcgtcctagatgcaaaagtaccttgctggttatggagaggtcagctgaaggatcaggtggtgttttggaggtagatttaaacattttggaggtggattgaagctttgactggactgaagtttattgcatctggagaacatcatttggctctacctctattttattggggaacttggtacagccatccatggtatcagaatatgatctgggaggagaaggggacctgttcaaagctccagaagccatcatcgaggaaccgctgctcctgaactgtctgtctgattctgttaatttgttgctgtgtaggctgggcttgtgccgagcttgaatcctcttgtgaaggagtttctcaatgctgctgatgacaagcggaaggaagtcctctctaaaatagaagaggatgttgctaagctcagcggttctgcagccaactaagaagctacaagtgaatgccgaggagagcagcgatgacttggctaacccaccgaaggtagaggagaagcttggtgctgtccctcatggcctgtccaccgactctgaggttgcccagagggaagccgagtctatctctaggaagactctcaggagctcagccgagaagtttgagttccaagctgaggtttccagactcatggacatcatcatcaactcactctacagcaacaaggatatcttcctgagggagctcatatctaatgcctctgatgtatgtactacatactgacccctgtgtttgttctgcattgtggatgctcgaaattaactgggtgttctacatgtctgtaggctggataagattaggttcctttcccttactgataaggaagttctgggtgaaggggacactgcaaagcttgagattcaggtagatttcaatgttgagagctgttttttttctgttgggcaacgctttagaatcagacctcaaggcatctggtctatgcttatgcagattaagttggacaaagagaagaaaatcctctccattcgggataggggtattggtatgaccaaggaagatcttattaagaaccttggaacgattgctaaatctggcacttcaggtacttcaggtactgccttttcatctttccagctgattactgcactcataatatttgtttatgagtgcaggaacaggagctgctcgagtctcttgtcgaagctgatacggtgagttctctgtgatgattggtctcagtattgtactgggtttcagtgtgtctgctcagagtcttagcccgttgaatccatagtttgtctgtttttcaccaggaactgtataggatgttctctaaccaatggccaggccaatgctcgttgtggtttgaaacctttgttcgatatatagtgtgaactctgaattgatgcagagaaggcaggaaagagctaaaaagatggaagaaaagaaagtgtatctgcaactatacgaagcaatggaggcgttggtcaagatcaatctggagaccaacaagatcatggacttcatcaagtttgacgtcggcaacgtggtcatggtgactggcgggaggaacaccggacgtgtaggagtcatcaagaacagggagaagcacaagggcagctttgagaccatccacgtgctgcttggagctttttgctatgtctagttttctcctatttgttgtacatgaaaacatagaatagaattcaaatttggtggtcgcaaaagtgtggagactttaattcatacaaagttaggcttaacattagtgcaaacagttgtattttagtttagatttagagtacacttatgtatgcattgtttgacaatgtttatttatgatatattgaatggtacttaattatattatattaatta

SEQ ID NO: 217988 - DNA, 1126 bp, Zea Mays
gttgcaaagcattttggattctgtgccaaaagaggggttaaaggaacgaattctgattcccgtggaccgacaaggagcagctgggaaacggagcgccacaagcccacaactctcgcgcaggcttctctcccatctccgcccttcccgaagcagcacggtgcaggccgcggacccgcggtttctccacagaatcccgctccacgcacgtcgcccccgtcgccggcgaggcggctgtgctgctgcgtactcccctggttccaactctgaaccggccaccctctcctgctccgcgacctcgagtaactttttgagtaccagtgatgcaaagggacacaagctctagcgatgtttctgcttctcatgtaggacgtgtaagacgtcgcaaacatccaactgaggctaccacagatgggaatagagctaatggacagccattgcttgtcaatgatcagaacaaatataaatcaatgcttacccgtacgtattctacagtatggatgattggaggctttgcctttattatttatatgggtcatctatatatctgggctatggtggttgtgattcaaatatacatggcaagagaacttttcaatttactcagaaaatccagtgaagagaaacaactgccagggttcagggtcctgaattggcacttctttttcacggcaatgctgtacacttatgggcgctttcttagtcgtcagctggtgaatacagtgacttcagatcacttgctttataaggtcgtcagtggcctaattaagtatcagatgtttatctgctatttcctttatattgcagggtttgtatggtttattttgactctcaagaaaaagacatacaagtatcagttcaaacagtatgcctggacacacatgatacttttaacagtttttgcacagtctgctttcactgtggcaaacatatttgaagggatattctggtttcttttgcctgcttcacttattgtgatcaacgatatttttgcttatttatttgggttctttcttgggagaacaccattaatcaagttgtctccaaagaaaacttgggaaggttttattggtgcatcagtgacaactatcatctctgcgtttctgaaaaccctcagcacattttctgt

SEQ ID NO: 217989 - DNA, 1463 bp, Zea Mays
attttggattctgtgccaaaagaggggttaaaggaacgaattctgattcccgtggaccgacaaggagcagctgggaaacggagcgccacaagcccacaactctcgcgcaggcttctctcccatctccgcccttcccgaagcagcacggtgcaggccgcggacccgcggtttctccacagaatcccgctccacgcacgtcgcccccgtcgccggcgaggcggctgtgctgctgcgtactcccctggttccaactctgaaccggccaccctctcctgctccgcgacctcgagtaactttttgagtaccagtgatgcaaagggacacaagctctagcgatgtttctgcttctcatgtaggacgtgtaagacgtcgcaaacatccaactgaggctaccacagatgggaatagagctaatggacagccattgcttgtcaatgatcagaacaaatataaatcaatgcttacccgtacgtattctacagtatggatgattggaggctttgcctttattatttatatgggtcatctatatatctgggctatggtggttgtgattcaaatatacatggcaagagaacttttcaatttactcagaaaatccagtgaagagaaacaactgccagggttcagggtcctgaattggcacttctttttcacggcaatgctgtacacttatgggcgctttcttagtcgtcagctggtgaatacagtgacttcagatcacttgctttataaggtcgtcagtggcctaattaagtatcagatgtttatctgctatttcctttatattgcagggtttgtatggtttattttgactctcaagaaaaagacatacaagtatcagttcaaacagtatgcctggacacacatgatacttttaacagtttttgcacagtctgctttcactgtggcaaacatatttgaagggatattctgaacaccattaatcaagttgtctccaaagaaaacttgggaaggttttattggtgcatcagtgacaactatcatctctgcgtttctgttagcaaatgtaatgggccattcgcaatggttgacatgcccaagaaaggatctgttgactgggtggctttattgtgatcctggtccaatgtttaagccagagcattactcattgggagagtgggtgccgcattggcacaacaaggtcttgatctacacactgctcttctggacattcgtacgtaatcccgaagcctctccaaaaagctgaagaatatccaaaataatattgatatccatggctgccgctcgaaggaagatcacatcatcagcatagagttgagacctggtgctgcagtgcacgtggagcaaggggctgcagcagtccatcctgttcggccttattaatcaagaagcccaaagtatccaattatcgatgaccaagatgaacagaaaaggagacaaaggatctctctgtcggaggccacgacgatgaagaatag

SEQ ID NO: 217990 - DNA, 1443 bp, Zea Mays
attttggattctgtgccaaaagaggggttaaaggaacgaattctgattcccgtggaccgacaaggagcagctgggaaacggagcgccacaagcccacaactctcgcgcaggcttctctcccatctccgcccttcccgaagcagcacggtgcaggccgcggacccgcggtttctccacagaatcccgctccacgcacgtcgcccccgtcgccggcgaggcggctgtgctgctgcgtactcccctggttccaactctgaaccggccaccctctcctgctccgcgacctcgagtaactttttgagtaccagtgatgcaaagggacacaagctctagcgatgtttctgcttctcatgtaggacgtgtaagacgtcgcaaacatccaactgaggctaccacagatgggaatagagctaatggacagccattgcttgtcaatgatcagaacaaatataaatcaatgcttacccgtacgtattctacagtatggatgattggaggctttgcctttattatttatatgggtcatctatatatctgggctatggtggttgtgattcaaatatacatggcaagagaacttttcaatttactcagaaaatccagtgaagagaaacaactgccagggttcagggtcctgaattggcacttctttttcacggcaatgctgtacacttatgggcgctttcttagtcgtcagctggtgaatacagtgacttcagatcacttgctttataaggtcgtcagtggcctaattaagtatcagatgtttatctgctatttcctttatattgcagggtttgtatggtttattttgactctcaagaaaaagacatacaagtatcagttcaaacagtatgcctggacacacatgatacttttaacagtttttgcacagtctgctttcactgtggcaaacatatttgaagggatattctggtttcttttgcctgcttcacttattgtgatcaacgatatttttgcttatttatttgggttctttcttgggagaacaccattaatcaagttgtctccaaagaaaacttgggaaggttttattggtgcatcagtgacaactatcatctctgcgtttctgttagcaaatgtaatgggccattcgcaatggttgacatgcccaagaaaggatctgttgactgggtggctttattgtgatcctggtccaatgtttaagccagagcattactcattgggagagtgggtgccgcattggttcccatggaaagaactagctattatgcctgtgcagtggcatgctttagccctaggtttatttgcatcaataatagcaccatttggaggattttttgcgagtggcttcaagagggcttttaaaattaaggattttggtgacagcatacctgggcatggtggaattactgacagaatggattgtcaaggaaaaaatcctgtcaagctgaagaaacc

SEQ ID NO: 217991 - DNA, 1332 bp, Zea Mays
gttgcgccgatcattagcgttgtatagacgcgggaagccgcgaacaaggcaacgccagtagacttgacaaaatacttccgtgccacataactttttgagtaccagtgatgcaaagggacacaagctctagcgatgtttctgcttctcatgtaggacgtgtaagacgtcgcaaacatccaactgaggctaccacagatgggaatagagctaatggacagccattgcttgtcaatgatcagaacaaatataaatcaatgcttacccgtacgtattctacagtatggatgattggaggctttgcctttattatttatatgggtcatctatatatctgggctatggtggttgtgattcaaatatacatggcaagagaacttttcaatttactcagaaaatccagtgaagagaaacaactgccagggttcagggtcctgaattggcacttctttttcacggcaatgctgtacacttatgggcgctttcttagtcgtcagctggtgaatacagtgacttcagatcacttgctttataaggtcgtcagtggcctaattaagtatcagatgtttatctgctatttcctttatattgcagggtttgtatggtttattttgactctcaagaaaaagacatacaagtatcagttcaaacagtatgcctggacacacatgatacttttaacagtttttgcacagtctgctttcactgtggcaaacatatttgaagggatattctggtttcttttgcctgcttcacttattgtgatcaacgatatttttgcttatttatttgggttctttcttgggagaacaccattaatcaagttgtctccaaagaaaacttgggaaggttttattggtgcatcagtgacaactatcatctctgcgtttctgttagcaaatgtaatgggccattcgcaatggttgacatgcccaagaaaggatctgttgactgggtggctttattgtgatcctggtccaatgtttaagccagagcattactcattgggagagtgggtgccgcattggcacaacaaggtcttgatctacacactgctcttctggacattcgtacgtaatcccgaagcctctccaaaaagctgaagaatatccaaaataatattgatatccatggctgccgctcgaaggaagatcacatcatcagcatagagttgagacctggtgctgcagtgcacgtggagcaaggggctgcagcagtccatcctgttcggccttattaatcaagaagcccaaagtatccaattatcgatgaccaagatgaacagaaaaggagacaaaggatctctctgtcggaggccacgacgatgaagaatag

SEQ ID NO: 217992 - DNA, 2077 bp, Zea Mays
atgaaactctgctgatatatagatgattttgaatttcatgaactagaggaggtcctgcaatattatcctcatggttaccatggggttgacaaggaaggaaggcctgtctacattgagttgcttgggaaagttgaacccaacaagcttatacaaatcacaacagttgagcgctacattaagtatcatgtacaagagtttgagagagctttccgggagaaattccctgcatgctcaatttctgccaaaagacatatagatactacaacgacgatattggatgtccacggtgtgggctggaaaaactttagcaagattgcaagggatttggtgcgttgtatgcaaaaaatagatggtgactattatcctgagacattacatcaaatgtttattgtaaatgcgggacctggtttcaagctgatatggagcactgttaagggacttcttgaccccaaaacgtcatctaagatacatgttctaggaacaaaatatcaaagcagacttcttgaagctattgatgcaagccaattaccagagtactttggtggttcgtgcacatgttctaaccatggagggtgcctgaggtctaacaaaggcccctggagcgatccttcaatcatgaaacttgtacatagcatggagtcattgaaggaaattgggcaagtatctgatatagaagaaacagttacaggctccatgagattgcgtgctctcaagttaccagaacgaattagtgacacgtcaaatgctgaatcaggttcagatgttgatgatcttggatcccctgtggctcctgaagatgttgaatatcctagtttggccccagttcgagaggaagtacagtcttactaagttctgttatgtttttttggagatattttattatttttgtcgtatgtctatcttggaactgtgaagatttgaacttgcacattcaggctttcattagaaaatgtgttctgttccttttagctgcatgacaccatgttagcatgttttataatttgtagttaattcgttctgattctttaccctgtaggcgagggaatcaggatctacaacatatagtggttcaattggcatgtctcgtatggcagataaagttgtaggatccaacgggagatacaactctactggaaatgaaactaggcaggtcaatgcagaacaaggttccctgataaatgggggtttacttgcgcccgcaggtcagcgtgccccaaatgatgctgtaggcaatgatgatgggttcttgaaatatatatcaagaagagtcgttgctatatttcttgaagtactctcttttttgcggttcttcattcgtcgacgacaacactcggaaaatgttcattcacatactgcaactgcacccagtagtctggcaaatcttcagacaattaaggaagatcgtgtaaatccttgtctggagcgtcttgatcgacttgagtcaatgtttaatcagctgagcaaaaagcctccagagcttccagaggacaaggaccgggccatacaagattcttttgacaggataaagtccattgagtttgatctgcagaagacaaagaaggtattgcatgcaacagttatcaaacaaatgcagatggcagaaaccttggaagctgtaacggagccggatcttaggcggaggaaattttgtacataatacacttacctgcagtgtacagaaacaagaaaagatggcgatttactaatgtctgctgcctggcagagaattgaactacattgctttgtacatggccgccctttgctgattatctttctcagcttactatagagatgagtgcattggcatgttagcctcaatcagggggcctcaataacaacagatagttgacctgtgataaactgacgagataacagcgtcctggaaaatcaccggacactgcccaatctattgagctaaagagttctgtattatgcatcttttgtgtttcagaacagttagtttcacccataattcgatccattttttggttggtacatgtgaacatctgattgaacttggttttcttagaatttttgcaaatggccgaaatctagtcgtgagcacgttgtttcaaca

SEQ ID NO: 217993 - DNA, 2355 bp, Zea Mays
cgggttcccatcgaaccgcatctgagtatctgaccacgtcacacgacaccaccaccagccctccccttcatcaattggagcacggcgcccgttcattcccctctgctccgctgcttgcctccggctccccaattccacgagatctccaattccaccgcgtcgtctctgcatccggaccccataccccgatcgatccctaaggcccatggttttctccgccgccgcgtcgcctctagtagccaccgctgctgactctgcttcctcctgcgtcgcccacctccgctgctgctgtcgcgttagttgctgccgttgttgaagacgcgtagctctttagggttcgcgatttctcgccgatcggttcgagaattggcacgcggtagccgcgccgctgcgcctgttcgacgacgcggaggagccgaagccggagcgcgtcggggccggagaggccgacgcggagagggatgacgaggacgggggcgaccagcacttctccctcctcgggcactccctctgcgtcaagcgcccgcgccgcgccggcaacggcggcgggggcggagagacgtcatcctgctcgtccacgtccgcggcgcttcgccctgccaagcgacaggcgacgggggagggcagcggcgcagatctggagacccgccgcgccgcggtccgcgcctggggcaatcagtcgctggcggaggccgacccggacgtgcactcgctgatggagcaggagttggaccgccaggtgcgaggcatcgagctcatagcgtcggaaaacttcgtctgccgcgcggtgctcgatgcactcggcagccacctcactaacaagtactccgagggggccccgggtgctcgctactacggcgggaatcagcacatcgacgccatcgaacggctctgccatgagcgcgctctcaccgccttcggtctcgaccctgcctgctggggcgtcaacgtgcagccctactcgtgcacgtctgccaacttggctgtctacactgggctccttcaacccaaggaccgcatcatggggctggagccaccgtcgggcggccatgttagccatggttactacacgcccagtggcaagaaggtgtcaggtgcctctattttcttcgagagcatgtcgtacaaggtgaacccacagactgggtatattgattacgacaagcttgaagaaagagcaatggatttccaccctaaaattctcatctgtggtgggagctcttaccccagagagtgggactttgcacggatgagattgattgctgataagtgtggtgcggtgcttctttgcgacatggcacatatcagtgggcttgtcgcagcaaaggaatgccgtagccctttcgactactgtgatgttgttacgtcaactactcacaagaatcttaggggccctagaggtggtataatattcttcaggaaagggaaaaatttaaggaaacgagctggatctttttctcaaggagatgagaatgaatacgacttcgaggataggataaattttggtgttttcccttcaatgcaaggagggccccataataatcatattgctggcttggctataactctgaagcagattggttacaggtggcacagataatcacttagtactttgggacctcagaactcttggcttgactggcaagatcttcgagaaggtttgcgaggcatgccacatatctgtcaacaagacaccaatatatggagataatggctcgatatcgccaggtggtgtgcggattggaacacctgcaatgactactagaggttgcttagaagaggacttcgaggtgattgcagacttcctcataagggctactcaaattgctaacaatgttctgaaagaacatggcaaagtgcaaaaggagtttctaagaggcctacagaacaataatgatgttatagaactccgaaatcaggttgaggcatttgcgtcacagtttgcgatgccaggttttgatgtatgaatgtgcatatatacgtagtcagcaattatcagattcacagcaacattgccatcctttccgttactccaatactagcaactattgctttcaactgcacaatgattagggagtttttttttatttgatggtagacggtctagatggttgattcaaacaattatgtacagcaagttgtgatgaattatgtatgcagtgaaccttggtatgacgggttcctataggagatattttcttgtcactacaacagaaccctttgttgccttttgacacctgtttgttgccgaggctgaataagctttaaccatatggtttctggctaattattagacgatgatatttggtaaattgtactggggcttgcaactagtttcgtcagtttgcaaccccg

SEQ ID NO: 217994 - DNA, 1454 bp, Zea Mays
cgggttcccatcgaaccgcatctgagtatctgaccacgtcacacgacaccaccaccagccctccccttcatcaattggagcacggcgcccgttcattcccctctgctccgctgcttgcctccggctccccaattccacgagatctccaattccaccgcgtcgtctctgcatccggaccccataccccgatcgatccctaaggcccatggttttctccgccgccgcgtcgcctctagtagccaccgctgctgactctgcttcctcctgcgtcgcccacctccgctgctgctgtcgcgttagttgctgccgttgttgaagacgcgtagctctttagggttcgcgatttctcgccgatcggttcgagaattggtaagctatggatctctcgcggcccacatcgtcggacctctcgctcgggctccactctcacggtcacgcccacgcccacgctcgcaggcacgcggtagccgcgccgctgcgcctgttcgacgacgcggaggagccgaagccggagcgcgtcggggccggagaggccgacgcggagagggatgacgaggacgggggcgaccagcacttctccctcctcgggcactccctctgcgtcaagcgcccgcgccgcgccggcaacggcggcgggggcggagagacgtcatcctgctcgtccacgtccgcggcgcttcgccctgccaagcgacaggcgacgggggagggcagcggcgcagatctggagacccgccgcgccgcggtccgcgcctggggcaatcagtcgctggcggaggccgacccggacgtgcactcgctgatggagcaggagttggaccgccaggtgcgaggcatcgagctcatagcgtcggaaaacttcgtctgccgcgcggtgctcgatgcactcggcagccacctcactaacaagtactccgagggggccccgggtgctcgctactacggcgggaatcagcacatcgacgccatcgaacggctctgccatgagcgcgctctcaccgccttcggtctcgaccctgcctgctggggcgtcaacgtgcagccctactcgtgcacgtctgccaacttggctgtctacactgggctccttcaacccaaggaccgcatcatggggctggagccaccgtcgggcggccatgttagccatggttactacacgcccagtggcaagaaggtgtcaggtgcctctattttcttcgagagcatgtcgtacaaggtgaacccacagactgggtatattgattacgacaagcttgaagaaagagcaatggatttccaccctaaaattctcatctgtggtgggagctcttaccccagagagtgggactttgcacggatgagattgattgctgataagtgtggtgcggtgcttctttgcgacatggcacatatcagtgggcttgtcgcagcaaagggatcgtggatggtttcgaatacaatcatttgacttaaag

SEQ ID NO: 217995 - DNA, 3014 bp, Zea Mays
ttcatatccgacagcgagtttcctcaccggaggagcagagacggaggggcaaatacggaaaagacaggtacaacccgtgtttaccctagttcgacacgctccaggggctacatcgtcgtctccccgcctcaccacatctcacctcgtctcctcctccggtccttcccccatctcttcgccggcttccatttcttgcctgccagtcactctcgtccgccgcagatcgagaagccgccaccaaaccccccctccaccaccgtatgaccatgacagcccagcagcaccggcaccccaagcgccgctgcgtcgccctctccctttctccgtccctcgcgcgcatccccggcgcccccacgccgccgctcgactcgctggccgacgagcttctcttccttgtcctggaccgcgtggcccaggccgacccgcgggcgctcaagtccttcgcgctggcctcccgcgcctgccacgccgcggagtccagccaccgccggacgctccgcccgctccgcgcggacctcctgcccgccgcgctggcgcggtacccgaccgcgacccgcctcgacctcaccctctgcgcgcgcgtccccgacgccgccctcgcctccgccgccgtctccgggtcctcctccgccctccgcgccgtcgacctctcctgctcccgcgggttcagcgccgcgggcgtctccgagctcgccgtcgcctgcccgggcctcgtcgacctcgacctctccaatggggtcgacctcggggacgccgcggcggccgaggtggcgcgggccagggcgctccggaggctctcgctggcccgctggaagccgctcaccgacatggctctcgctcaagtggtgccttgggctcacggatctggggatccagctcctcgccctcaagtgcaggaagctcaccagcctggatctctcctacaccatgatcacaaaggctagcttgcctcccatcatgaagctacccagtcttcaagagttgacactggtggggtgtattgcgatcgatgatgatgctcttggtagtcttgagagagaatgcagtaaatcactacaggtgcttcatatgtctcagtgtcagaatatcacaggtgtgggagtttcatccatcctgaagtcggtacccaatctattggaactggaactttcatactgctgtcctgtcactccttctatggtgagaagcttccagaagcttgctaaacttcagaccctgaagctggaaggctccaaattcatggccgatggactaaaagccattggaacctcttgtgcttctttaagggaactaagtctgagcaagtcatctggagtgaccgacacagaactctcttttgctgtgtcaaggctaaagaacctgctgaagctggacattacttgttgtcgcaatatcactgatgtttcactagcggccataactagttcatgctcttctctcatctctatgaggatggagtcttgtagccgtgtttccagtggagcactccaactgatcgggaagcactgttctcgcttggaagagttggaccttactgacagtgatttggatgacgaaggattgaaagctcttgccagatgcagcgaactttcgagtctaaaaattggtatttgcttgaagataagtgatgaaggtcttacccacatcggaaggtcttgcccaaaactccgcgagattgatttgtacaggtgtggaggccttagcgatgatggaattattcaaattgcgcagagttgtccgatgctagagtctatcaacctatcatactgcacagaaataacagaccgctcactgatttcactatcaaaatgctcaaagctgaatactctggagattcgtggctgccccagggtttcatccatcgggctctcagaaacagcgatggggtgcaggctgctttccaagcttgatattaagaaatgctttgggattaatgatgctggaatgctttacctttcccagttctctcatagcctccgtcagataaacttgtcatactgttcagtcaccgatattgggcttctttccctttcttgcatatccggcctgcagaacatgacgatcgtccatgtagcgggtataacgcctaatggcttggcagctactcttatggtttgtggtggtttgacgaaagtgaagcttcatgaagcattcagatccatgatgcttcctcacatgataaaaaatgttgaggcacgcggctgtgttttccaatggattgataaaccattcaaggtattctacggctcccctggttgccttacacacagcattagacccttgtgctcgccaactcgttcttgcctaatttgctactcgaaaacgctacacactatttgtttcagaaaagcttggttctattcagctgtgttttgtgctgccagatctaaatgcaatgctgtgttcttttctgtgctttcagtatattgtctatgattgaaacacacaacccatgattttgcttatggatggtgtttttttcccttcaaaaaaaggcttaaagaagagcatagcacagttgtcttgaatctattgagtgggtttgttcttacagagctattacaaggctgcaaaagtaaaacagtgtctgtctaataactggtgtggcattgtaggttgaggtggaaccttgtgatgtatggaagcaacagtcgcaagacgtgcttgtacgatgagaattgagttgaccctcgagcatgtggctatcgtggaaatcatggcatgcatcgttatggatggatgggttgttggctggcaatgtcatccgcgcaagtgattcctgtgtttgagcataggtcttgatgttgttgtatactggtataagcaagtgattcctgtgtcatccgcaagtgaagttgctgtatagaatactaccatgtaaagatgtcgatacggaagggatgagaaaatggttttgaaatttagtacgatatgccttttcctatgttcgtttagttttaatccgtactatcttctactgtttctatagtatttttgtctctataaattacagc

SEQ ID NO: 217996 - DNA, 1291 bp, Zea Mays
cgaaaaacgccataagaaatgtgcatgagaacaagaatggtaggtacatgaacggaagaacacaagacgatcattatcaagatctcaaaggtctcgatcccactcctgatagttggaagaatgggtgtcagcagagtgagggctatgggatacaggattccatttgcgatgatggtcacactgaaactgctaaaaccaagaagaagatggatgaatccttggagccaagtggggagaataataactgtgagcaagttgagatttcgagtaaggatggcaaaaaggtgcccatgaagttggaggtctcatctggagttcaaactacatcatccattatggaacaagaagtgcactcagggtttgttggggtagagtggcacatgcgggtggccttcgcctgcagcgtgtgcgggcagcgtacgaccagggccatcaatcctcatgcctacaccaatgagactgtgtttgttcagggtgttcagaagcacgaagagggtggaattgggattccacatcttaagtggttcggggtggaggggcagtacaatgtcatgttgtgcatgaatcgtgtttgtaagttccattttccatctaagaatttagtgtcatttttagttgttgagttgattttgcaaactgataagtgttttctttcatcagaggatggtcaagatgaatttgaaaagcgaacaaagaaaactaaaaagaaaaggaagagagtgttgtagaggagcaacggtgccaggacgcgtcaaggttgctccagaataaatggatcatagtgcggtggtcatgggattggaatctgctctgtatttacagggtgaagccttcgtgtctcctcacgggaaagtcactgacctttcttgggacgtggaccactgatggcccctgtcattccccatgacggcgatcccatggtgaagcctttgtgtttcctcgagggaaatctaccagtgcaagattggtttagtcagcaccattggacacatgtttcactgaatctaaacaattacacctagagcgtctctgcaattgtgacccttatttatcttatgtcctacaaagggcaaacgataaccatcttcaatgaacatacctaggattattgccatgtatctccaccttgctatccaactctgaatcaaccgtaggcgtccacagtgattattttataggatcaatggcagatacatgctcatttttttgtatgtttaagtactgatacatgccattgtgttgttgaaactttaatgctctattagaatatgtttttcttgatagttggttt

SEQ ID NO: 217997 - DNA, 982 bp, Zea Mays
gtccgccagggcagagggcagcgaccttctagaaccttctccaatggcgctactccgagcgcttccggcggcggttctcccccgtcgcgccccgcacccacttcctcaccccccccggctcaccttcggttcctggacccgatcgggctccgccccttcttctcctcctccgccgccgccaccgactcgcaggcaccgtccatgggggccaccctcttcggcgggctcacggagtcccggttcgcgaagcgccggccgggcttcgccgaccgccggaagagggccagcttgcgcgccgaaggtgcggagggggagggtttctccagcctctcgtttctagccatcccttggccccaggcgcggcgtcgccgggcgtgagctcgcgagaaggacgccgagaagcaactccggcccaccctaccgggtgaagtgcgagcctgacgagcccgtaccagctagccagccaaaccaagggagcgtgcgagtgcgagggaggaaggacaggaagcggatcaagcagcgggacgacttcatcacggctgagaaggagaagcgcagagcacagtattctgccgctgttaagagaaaggaggcagaacggacagaaagggagatggctgctgtggcaagagatcgggcatgggcagaaaggttggtagagctaaaacagcttgaggaagaaaagaacactgcaatggcataaaagggcatgctctggaaaatgtcaaggcatctaacttgtttttgcttctctattctttccccattttttccacatagtatagaatgtcacagttgtaatggaagactagttgtaccacttctttcaaccgtatatcaaatgctggacgtggtgttaatacgatttttcattagtccatgtatggagtttgtttattttgatgtatttagaataagtgatgtgatggtttttgtgtgctggagacctgagatgactgtcgtttgcaacatatagttttgg

SEQ ID NO: 217998 - DNA, 692 bp, Zea Mays
tgttgttgcgtaaacgtatctgtgaaagtacatgttttgggtgtgtgggcagctccatcatccatggatcagcctccaggatgtcttcgtcgaactttgggggactagacggcgtgctgctcgagggcgtgtgcgtgtctgataggaacacatccgagttgttgtcagaccattctgcggcggtggcggcggcatcagcatcaccagcttctgcatctcgggggatttctggattgggttcgactttggtgtcatccacttcgtgttcctcctgtgcagatgtatcattggagagttgacctccttgaaagttcggtccagaaccagaagcctcaggttctggagaagaatgcacactggcaagagaagaatggttttcagcaggttctatgtgatgaatctggacagttctgctgctgtttccagctgatgcgctgctggttcctgtttcctctagagatggctgaaggcatcaccaaccttggaaaggctttctttctcctcgctagataaccctgatttgtgaactgctgtgcctatttccatatcagaaaatataacctacaattatcaggaaaacattatgtgtaagtaactgtatacaaaggtgaaatggcacaggcaatttaacacaataaaatgcaaaaattatccaattacctcaactctgaagtccacaggaaaccggtgtt

SEQ ID NO: 217999 - DNA, 670 bp, Zea Mays
accaaaaaaatgcggtggcacacacatactgtactgtagcatcggccatggtcgcggccgccgccaccaccacctccaactcggactgacctctccccggtcccagctcccgaacaaaaccctagccaaccctagtccgccgatggcgttcgcgccgccgcacctcctcccgctgccccctcctccggcggcggcatccacgcgggccgtctccgcgcgcaaccacggggggcgcacggcgcctgagctctcgggcccgaccccgcgcgtggtggtcgtcacctccggcaagggcggcgtcggaaagacgaccaccaccgccaacctcgccgcctctctcgcgcgcctcggcctcccagccgtcgccgtcgacgccgatgctggcctccgcaacctcgacctcctgctcggcctcgagaaccgcgtccacctcaccgccgccgacgtcctcgcgggagactgccgactcgaccaggcgctcgtccgccaccgcgcgctccacgacctccacctcctctgcctctccaagccccgctccaagctgcccctcgcgttcggatccaagaccctcacctgggtcgcggacgcgctacgacgctcgaccagcccacccgcattcatcctcatcgactgccccgcagggatttccactatccagagataccactac

SEQ ID NO: 218000 - DNA, 663 bp, Zea Mays
accaaaaaaatgcggtggcacacacatactgtactgtagcatcggccatggtcgcggccgccgccaccaccacctccaactcggactgacctctccccggtcccagctcccgaacaaaaccctagccaaccctagtccgccgatggcgttcgcgccgccgcacctcctcccgctgccccctcctccggcggcggcatccacgcgggccgtctccgcgcgcaaccacggggggcgcacggcgcctgagctctcgggcccgaccccgcgcgtggtggtcgtcacctccggcaagggcggcgtcggaaagacgaccaccaccgccaacctcgccgcctctctcgcgcgcctcggcctcccagccgtcgccgtcgacgccgatgctggcctccgcaacctcgacctcctgctcggcctcgagaaccgcgtccacctcaccgccgccgacgtcctcgcgggagactgccgactcgaccaggcgctcgtccgccaccgcgcgctccacgacctccacctcctctgcctctccaagccccgctccaagctgcccctcgcgttcggatccaagaccctcacctgggtcgcggacgcgctacgacgctcgaccagcccacccgcattcatcctcatcgactgccccgcaggttttagatgcttgatagtttt

SEQ ID NO: 218001 - DNA, 828 bp, Zea Mays
cgctgcatccccccttccgctgaaacaacaatcgtccgctgcattcctcatttcctccgcgtgggttctgtcacttctgtgacttctgtctgcgtctcgctctccggcgactggtgggccgccgccaccctaagccagttgcggaggtttacattggtctcttcgccggcgacgagcacccaccagaacttacgcacatctttgtggtaggagtcttgacaagtttttccaatggaccaagtaccgaatggaaggcataaggtttcttttgcgaagccaagagtagttgtgctttcagattctgactctgactctgaaggttttgtagaagagctaactcctgttcactcaaagtcaaacgggaaggcttcatctgcgagcctaaaaactggtggaaaggcttcagccctttctaaaggtgaggcaagcaaaggaaaagcatacagtagtgacaaaggtggaaagggttcttcatcacatgcagtgcctaccaagtctgatgcagaactaaagctagagcttgatatccctccaaattctagaatgctaatgaattgtgaagcagctgaactattgcaagaaattcacgagcacatggccatactatcagaggaccccaagatcaaaattcctgagtcatttgacaaagcttttcagtattcaaaagatggaaatcatttcaccactgcaagctctgtgaaacaagccattgaacctcttaaaaaatgtggggtcagtgatggagagatatgcatgatagcaaacattgggcctgagaccgttgaagaggtttacgcactagtgccatctctcaaggacaaaaatttg

SEQ ID NO: 218002 - DNA, 2535 bp, Zea Mays
ggacacccttgtattagttgagattaagcaaaaaatagatcaaagaagttcagctcagagcctccaagggaggtcgagtcacagatctattattattttctagatctggatggcagagctagtttagggtcttttagctaggatccatagcagtccagttcagcatggcagctataaactggtcccagcaaatttgagcactatggtttcttatctgaaatatggcattcactcgtattcaccaggttgaactttgtcttacaggaaatttattcgattaaattgcctgggaatccaaagcttggagagggaaaacccgaaaatcaaaatcatgccataatatttactcgtggaaatgcagtgcaaactattgatatgaatcaggataactactttgaggaggcacttaaaatgagaaacctgcttgaggagttctctctgaagcgtggcaagcattacccttctattcttggtgttagggagcatgtcttcacgggaagtgtttcctccctggcctcatttatgtctaatcaggagacaagttttgtgacattaggacagcgtgttcttgctaacccgctgaaagtgagaatgcactatggtcatccagatgtttttgatagaatttttcatataacaaggggtggaattagtaaggcctctcgcagcatcaatatcagtgaggatatatatgcaggattcaactcaactctgcgtcaaggatgcataactcatcatgaatatattcaggttggcaaaggtagggatgttggacttaatcagattgcactatttgaaggaaaagttgctggtggaaatggtgaacaagttcttagccgagacatatatagactcggacaactttttgactttttcaggatgttatccttctacgtgacaactgttggattctacttctgtactatgctaaccgtgctgaccgtgtacatatttctctatgggaaaatgtatctggccttatctggtgttggagaatcaattcaaaatagagcggatatactgcagaacgcagccttgaatgctgctctgaacactcaatttcttttccagattggtgtatttactgctgttcccatgattcttggtttcatccttgaatcaggtgttttaacggcttttgttcagtttattacaatgcagttccaaatgtgctctgtattttttactttctcacttggaacaagaacccactactttggccgtgcaatattacatggaggtgcaaagtatagagcaaccggtagaggttttgtggtacgacatatcaagtttgctgagaactaccgtatttattctcgaagccattttgtgaaagggatggaggttgcacttttgttggtgatcttcctagcgtatgggtttaacaatggtggagcagttggctatattttactctctataagcagttggattatggcattgtcttggctttttgctccctatttatttaacccatctggatttgaatggcagaagattgttgaggatttcagagactggacaaattggctgttttatcgaggtggtattggtgttaaaggagaagaaagctgggaagcttggtgggaagaagaactgcaacatatttacagcattcgagggaggatactggaaaccatattaagcctgaggtttttcattttccaattcggagttgtttaccacatgaatgctagcggaggaagtacagctttattggtgtattggatttcttgggctgtgcttggtggccttttcatcctcctcttggtctttggtttaaaccccaaggccatggtacatttccaattgttcctgcgtttggtcaaaagtgtagcgttattgatggttttggctgctctggtccctggcaattttgtttacgaaactcagtgtgagagatgtttttgcttccattctagcatttgtgccaactgggtggggaatcatttcgattgccatggcatggaaacctgtcgtgaagaaattgggtttgtggaaaactgttcgtgccctagctcgcctctatgatgctggaatggggatggtcattttcatacccatagccatttgctcgtggtttccattcatatccactttccagacgcgacttctgttcaaccaggcgttcagcagaggtttggagatatctctgatccttgctggcaacaatccaaatgctgggatctgatggtggcagttccggccttgcttcattaatctgtggacctttcgtacttgaattaatcctcacttctcagttaacagtagcgatgtacatatctgatatctctatgttcaccggagttgtttgccgtgggtataaatatcaacggctatatttctagagttcaccggcttgtacctgtatttttgaacgggtgaactttgtatggcccttcttttgacattgacatgtgctgattacgtggaaaaattgcttttttaggtcgcttcgaacttcgtttttagcaggatacttcagtatccacatgtttttcccgaaatcccggatgggcttgagtaattattttt

SEQ ID NO: 218003 - DNA, 2051 bp, Zea Mays
tacaggaaatttattcgattaaattgcctgggaatccaaagcttggagagggaaaacccgaaaatcaaaatcatgccataatatttactcgtggaaatgcagtgcaaactattgatatgaatcaggataactactttgaggaggcacttaaaatgagaaacctgcttgaggagttctctctgaagcgtggcaagcattacccttctattcttggtgttagggagcatgtcttcacgggaagtgtttcctccctggcctcatttatgtctaatcaggagacaagttttgtgacattaggacagcgtgttcttgctaacccgctgaaagtgagaatgcactatggtcatccagatgtttttgatagaatttttcatataacaaggggtggaattagtaaggcctctcgcagcatcaatatcagtgaggatatatatgcaggattcaactcaactctgcgtcaaggatgcataactcatcatgaatatattcaggccttatctggtgttggagaatcaattcaaaatagagcggatatactgcagaacgcagccttgaatgctgctctgaacactcaatttcttttccagattggtgtatttactgctgttcccatgattcttggtttcatccttgaatcaggtgttttaacggcttttgttcagtttattacaatgcagttccaaatgtgctctgtattttttactttctcacttggaacaagaacccactactttggccgtgcaatattacatggaggtgcaaagtatagagcaaccggtagaggttttgtggtacgacatatcaagtttgctgagaactaccgtatttattctcgaagccattttgtgaaagggatggaggttgcacttttgttggtgatcttcctagcgtatgggtttaacaatggtggagcagttggctatattttactctctataagcagttggattatggcattgtcttggctttttgctccctatttatttaacccatctggatttgaatggcagaagattgttgaggatttcagagactggacaaattggctgttttatcgaggtggtattggtgttaaaggagaagaaagctgggaagcttggtgggaagaagaactgcaacatatttacagcattcgagggaggatactggaaaccatattaagcctgaggtttttcattttccaattcggagttgtttaccacatgaatgctagcggaggaagtacagctttattggtgtattggatttcttgggctgtgcttggtggccttttcatcctcctcttggtctttggtttaaaccccaaggccatggtacatttccaattgttcctgcgtttggtcaaaagtgtagcgttattgatggttttggctgctctggtccctggcaattttgtttacgaaactcagtgtgagagatgtttttgcttccattctagcatttgtgccaactgggtggggaatcatttcgattgccatggcatggaaacctgtcgtgaagaaattgggtttgtggaaaactgttcgtgccctagctcgcctctatgatgctggaatggggatggtcattttcatacccatagccatttgctcgtggtttccattcatatccactttccagacgcgacttctgttcaaccaggcgttcagcagaggtttggagatatctctgatccttgctggcaacaatccaaatgctgggatctgatggtggcagttccggccttgcttcattaatctgtggacctttcgtacttgaattaatcctcacttctcagttaacagtagcgatgtacatatctgatatctctatgttcaccggagttgtttgccgtgggtataaatatcaacggctatatttctagagttcaccggcttgtacctgtatttttgaacgggtgaactttgtatggcccttcttttgacattgacatgtgctgattacgtggaaaaattgcttttttaggtcgcttcgaacttcgtttttagcaggatacttcagtatccacatgtttttcccgaaatcccggatgggcttgagtaattattttt

SEQ ID NO: 218004 - DNA, 2287 bp, Zea Mays
acaggaaatttattcgattaaattgcctgggaatccaaagcttggagagggaaaacccgaaaatcaaaatcatgccataatatttactcgtggaaatgcagtgcaaactattgatatgaatcagctgtttttataggataactactttgaggaggcacttaaaatgagaaacctgcttgaggagttctctctgaagcgtggcaagcattacccttctattcttggtgttagggagcatgtcttcacgggaagtgtttcctccctggcctcatttatgtctaatcaggagacaagttttgtgacattaggacagcgtgttcttgctaacccgctgaaagtgagaatgcactatggtcatccagatgtttttgatagaatttttcatataacaaggggtggaattagtaaggcctctcgcagcatcaatatcagtgaggatatatatgcaggattcaactcaactctgcgtcaaggatgcataactcatcatgaatatattcaggttggcaaaggtagggatgttggacttaatcagattgcactatttgaaggaaaagttgctggtggaaatggtgaacaagttcttagccgagacatatatagactcggacaactttttgactttttcaggatgttatccttctacgtgacaactgttggattctacttctgtactatgctaaccgtgctgaccgtgtacatatttctctatgggaaaatgtatctggccttatctggtgttggagaatcaattcaaaatagagcggatatactgcagaacgcagccttgaatgctgctctgaacactcaatttcttttccagattggtgtatttactgctgttcccatgattcttggtttcatccttgaatcaggtgttttaacggcttttgttcagtttattacaatgcagttccaaatgtgctctgtattttttactttctcacttggaacaagaacccactactttggccgtgcaatattacatggaggtgcaaagtatagagcaaccggtagaggttttgtggtacgacatatcaagtttgctgagaactaccgtatttattctcgaagccattttgtgaaagggatggaggttgcacttttgttggtgatcttcctagcgtatgggtttaacaatggtggagcagttggctatattttactctctataagcagttggattatggcattgtcttggctttttgctccctatttatttaacccatctggatttgaatggcagaagattgttgaggatttcagagactggacaaattggctgttttatcgaggtggtattggtgttaaaggagaagaaagctgggaagcttggtgggaagaagaactgcaacatatttacagcattcgagggaggatactggaaaccatattaagcctgaggtttttcattttccaattcggagttgtttaccacatgaatgctagcggaggaagtacagctttattggtgtattggatttcttgggctgtgcttggtggccttttcatcctcctcttggtctttggtttaaaccccaaggccatggtacatttccaattgttcctgcgtttggtcaaaagtgtagcgttattgatggttttggctgctctggtccctggcaattttgtttacgaaactcagtgtgagagatgtttttgcttccattctagcatttgtgccaactgggtggggaatcatttcgattgccatggcatggaaacctgtcgtgaagaaattgggtttgtggaaaactgttcgtgccctagctcgcctctatgatgctggaatggggatggtcattttcatacccatagccatttgctcgtggtttccattcatatccactttccagacgcgacttctgttcaaccaggcgttcagcagaggtttggagatatctctgatccttgctggcaacaatccaaatgctgggatctgatggtggcagttccggccttgcttcattaatctgtggacctttcgtacttgaattaatcctcacttctcagttaacagtagcgatgtacatatctgatatctctatgttcaccggagttgtttgccgtgggtataaatatcaacggctatatttctagagttcaccggcttgtacctgtatttttgaacgggtgaactttgtatggcccttcttttgacattgacatgtgctgattacgtggaaaaattgcttttttaggtcgcttcgaacttcgtttttagcaggatacttcagtatccacatgtttttcccgaaatcccggatgggcttgagtaattattttt

SEQ ID NO: 218005 - DNA, 2241 bp, Zea Mays
acaggaaatttattcgattaaattgcctgggaatccaaagcttggagagggaaaacccgaaaatcaaaatcatgccataatatttactcgtggaaatgcagtgcaaactattgatatgaatcaggataactactttgaggaggcacttaaaatgagaaacctgcttgaggagttctctctgaagcgtggcaagcattacccttctattcttggtgttagggagcatgtcttcacgggaaggagacaagttttgtgacattaggacagcgtgttcttgctaacccgctgaaagtgagaatgcactatggtcatccagatgtttttgatagaatttttcatataacaaggggtggaattagtaaggcctctcgcagcatcaatatcagtgaggatatatatgcaggattcaactcaactctgcgtcaaggatgcataactcatcatgaatatattcaggttggcaaaggtagggatgttggacttaatcagattgcactatttgaaggaaaagttgctggtggaaatggtgaacaagttcttagccgagacatatatagactcggacaactttttgactttttcaggatgttatccttctacgtgacaactgttggattctacttctgtactatgctaaccgtgctgaccgtgtacatatttctctatgggaaaatgtatctggccttatctggtgttggagaatcaattcaaaatagagcggatatactgcagaacgcagccttgaatgctgctctgaacactcaatttcttttccagattggtgtatttactgctgttcccatgattcttggtttcatccttgaatcaggtgttttaacggcttttgttcagtttattacaatgcagttccaaatgtgctctgtattttttactttctcacttggaacaagaacccactactttggccgtgcaatattacatggaggtgcaaagtatagagcaaccggtagaggttttgtggtacgacatatcaagtttgctgagaactaccgtatttattctcgaagccattttgtgaaagggatggaggttgcacttttgttggtgatcttcctagcgtatgggtttaacaatggtggagcagttggctatattttactctctataagcagttggattatggcattgtcttggctttttgctccctatttatttaacccatctggatttgaatggcagaagattgttgaggatttcagagactggacaaattggctgttttatcgaggtggtattggtgttaaaggagaagaaagctgggaagcttggtgggaagaagaactgcaacatatttacagcattcgagggaggatactggaaaccatattaagcctgaggtttttcattttccaattcggagttgtttaccacatgaatgctagcggaggaagtacagctttattggtgtattggatttcttgggctgtgcttggtggccttttcatcctcctcttggtctttggtttaaaccccaaggccatggtacatttccaattgttcctgcgtttggtcaaaagtgtagcgttattgatggttttggctgctctggtccctggcaattttgtttacgaaactcagtgtgagagatgtttttgcttccattctagcatttgtgccaactgggtggggaatcatttcgattgccatggcatggaaacctgtcgtgaagaaattgggtttgtggaaaactgttcgtgccctagctcgcctctatgatgctggaatggggatggtcattttcatacccatagccatttgctcgtggtttccattcatatccactttccagacgcgacttctgttcaaccaggcgttcagcagaggtttggagatatctctgatccttgctggcaacaatccaaatgctgggatctgatggtggcagttccggccttgcttcattaatctgtggacctttcgtacttgaattaatcctcacttctcagttaacagtagcgatgtacatatctgatatctctatgttcaccggagttgtttgccgtgggtataaatatcaacggctatatttctagagttcaccggcttgtacctgtatttttgaacgggtgaactttgtatggcccttcttttgacattgacatgtgctgattacgtggaaaaattgcttttttaggtcgcttcgaacttcgtttttagcaggatacttcagtatccacatgtttttcccgaaatcccggatgggcttgagtaattattttt

SEQ ID NO: 218006 - DNA, 3488 bp, Zea Mays
tttgtgcgagtgtgcctcgtcattcacctcggccacaggcggtctcattgatgaggtgaggagctgtgctcagggggagcctaaaagcggcggcgtctacgcttgccgcgaggtgccaatggtgcagtggtggggccgtgaggcgtcgggtggccgggggacgtcggtggtggtgaagatggagagcccggaatggaccatcccggcggaatcggaggtggcggcggggggcaaggccggccgcggcaagaacgcccgccagatcacgtgggtgctactgctcaaggcgcaccgcaccgcggggaagctcacgggcgccgcctccgccgtgctttccatcgccggcgccgcgtggaggcgggtggcggcggggcggaccgacgaagacgaagacgaagacgccggcgccgcgccgcccggggagagccccgcgctgcgcagcaggttctacggcttcctccgcgcctccctcgtcctgtccgtgctcctcctcgccgccgacgtcgccgcacacctccagggctggcacctcgccgtcgacgtccccgacctgctcgccgtcgagggcctcttcgccgccgggtacgcgtcctgggcgcgcgtccgtctcgagtacctcgcgccggcgctgcagttcctggcgaacgcgtgcgtcgtgctcttcttggtccagagcgccgaccgccttatcctctgcctgggttgcctctggatcaagcacaggggcatcaggcctgtccccaaggctggtggcaaagggtcagacgacgtcgaggccggcaccgggaacttccccatggtgctcgtgcagattccaatgcgcaacgagaaggaggtgtaccagcaatctattggtgctgtttgcggtctggactggccaaggccaaacttcttggtgcaggtgctagacgattctgatgacgctgccacttcaacacttattaaagaggaggtggagaagtggcaacgggaaggcgttcgcatattgtaccgacaccggttaattcgtgatggctacaaggctggaaatctcaagtcagccatgaactgcagctatgtaaaggattatgagtttgttgttatctttgatgctgattttcaaccccagccagacttcctgaagcgaactgtgccccatttcaagggcaatgaggacgttgggttagttcaggcaaggtggtcttttgtgaacaaggatgagaacttgctaactaggctgcaaaacataaacctttgcttccactttgaggtggagcagcaggttaatgggatcttcctcaatttctttggattcaatggaacggcaggagtgtggagaataaaggcactcgaggattcaggtggatggatggagaggacaacagtggaggacatggatattgctgtccgagcacacctcaagggttggaagtttctgttccttaacgatgttgagtgccagtgtgaattgccggagtcatatgaggcatatcgaaagcagcaacaccgatggcattctggtcccatgcaatcggattctggaagaaagttcaacctcatatttcttttctttctcctccgcaagctcattctgcccttctattccttcacccttttctgcatcatccttcccatgacgatgtttattcccgaagccgagctccctgcctgggtcgtgtgctacatcccggcgaccatgtccctgctgaacatcctcccagccccgaaatcgttcccgtttatcgtgccctatctcctgttcgagaacaccatgtcggtaaccaagttcaacgccatggtctccggcctgttccagctcgggagcgcccacgagtgggtcgtcaccaagaaatcaggccgttcttccgagggcgatctcgtcgtcgagaagcagcctagacagcaaagggcagggtccgcatccaaccttggttcccttgcaaaggagccttcctccagtctcagaaaggactcccaaaggaagaaacacaataggatatacaggaaggagctggcgctctccttccttctcttaacagcagctgctcggagcctgatatcggtgcaaggaatacacttctacttccttctgttccaaggggtatcgtttttggtcgttgggctcgatctgatcggcgagcaagttgagtgacgggaatacaagggagagtaatggcggtatttgtttttgctgcgagcggtggcaatgcgaacagggagcacttcaggtaaaggcaggcacggtatatgattcaacgcaaacacgagaagatttggttccggattaagaggggttatagatggttagggatacttgaaacggtgtactgtggattgtagatatatggcttgagactgtggactggggtctgattcttttgtaagaaaatctttcagtggggtcattttgctttcttgacagtttaccttcaaagggggatactgtttgggatccatgtaatttggccagttagtacgaatgcatactgaatgatacttgttcgtttcttgaattctaacatgtggataaaggattgcgctaaggggaacccagaaaaagggaagaagatgttctgcatgagtgcatcagtagaatgcctacgggctctgtttgtgaatgcaagagcgcaaatcacatgcggctcacgaacggtaatcttccagcccacttgtccagcagtgatggtggagagagacagggtatcaggggaactggggaaggggtttaggaacaacccatctccattcaccaacggcgcctccaactccgagcgccgcctctgcctcgaaaactcttactcgcggagctgcagccaggggggcgaccggtgtgtgaaccgctgccgctatggctgctgcttccgttccgccaacatcttcatccggcggctgggacttcacctgtaaccttgaagtcgattatgggtctgaagaaaatgcatccatagtctacagaacgttagcagttgacaaggagttgcagcctgacaaggtgaagagggagatgactctatcaggcagcaagctggccgtccacttcgcagccgtggaggcccgcttcctgcgagcatcgttcagctcatttgtggatcttatgggactcgtgacgaagctcgtcgaagaatatggtgtggccaatgcagggcattcttgaatcttgatgaacaatctcatacacggcattgcggagttgattttagttcgcctgtgagcaatttggagttttggacagtctttaccagtggaactgctcttgatctgtgtcaagctagtgtagtatttgcccttgattggtcaaatcctattcggaacggttaattcttttcggcaatgccgttgtgaaatgtatagatgatgaataggtaaaaattatctatatatcctcagttaggctttctccacgagtaatgagtggtcttggtctggtctctggttgtggcctctccggatgatgctatatgtcatctcccatctccgttatcgtgtttctcggtaaaaaaaacgttacg

SEQ ID NO: 218007 - DNA, 2123 bp, Zea Mays
gtacagtacttattatgtgtagtgtaggaaccgcaaagagtcttgcataatgtgcccagagtgcatccaccacaatcaggtgggaaaataaagaaatcaactaaaaacctttgtcaatatagcgatgagtccttaaatggttcaggaagtttggattgttgtcatcaaggccagtcaggaaggcgaaaaaatcaggattacaccactgaccctggaaggaacgatttacctattgctgctcatggaccacaagttgttctcttaggatcagaccgcaggtataatagctattggctcttccttggtccttgtagggaagatgatccagggcatcgtagggtctacttcgagtcctcagaggatggtcactgggaggtgattgattcaccacaggaattactttccttgctatctatcctcgatagcaggggcactagggaagcacatctccttacatcgatggagaagagacaagcctgcctttttgaagccatgaaaaaacatgtggaaggagggaaggcagccaggcttccagcctcatctgattcatactgctcccagacaagtagtggagatggaacttcgcccaagacaagtagtgtggatggagcttcatctgtatcagacattgagaacacttctgttcctacaagcctcaaagatagtaatttggattcatcgtctgccgtagtaattgaaagtgggaggggaggtgatgagaaaatatctatgtgggaacggctgcaagcatttgataaatggatctggacttctttttactccatccttactgctgttaaaagtggcaagaagtcatttaaggagtcactacttcgttgtggaagttgtcatgatctatattggagagatgaaaagcactgcagaatatgccattcaactttcgaggttggttttgatcttgaagaaaaatatgctgtacatgtggcgacgtgcagggagcctgaactttcacatgaggtaccaaatcataaatttctgccatcacagctacaggcacttaaagcagccattcatgctattgaggcctctatgcctgaggcagcttttactggttcttggatgaagtctgctcacaagctgtgggttaagcggctgcgacgaacgtcatcattgccagagcttttgcaggttcttgtcgattttgtaggggcaatggatgttgattggttgtacaaaagttcatctgcgagattgagaacaaatctggatgacatcattgtcgactttcagacaatgccacaaacaacatcagcagttgcactttgggttgtccaattggatgccctcattgcgccttatttggataatgccatggcaactggtgaatgctaggtagcttacaaagatggattcttttgcgtgatgcacaagcaccccgagctgacttctttttctggcaccatctgcaagttttttcttgatgaaagcttttcatctaggtgagacagaacatggggtctgctttgagttcgagaacaagatcttgcgacttgctgtaaagcatggaatatattgttccctcccagcagagcattgcgtcatagacaatgaaaaagttttgttaataatcgttgcttcagatatgtgaaagttttggctttccatgtagcgacacaattgggatgtaagcaatttctgaaacagaccgctgtttgcaggtggtgctgtttgggacttgattaccagctgtgcccttagttttaacggaggggtggttataattttgttccttctatatctgtatgtgctaagttgctcctagtccgtgagagctttctacattaggctatttttgtatgttatgtaaccagtttctattagagtgcagttgtagacatttagaacatgtacaccaatattgtgactgtttgaacaagtgagggaggcatagaagacttcatacggatgaattcatgattagaataaaattgcaccaaaaatcaattttgaaccgttacctttttggtatctcgtatatgttttttttttgtctatgtagtgctagttgataaatttcggatagatgtaaataggaaactgaaactctattcggatagatgtaaatagaaaaatgaaactctatttgtttaaaataagttaga

SEQ ID NO: 218008 - DNA, 3029 bp, Zea Mays
ccgggcgattcgccccgctacggctgccttgctcctccaatccgcgatcggggtacgtgatccaagcgcgatctcgcgggtcggcgcggaattgggagaggaattcaaacggtgtcggaagcgtgcggttccccggaagctcccagaacgttcggggcctccctgctccggtccgttatccggctacacaagacgacctaggatttctcaaggggttggcgcggtggatttgttgggcgcgcgcgcgagcggttggaatgggggcgccgcgccacctccttgacgtagcgatgctctgcgccttgttcgtctccgccgcgtccttcaccgacccccctgatgcgttaggacttttggggttatatcacacattggagtcgccgtggcaactttctggttggacattccagggcggtgacccatgtggtgagggtggtgggagtaaacactggcgaggcgtcttttgcaagggaccatccattgttgcaataaatattagtgggctcggagttggtggatggcttggcccagacctgctcaagtttcagtcattgaaaaagctggacatgagcttcaataacattgctggcgaaatcccgtccactttgcccccaaatgttgaatacttaaatctggcagccaacaagtttgaaggaaatataccatcatcattaccctggttgcgctccctgaaatatttgaactttagctacaataaactctctggagtaattggtgatgtttttgttaatatggatagcttagaaacgatggatctgtcattcaatgctttcaatagtgacctaccaagatcgtttagctcattgactagtcttcgctatctttatctacagcataacgagttcacaggatctgtgattttgttagcaggccttccattgtcatccctcaatattgaaaataatcacttcagtggctatgttcctggaacatttcagtccattcctgagctgaggattgatggaaaccaatttcaacctggattcaaacttgcatcctcgtcatttactaggaagacccctgcagctccacctcaatctttgcctccacctccacttcaatctccatctccatctccatctccactagcagctcagcagaaaccaaagcgaaggccaaaatctccaaagccttcttttgggtattcttctctgcaaaataatagtcaccataggaagtcacactctcgagtgacagctgctgcaatggctagtgccacatgtacagtatttgtactcctcgttgttggattggttctgagaagtcgaaaaagctgttcatgcagccccaagagcacctctaaccatgccaagactttaccagccaatatggaaacagtccctacagcgaatgaggtcttgtactcttggagttctctattgattggcagtgatacttcctctagtaatggcattacatctgaaagagttcccaaaataaaaagttggttcaaggcatctaaaaaacttctaactgcaaaacagtttccagctgcagacattctagcggctaccaaggacttcaatgaagaatgttttattggtgaaggtctcactggtcgagtttacagaggtgaattttctgatggccagctccttgctatcaagaggattgacatggtagatctgtcattgtcagaacaagatgaattaatggacatgctttggaatgtctccagattaaaacaccccaatatcagtgcgctcgtgggatattgtgtggagtttgaacattgtgcacttctatatgaatatgcagaaaatggctctcttgatgatattttgtttgcaccagccacaagatccatggctttgtcatggaaagctcggatgaagattgctcttggagttgcctatgctctggaatacatgcacttgacatattcccctccagttgcccatggaaacattaaagctagaaatattttgcttgatgctcagctcatgccctacctctgtgactgtgggttagccaagttaagccattttgttagcaccacgagaatgaaggattcagaagctatcatcagtgctaaaggctatgctgcccctgagcttagtgatcctggagcaaatgacatcaaagctgatatttacagttttggtgttattttgcttgtgcttttgactgggcaaaaggcttttgacagttcaagaaggcaaagtgatcagtttctagtagattgggcagctcctcatcttgatgatcttgattcattggaaagaattactgatccaagaataagtggctctatgccacctaaagctatctcttcattaggcattatcatcttgctttgcgtcaagcaatcaccagatctccgcccgcccatgacaatcataacggacaaattagtaaagcttgtcgaatcaacaggtcttcaaaagattagcacaacacgccacttggagattgatgctcaggatccctctttcataacaactcgaccttattttgagccgtcctctactgtcagtcagggtggaactgagagctgcatctcacggtgatgaatgcccgttcttcctctattcttctgggtcttatgctgccttatatagtcgatggcactccaagtatctcgagttctcaaccgtcgtcgcacctctttctgcatttcttatcatgccaattggtgatggtcaaagctgctgtgatgcaacgctctgactaccatggacgactggaatacaggtagacaccgccattgttatcaacggagaaaggactagaacaaaccccgccatcctgtcctggagaaactggttcaatcttggttagcggttacccgtacagttactactacttacgggagttctttgcccgtctatttgggacaagagtaacctgagctcgcgtggggatgatattttggatgctcttttctggtttgttcatatacgcagcaagcaagccttattagattgtttgtactaggccacagagactgacagatggttgctacttctagtagggatatttttaatttttttgtcaaagtgttaaag

SEQ ID NO: 218009 - DNA, 3202 bp, Zea Mays
ttttccctcccaaaaaccaaaatccctaaaccctaccggccacagcacctcgcaagcactcgcatcattccgcaggccacgccgggcgattcgccccgctacggctgccttgctcctccaatccgcgatcggggtacgtgatccaagcgcgatctcgcgggtcggcgcggaattgggagaggaattcaaacggtgtcggaagcgtgcggttccccggaagctcccagaacgttcggggcctccctgctccggtccgttatccggctacacaagacgacctaggatttctcaaggggttggcgcggtggatttgttgggcgcgcgcgcgagcggttggaatgggggcgccgcgccacctccttgacgtagcgatgctctgcgccttgttcgtctccgccgcgtccttcaccgacccccctgatgcgttaggacttttggggttatatcacacattggagtcgccgtggcaactttctggttggacattccagggcggtgacccatgtggtgagggtggtgggagtaaacactggcgaggcgtcttttgcaagggaccatccattgttgcaataaatattagtgggctcggagttggtggatggcttggcccagacctgctcaagtttcagtcattgaaaaagctggacatgagcttcaataacattgctggcgaaatcccgtccactttgcccccaaatgttgaatacttaaatctggcagccaacaagtttgaaggaaatataccatcatcattaccctggttgcgctccctgaaatatttgaactttagctacaataaactctctggagtaattggtgatgtttttgttaatatggatagcttagaaacgatggatctgtcattcaatgctttcaatagtgacctaccaagatcgtttagctcattgactagtcttcgctatctttatctacagcataacgagttcacaggatctgtgattttgttagcaggccttccattgtcatccctcaatattgaaaataatcacttcagtggctatgttcctggaacatttcagtccattcctgagctgaggattgatggaaaccaatttcaacctggattcaaacttgcatcctcgtcatttactaggaagacccctgcagctccacctcaatctttgcctccacctccacttcaatctccatctccatctccatctccactagcagctcagcagaaaccaaagcgaaggccaaaatctccaaagccttcttttgggtattcttctctgcaaaataatagtcaccataggaagtcacactctcgagtgacagctgctgcaatggctagtgccacatgtacagtatttgtactcctcgttgttggattggttctgagaagtcgaaaaagctgttcatgcagccccaagagcacctctaaccatgccaagactttaccagccaatatggaaacagtccctacagcgaatgaggtcttgtactcttggagttctctattgattggcagtgatacttcctctagtaatggcattacatctgaaagagttcccaaaataaaaagttggttcaaggcatctaaaaaacttctaactgcaaaacagtttccagctgcagacattctagcggctaccaaggacttcaatgaagaatgttttattggtgaaggtctcactggtcgagtttacagaggtgaattttctgatggccagctccttgctatcaagaggattgacatggtagatctgtcattgtcagaacaagatgaattaatggacatgctttggaatgtctccagattaaaacaccccaatatcagtgcgctcgtgggatattgtgtggagtttgaacattgtgcacttctatatgaatatgcagaaaatggctctcttgatgatattttgtttgcaccagccacaagatccatggctttgtcatggaaagctcggatgaagattgctcttggagttgcctatgctctggaatacatgcacttgacatattcccctccagttgcccatggaaacattaaagctagaaatattttgcttgatgctcagctcatgccctacctctgtgactgtgggttagccaagttaagccattttgttagcaccacgagaatgaaggattcagaagctatcatcagtgctaaaggctatgctgcccctgagcttagtgatcctggagcaaatgacatcaaagctgatatttacagttttggtgttattttgcttgtgcttttgactgggcaaaaggcttttgacagttcaagaaggcaaagtgatcagtttctagtagattgggcagctcctcatcttgatgatcttgattcattggaaagaattactgatccaagaataagtggctctatgccacctaaagctatctcttcattaggcattatcatcttgctttgcgtcaagcaatcaccagatctccgcccgcccatgacaatcataacggacaaattagtaaagcttgtcgaatcaacaggtcttcaaaagattagcacaacacgccacttggagattgatgctcaggatccctctttcataacaactcgaccttattttgagccgtcctctactgtcagtcagggtggaactgagagctgcatctcacggtgatgaatgcccgttcttcctctattcttctgggtcttatgctgccttatatagtcgatggcactccaagtatctcgagttctcaaccgtcgtcgcacctctttctgcatttcttatcatgccaattggtgatggtcaaagctgctgtgatgcaacgctctgactaccatggacgactggaatacaggtagacaccgccattgttatcaacggagaaaggactagaacaaaccccgccatcctgtcctggagaaactggttcaatcttggttagcggttacccgtacagttactactacttacgggagttctttgcccgtctatttgggacaagagtaacctgagctcgcgtggggatgatattttggatgctcttttctggtttgttcatatacgcagcaagcaagccttattagattgccacccatgtgcttgggataagaatgtcatggccatttgcttcaaatgctttaaagcctccatcaccatagaatgttgttcgtgtctctacaacttgatccaagattgtaactagtgggtagtagtgaaaataacatgcggaggagtcacaaagtttttttttgaaaaatcag

SEQ ID NO: 218010 - DNA, 482 bp, Zea Mays
gggttctcgaggactacgactaaggactcagcattgtacatattaaagtcttcacgagcacaacaaaactgaagggaataccacccaaatcatgggacctgcccacaaagtttgagatgaactggcgctcttccacatcgatcccagatgcctcctccccttcagaggctgaaacgtcgtgccgacgcagctgctcaatcttgatccccagaggctcgacgatctcctacacttcttctaggacgggagctgctgctgtcgacgactccccagcagcagaattagctgcagccaccaacgcgcctttgctgctgcacgacatctttatcgaggataaattatgtcatggaacaaaaagcaatagaagcgtacatcacagtggattttccagtatctgaaaagggatgaaaaaacgagtaaaacacatatataattgaaagcaaggaaaatgccgaacctttgagtgattcgctggttatgat

SEQ ID NO: 218011 - DNA, 799 bp, Zea Mays
aaataatggtgcaaattactgggttgttgttcttccactaattaactcgcttaaaggttctccaataattgcttaccatgggaagatgaaacaggtggtagagcaaagcacttttttcatgctttccctgtccaaaaatacgagacacattttgactgtctagaagtgagtttgactggaaatttctctttgaatattttagtaatagttctaaaatcacgataataagaatgtacatttgaatatgaatccaattatatcaattttcagtcacatattattcttatattaatttgttggtcaaacacgaatttggacaatcaaaacatgccctgcatttctggacggagtaagtaaaattttccatttaatatttttctagagtaatagggcatagtctttgccttaccaaagcaaagaccaagtcacattatagtatttggatgtgatacaagtggtgttctaatgacttccttcccagtggttttcttcatattgatttcatctatcctttttttcctaatacgcagagccttcgagagaaagctttggcatcattttctgctctttcaagttgcttttattagtcaatcacaagggcaccttcattgtatcagtgaattggttaaagggactcagcattgtacatattaaagtcttcacgagcacaacaaaactgaagggaataccacccaaatcatgttcagtttgctgaactacaggtgaccttcttgtacatattaaagtcttgttactgtcggattctgtgtctgcgaagccgcttgggctactggtcgcc

SEQ ID NO: 218012 - DNA, 1111 bp, Zea Mays
gctggaggcaccctgcacaacgcaagatggaggcagcggccgatcagcagcagcagtgccaggacttcctcatccgctccaagggccagcgcctcggccccgccgccttcccctactcccccaccggctccctcccaggctcgccctccgccgctagcaagtgcctcagcttcctgctgcagcaacaacagcagcaacacgacagagccgcggcggccgcgtctctgatgctgggcggcagcgacgaggcgcacaagttcatggcccgaccgcgcctggaccgtgccgacttcgccagcctgatgatctactactattataatcctaccgtaggcgtccacaccggcggcgcggtgcacgttctgcctcccaccacccgccccgcccacggccgcatccctcccgcggcagcaccatcaacgaccgcatccagtccctcccgcatcaacagcgtcgcagttcgcacaatccatggtccacagttcgcatcccagttcgcgcaatccatggccggagacgcgctcctggacgacttgcagctgcaggagcagctcgcgttcctcaacgagggcggcgggtacccggcccaccagctccaggggttcgacggcgtggagtgccggagccccgaccccggtgatgccgatgggatgttcgcgttcggcctcgggtggcacaacgggggccagcgcaccgcaggagctcacgcgaggatgctgcagcattcgaacagcgccaacgagctgctcttgcgccggaagctggaggaggagcagcaggctgccgaacttcagcacgccattgagctccagagccgccgcctcatgggtctccagctgctcgacctcaaggctcgcgcagctgcgacagcagcagcggcatcggcactgccaacaccagttgccaatgccttcgcgtccagccatcctttgagcaccatggcagttgagtcgccactagagtccggagagcagctcaagcaaagatgctggacagcaagagcttggtccatccataacaccattagggcttcggttggaggttcaatcaatatacttcttgtttttattatgattgtgttctgattttcttgaattctagttgttcccta

SEQ ID NO: 218013 - DNA, 1486 bp, Zea Mays
agcaaaagtacttaaaatatatgctgcaaggccggtgttcgtcatcgtcttcggccaaactctcaacaacagatatttatatataacgagcgcagctagctagctagagcctgaaagaattgagaagctaaggatagaggcgaagctaggctgcgaaccactggatcaagaggagctagctaggcagcgagaatgagagggtttgagagaaaaggggtccggcagtacaaccggtcagaggtgccgaggatgcggtggacggaggagctgcaccggcagttcgtcgaggccgtcgagtgcctcggtggccaggacgaagcaactccgaagcgaattcttcagctgatgggcgcgaagggagttagcatatctcatatcaagagccatcttcagatgtacagagcctccatctccagcagcagcagtacccatcatcagcccagcctccagaagtcgacatcaaccgcagcgagcaacaacaagcgcgtgttcttcacgcgtgaagattgtgcgtcacaggaaggcaacgctccagcttcagacaagaacatctataccaccacggtccgtggttgcggccagtactcatcaccgtaccaaataccgtcgctacagcaagtgttcagatgctgggaacaaaagagagggcgtgttgcttggaactccgacgtgctaacaacagagaagggggtgattattaggccaagtcacactaggaagcacgagacgcagcagcacacgggatgcgacctcacgctgtcgatcgggctgtgggaggacgcgagcagcagcgacgacgccgacggctcgagctccatcagcgaggagctgctgcctgctccggcagcgggcggcgctcgccgcgtcgccgccgtagtgaaggaggaggaggagagcaagccggcggctctgaacctggacctgaccatctcgtcgtcctggctggcctgacgacgtacgccggcggacggctggtggcgttatgcgtacgtggccggcgtaggtacaaatacgtacatactatacgcggactcttgcagatcgagcagcagactgtgtgatcagggcatcggtactaggactactgtatattttcgtgtcgtcctgcccactccgttctagccactctctttttttttttcttattagatcatctgtacaacattttcgggtccgttcgattaggaacggccgcctgggcttcagacgacggtgggtgaggaatttctgcggccctttttccttgtccggggagaaggcgctgtatacctcagttcctcacatgtcatcgtctgatcgattgagcatatacttagtatgttattagttctggcagctatatatttcagtgaatgacagaggacagatatgtttatatatatagtcttttatttttgctagcagcagctgtatatttcagtcaacaactagcaaaagtcatccagtacagtacgtccaacaaaatcaagtagttggttgatagttc

SEQ ID NO: 218014 - DNA, 1346 bp, Zea Mays
tccgcctgacccctctccccgctgcgtcccccgaacggcgaacgctgccatcccatcctgccgtttgccgccgcaaaactcatcgttttttttttaaaatacctggcgcctgatcacggaaagggacggcaacaaatcgccgtgcgccagcggccagcgcacagccgagctccagagaggaggcggagctgcgggggacggggggagacggaggaggtcccggcgtcccgcgcctccccgattggacaacttaatgacccctagtccctagtagcaagtcggctttgtgcgcgcgtgctctgctgcccacccggccgccccatttgtttactgggtgtctgggtccagtccccgccccgaatcttttccctcctcccgcaccccaggccgcagcagcagcaccggcgcaccgccacccactcgccccgcctccgtgcccgcgcaactcgcgcctgcagcgtgtgggagatgtgatcggagcccggccgtcggttcgagtgttttcttctgcctctgggctgtggcgcggggaggaggcaagctggcggtgagatgggtcggtgcggaggaggaagcggagcaggagcaggagggggagctttgggcggctgtgctctcctcaccgccgccttggttatctcaacgctcgtgatccagggcgctggaggatctaagcaatctcatgcacctgctgttgctcgcaaggttcttctatccataacgaattggcacccacacaattacttggatgatgtacttcatccatcacaagtacaagatcaaaggctcgaacgtttagtgtcattgacttcaccgcctttgcctgcaattgggcgacgaatgcaaagtccagcagcttctccagaaacagcagttcatccagctaaacatggcaaggatcatggaactccagtttcagcaccttcaaatgttagtcatcaccatgcgatgcctgcgaataatacacatggaaaaactcatggaactccagttttggcaccagaaaagagaaggcatcaccacttgcctgcaaataattcatatgtgaaaggacctgctgtttctccctcaaagtctcccatcatccacaggaaaggacatggtgttccagttgctgcacctccaaaagaacactggagctatttaccacctgcaaatcgtagacaccacaaaggttctcgtcctgctccacgtaaaagtaacaatacttctgcaccaagccatgtatatcctggtagtcctgcacctgcacctgaacgtttgctcatcaaaggaaagggcaaggaaatttctgctcatgctccacgccatcccaatcattaccattcgcatcataattctccaag

SEQ ID NO: 218015 - DNA, 1670 bp, Zea Mays
ggtcaatgatggctcttgcttgtccaatatgcaatgtgtgttgactcctgaaacagaaggctatgaccagactctgtcactactggagcatctgtactagttgagggagttgttgcaagcagccaaggcggtaagcaaaaagtggagttgaaggtttcaaagatcactgtgattggtaagagtgaccccacatcttttcctatacagaagaaacgggcatcaagagagttccttagaactgtagcccatctccgtcctcggacaaacacttttggtgcagtggcaagagtgagaaatgctctggcatacgcaactcataaattctttcaagacaatggatttgtttgggtttcaagcccaattattactgcctcagattgtgaaggagctggggagcagttttacgtgactactttgctttcgaatagcaccgaaggtggttccctactcaaagatattcctgcgaccaaggatggaagggttgattggtcacaggatttcttctgcaaaccagcatttctgacagtatctggacagctcaatggtgaaacatatgcttcagctctatctgatatttacacatttggtccaacgtttagggctgaaaattcaaacactgcaaggcatctggctgaattttggatgattgaacctgagcttgcctttgcggatctaaatgatgacatggcttgtgcaactgcatatctccagtatgtagtaaagtatattctagagaactgcaaagaggatatggatttcttcaatacatgggttgagaaaggcatcatagatcgattaaatgatgtagtagagaagaactttgttcacttgtcttacactgatgctgtcgagctactacttgggtccaagaagaaatttgagtttccggtaaagtggggtttggatcttcaaagtgagcacgagcgatatatcacagaagttgcctttgatgggcgccctgtaataatcagagattacccaaaggaaatcaaagctttctatatgagagaaaatgatgatgggaagacagttgctgcaatggatttgttggttcctcgggttggtgagcttattgggggaagccagagggaagagcgtcttgattaccttgaagcccgactagacgagcaaaatctgaacaaggagagctactggtggtatctggacctacggcgatatggatcagttccccacgccggtttcggtcttggatttgagcggcttgtacagtttgctactggaatagacaacatcagagacgccatcccatttccccgagttcctggctcagccgagttttaggcttcctttcgaatgtaggaattttatggggatggtatatgaatttcacaggaaatggttcaaaaacacatgaattatcttttaatccaaaggaggccttagcgccccgaaagtgttgtcatttgtttcatcattgtacagagttgagctgagactcgtggttaatcgagccaaccagtgttgtggcatgcttctccaaatatatatccagcaggtgctcctgactcactccatcttgcttgcagtcgttgacgaaggcttgcttcactcacccgacgatcctaaaccatgctatctccagcagtcttactatctcatcccctaaaacagtgtaatctacatattttgtgagtctatatatacgctct

SEQ ID NO: 218016 - DNA, 1071 bp, Zea Mays
atggatcacgtgctcgcaggactgatgggcgaccatctcgcgttgatcgtggaccggctgctgacagagtcgacgctggaggcggcgatcggcggtgggaagcagatggtcgatttgcgtcaagagacggtggacgtcgagtactgccatcgcgggctaggcagcggctcggcgacgaaggtgatggagtgcaggatttgccaggaggaggactgggacacctgcatggaggccccctacgcctgctgtggcaacctcaagttaaatttctcatgtactgaagatttgtgttgtagtcaaacaactgataaaccattcaggaccggacacaggaggcgtcttgaattggccttctggttcaaggtcattgcaaaaggaaaaagttctcttctcaattccatcagtgattggccctatgaaggcgcttatagttttgttttctgttttcacttttgggtcaaacaattagcaaagaccgaagagagtgggagtcatatcatgcagcaaagaaaaatagtgaaatggtttggtgcaaaatataactaccataggactgaaacataccgcacaagcttactgaaaaatactctgatggccttctatattcacccacaccagggtatcatcaaccattcagctcatttgacagagagtggtttatatttggcggcagtacttctgcggcacatcattcttgagaaaaatgacaataagcctgtcacaaatagcagggacacccaggagggcctccagatgctaacaatcttcaagagccatgaggctgagacaacaattgtcgaagatttcgacttctatgagcatcgggagaaagccttgcaggagaacagacgtcaacagcatgctgccagcaccgatacccagaaactggtggatatcaaggctcaagatgttgtggccgacatatcagatgcatttgccaaggccgtccagttgaagaatactgagaacagtggacaaccccaaaaattgagggtgcttcagctgaaaagggatccgctgccacagccaaggttgaaggaagtgctggatccgcgggcgggcgagcggtga

SEQ ID NO: 218017 - DNA, 3638 bp, Zea Mays
  misc_feature (3637)..(3638): n is a, c, g, or t
aaaccccccttcgtcccgtcgcatttcgttcaaaatcgcgcggtcaaatccgagctcggggccatcgccgtcgccgcgcctcccatcccgcgaagatgagctacgcggcgtacaagatgatgcatttgcccaccggaatcgaccattgcgctgccggcttcatcacccactcccccgccgacgctgccgccttctccacgcccgcgcccgcgcccaccgccgccgctggacccgacggcgatattgactccactgcggctagggcaccccggcgagtgggtcctacccccaacctggttgtgtcggcggctaacgtgctcgaggtgtatgccgtgagggccgaggtcgcgactggggccgaggatgcgggtaattcttcgtctaccggcaccatcctggatggtatctccggggctcgactggaacttgtgtgccattacaggtgcaaacaaatggctcttgcctctttgcattcacttttagctgtaaatttcaggcttcacggtaacattgaatcgatggctgtgttgtccgatggcacagagaataggcgagactccattgcagttacgtttaacgatgcaaaaataacatgtctggagtttgatgacagcatcaatggcctgcggacaagctcaatgcattgttttgaaggccctgaatggttccatctgaaaaggggcagggaatcatttgcctggggtcctatcataaaaggggatcctcaaggcagatgtggtgctgtacttgtttatggattacagataataattttgaaagcagctcaggttgggcagagcttagtaggagaggatgaacctacacgcgtgttgagttccactgctgttcggattgaatcttcgtatgtgattgatttacgtgatctagaaatgaatcacatcaaagactttacatttgtgcatggttatattgagcctgtgttggtcatacttcatgagcgagagcctacatgggctgggcgtatctcatcgaagagccaaacatgcatgctatctgcgtttagtataagcatgggtttaaagcaacatccgatgatatggtctgctgctaaacttccacatgatgcatatcaacttcttgcagtgccccctcctataagtggcattcttgtgatctgtgcaaattcaatccattatcatagtcagtccacttcttgttcacttgccttgaacagtttctcatcacagcctgacggaagcccagagattcttaaaacaagttttcatgttgagcttgatgtagctaaagcaacatggttatcccatgacattgtgatgttttcatcaaagaatggagaaatactattactaacagtggtttatgatgggcgagctgtgcaaagattagatcttatgaaatccaaagcatctgttcttagttcgggtgctacaactcttggaagttcgttcatatttcttggcagtcgtcttgcagatagccttcttgtgcaattttcatgtggcatgccaacatcggttctgcctgatctaacagatgagcctgctgatattgaaagtgatctgcctttctcaaagcgcctaaagaggattccctctgatgttctacaagatgttactagtgttgaggaactttcttttcataataaggcagtgccaaatattgtagattcagcagagaagatctcatttgttgtgagagatgctctgatcaatgttggtcctctgaaagattttgcatatggtttaagaactaattctgatcccaacgcagcaggcattgcgaagcaaagcaattatgagctggtgtgttgttctgggcatggaaaaaatggaacgctctcggcccttcaacaatctatccgtccagatttaattaccgaggtggaactaccaagttgcacaggtatttggacagtttactacaagagttctcgtggaaatacaactgacaataatgaatatcatgcttatttgataataagcctagaaagccgcacaatggtgcttcagacaggtgatgatcttggagaggtcactgaaacagttgactataatgttcaagggagcacaattgctgctggtaacttgtttgggaggtgtcgcgtcatacaggtatatgccaagggtgctcgtgtgcttgatggttccttcatgacacaagagctaaacttttctatgcatacttccgaatcgtcattgaattctgagcctcttgcagctgcatctgcttcaattgcagatccatatgttctcttgaaaatgagtgatggatccattcgacttctcataggagatccttcaacctgtactatttctataaatgctcctgccatattcgcaagctcaagtgagcggatatcagcatgtacactatactgtgacagaggacctgagccatggcttagaaagacccatactgatgcatggttatccactgatgttggagaggctattgatgataatgacaattcttctcacgacctgtctgatatatattgcataatttgttatgaaagcggtaaactggaaatttttgaagtacccagttttaaacgtgtgttctctgtggataattttgtttctggaccagctatcttgtttgatgtgttttctcgtaattctactaaggattctggaataggggatcgagatgcttctaaagtttctgtgaagaaagaggaagcagcaaacattaagatagttgagcttgcaatgcatagatggtctgggcagttcagccggccattcctctttggattattgaatgatgggacattgttgtgttatcacgcatattattttgaaggctcagaaagcaatgtgcaatgtgctcctttctcacctcatggtggttcaccggatattggcaatgccactgattcaagactcagaaatttgagattttgtcgagtttcaatagatatctcatcacgagatgacatatcatgtcttgtacgaccaagaataacaattttcaacaatgttggaggttacgagggattatttcttggtggcccaaggccaacctgggtttttgtttgtcgacagcgatttcgggtgcatccacagttatgcgacggtccaattgtagcctttactgttctccacaatgtcaattgttgccgtggccttatttatgtgacatctcagggttttctgaagatatgtcagttgccatctgcatataactatgacaactactggcctgttcaaaaggtccccttgcatggcactccacatcaggtcacatattatggagagcagtcactttatccgcttattgtcaggttcgccccttaaatcaagttctttcttctatggctgatcaagaattgggtctgcacatggagaacgatgttacaagtggtggtgacctccaagaggtctatactgttgatgaatttgaagttcgtattatggagttgggaaaatccaatggacgttgggagacaaggtccaccattccgatgcaatcatttgaaaacgctttaacagtgcgcatcgttaccttgcaaaatattattgattttcgcctcagaacacatctacgaaggaaaatgaaaccctgatggccattggaactgcttatgttcaaggggaggatgttgctgctagaggacgggtgcttctgttctctttcagtaaaagtgaaaatnn

SEQ ID NO: 218018 - DNA, 3515 bp, Zea Mays
  misc_feature (3514)..(3515): n is a, c, g, or t
aaaccccccttcgtcccgtcgcatttcgttcaaaatcgcgcggtcaaatccgagctcggggccatcgccgtcgccgcgcctcccatcccgcgaagatgagctacgcggcgtacaagatgatgcatttgcccaccggaatcgaccattgcgctgccggcttcatcacccactcccccgccgacgctgccgccttctccacgcccgcgcccgcgcccaccgccgccgctggacccgacggcgatattgactccactgcggctagggcaccccggcgagtgggtcctacccccaacctggttgtgtcggcggctaacgtgctcgaggtgtatgccgtgagggccgaggtcgcgactggggccgaggatgcgggtaattcttcgtctaccggcaccatcctggatggtatctccggggctcgactggaacttgtgtgccattacaggtgcaaacaaatggctcttgcctctttgcattcacttttagctgtaaatttcaggcttcacggtaacattgaatcgatggctgtgttgtccgatggcacagagaataggcgagactccattgcagttacgtttaacgatgcaaaaataacatgtctggagtttgatgacagcatcaatggcctgcggacaagctcaatgcattgttttgaaggccctgaatggttccatctgaaaaggggcagggaatcatttgcctggggtcctatcataaaaggggatcctcaaggcagatgtggtgctgtacttgtttatggattacagataataattttgaaagcagctcaggttgggcagagcttagtaggagaggatgaacctacacgcgtgttgagttccactgctgttcggattgaatcttcgtatgtgattgatttacgtgatctagaaatgaatcacatcaaagactttacatttgtgcatggttatattgagcctgtgttggtcatacttcatgagcgagagcctacatgggctgggcgtatctcatcgaagagccaaacatgcatgctatctgcgtttagtataagcatgggtttaaagcaacatccgatgatatggtctgctgctaaacttccacatgatgcatatcaacttcttgcagtgccccctcctataagtggcattcttgtgatctgtgcaaattcaatccattatcatagtcagtccacttcttgttcacttgccttgaacagtttctcatcacagcctgacggaagcccagagattcttaaaacaagttttcatgttgagcttgatgtagctaaagcaacatggttatcccatgacattgtgatgttttcatcaaagaatggagaaatactattactaacagtggtttatgatgggcgagctgtgcaaagattagatcttatgaaatccaaagcatctgttcttagttcgggtgctacaactcttggaagttcgttcatatttcttggcagtcgtcttgcagatagccttcttgtgcaattttcatgtggcatgccaacatcggttctgcctgatctaacagatgagcctgctgatattgaaagtgatctgcctttctcaaagcgcctaaagaggattccctctgatgttctacaagatgttactagtgttgaggaactttcttttcataataaggcagtgccaaatattgtagattcagcagagaagatctcatttgttgtgagagatgctctgatcaatgttggtcctctgaaagattttgcatatggtttaagaactaattctgatcccaacgcagcaggcattgcgaagcaaagcaattatgagctggtgtgttgttctgggcatggaaaaaatggaacgctctcggcccttcaacaatctatccgtccagatttaattaccgaggtggaactaccaagttgcacaggtatttggacagtttactacaagagttctcgtggaaatacaactgacaataatgaatatcatgcttatttgataataagcctagaaagccgcacaatggtgcttcagacaggtgatgatcttggagaggtcactgaaacagttgactataatgttcaagggagcacaattgctgctggtaacttgtttgggaggtgtcgcgtcatacaggtatatgccaagggtgctcgtgtgcttgatggttccttcatgacacaagagctaaacttttctatgcatacttccgaatcgtcattgaattctgagcctcttgcagctgcatctgcttcaattgcagatccatatgttctcttgaaaatgagtgatggatccattcgacttctcataggagatccttcaacctgtactatttctataaatgctcctgccatattcgcaagctcaagtgagcggatatcagcatgtacactatactgtgacagaggacctgagccatggcttagaaagacccatactgatgcatggttatccactgatgttggagaggctattgatgataatgacaattcttctcacgacctgtctgatatatattgcataatttgttatgaaagcggattctggaataggggatcgagatgcttctaaagtttctgtgaagaaagaggaagcagcaaacattaagatagttgagcttgcaatgcatagatggtctgggcagttcagccggccattcctctttggattattgaatgatgggacattgttgtgttatcacgcatattattttgaaggctcagaaagcaatgtgcaatgtgctcctttctcacctcatggtggttcaccggatattggcaatgccactgattcaagactcagaaatttgagattttgtcgagtttcaatagatatctcatcacgagatgacatatcatgtcttgtacgaccaagaataacaattttcaacaatgttggaggttacgagggattatttcttggtggcccaaggccaacctgggtttttgtttgtcgacagcgatttcgggtgcatccacagttatgcgacggtccaattgtagcctttactgttctccacaatgtcaattgttgccgtggccttatttatgtgacatctcagggttttctgaagatatgtcagttgccatctgcatataactatgacaactactggcctgttcaaaaggtccccttgcatggcactccacatcaggtcacatattatggagagcagtcactttatccgcttattgtgtcagttcctcaggttcgccccttaaatcaagttctttcttctatggctgatcaagaattgggtctgcacatggagaacgatgttacaagtggtggtgacctccaagaggtctatactgttgatgaatttgaagttcgtattatggagttgggaaaatccaatggacgttgggagacaaggtccaccattccgatgcaatcatttgaaaacgctttaacagtgcgcatcgttaccttgcaaaacacatctacgaaggaaaatgaaaccctgatggccattggaactgcttatgttcaaggggaggatgttgctgctagaggacgggtgcttctgttctctttcagtaaaagtgaaaatnn

SEQ ID NO: 218019 - DNA, 3619 bp, Zea Mays
  misc_feature (3618)..(3619): n is a, c, g, or t
gggttttctagggttttggtacgaaaccccccttcgtcccgtcgcatttcgttcaaaatcgcgcggtcaaatccgagctcggggccatcgccgtcgccgcgcctcccatcccgcgaagatgagctacgcggcgtacaagatgatgcatttgcccaccggaatcgaccattgcgctgccggcttcatcacccactcccccgccgacgctgccgccttctccacgcccgcgcccgcgcccaccgccgccgctggacccgacggcgatattgactccactgcggctagggcaccccggcgagtgggtcctacccccaacctggttgtgtcggcggctaacgtgctcgaggtgtatgccgtgagggccgaggtcgcgactggggccgaggatgcgggtaattcttcgtctaccggcaccatcctggatggtatctccggggctcgactggaacttgtgtgccattacaggcttcacggtaacattgaatcgatggctgtgttgtccgatggcacagagaataggcgagactccattgcagttacgtttaacgatgcaaaaataacatgtctggagtttgatgacagcatcaatggcctgcggacaagctcaatgcattgttttgaaggccctgaatggttccatctgaaaaggggcagggaatcatttgcctggggtcctatcataaaaggggatcctcaaggcagatgtggtgctgtacttgtttatggattacagataataattttgaaagcagctcaggttgggcagagcttagtaggagaggatgaacctacacgcgtgttgagttccactgctgttcggattgaatcttcgtatgtgattgatttacgtgatctagaaatgaatcacatcaaagactttacatttgtgcatggttatattgagcctgtgttggtcatacttcatgagcgagagcctacatgggctgggcgtatctcatcgaagagccaaacatgcatgctatctgcgtttagtataagcatgggtttaaagcaacatccgatgatatggtctgctgctaaacttccacatgatgcatatcaacttcttgcagtgccccctcctataagtggcattcttgtgatctgtgcaaattcaatccattatcatagtcagtccacttcttgttcacttgccttgaacagtttctcatcacagcctgacggaagcccagagattcttaaaacaagttttcatgttgagcttgatgtagctaaagcaacatggttatcccatgacattgtgatgttttcatcaaagaatggagaaatactattactaacagtggtttatgatgggcgagctgtgcaaagattagatcttatgaaatccaaagcatctgttcttagttcgggtgctacaactcttggaagttcgttcatatttcttggcagtcgtcttgcagatagccttcttgtgcaattttcatgtggcatgccaacatcggttctgcctgatctaacagatgagcctgctgatattgaaagtgatctgcctttctcaaagcgcctaaagaggattccctctgatgttctacaagatgttactagtgttgaggaactttcttttcataataaggcagtgccaaatattgtagattcagcagagaagatctcatttgttgtgagagatgctctgatcaatgttggtcctctgaaagattttgcatatggtttaagaactaattctgatcccaacgcagcaggcattgcgaagcaaagcaattatgagctggtgtgttgttctgggcatggaaaaaatggaacgctctcggcccttcaacaatctatccgtccagatttaattaccgaggtgtggaactaccaagttgcacaggtatttggacagtttactacaagagttctcgtggaaatacaactgacaataatgaatatcatgcttatttgataataagcctagaaagccgcacaatggtgcttcagacaggtgatgatcttggagaggtcactgaaacagttgactataatgttcaagggagcacaattgctgctggtaacttgtttgggaggtgtcgcgtcatacaggtatatgccaagggtgctcgtgtgcttgatggttccttcatgacacaagagctaaacttttctatgcatacttccgaatcgtcattgaattctgagcctcttgcagctgcatctgcttcaattgcagatccatatgttctcttgaaaatgagtgatggatccattcgacttctcataggagatccttcaacctgtactatttctataaatgctcctgccatattcgcaagctcaagtgagcggatatcagcatgtacactatactgtgacagaggacctgagccatggcttagaaagacccatactgatgcatggttatccactgatgttggagaggctattgatgataatgacaattcttctcacgacctgtctgatatatattgcataatttgttatgaaagcggtaaactggaaatttttgaagtacccagttttaaacgtgtgttctctgtggataattttgtttctggaccagctatcttgtttgatgtgttttctcgtaattctactaaggattctggaataggggatcgagatgcttctaaagtttctgtgaagaaagaggaagcagcaaacattaagatagttgagcttgcaatgcatagatggtctgggcagttcagccggccattcctctttggattattgaatgatgggacattgttgtgttatcacgcatattattttgaaggctcagaaagcaatgtgcaatgtgctcctttctcacctcatggtggttcaccggatattggcaatgccactgattcaagactcagaaatttgagattttgtcgagtttcaatagatatctcatcacgagatgacatatcatgtcttgtacgaccaagaataacaattttcaacaatgttggaggttacgagggattatttcttggtggcccaaggccaacctgggtttttgtttgtcgacagcgatttcgggtgcatccacagttatgcgacggtccaattgtagcctttactgttctccacaatgtcaattgttgccgtggccttatttatgtgacatctcagggttttctgaagatatgtcagttgccatctgcatataactatgacaactactggcctgttcaaaaggtccccttgcatggcactccacatcaggtcacatattatggagagcagtcactttatccgcttattgtgtcagttcctcaggttcgccccttaaatcaagttctttcttctatggctgatcaagaattgggtctgcacatggagaacgatgttacaagtggtggtgacctccaagaggtctatactgttgatgaatttgaagttcgtattatggagttgggaaaatccaatggacgttgggagacaaggtccaccattccgatgcaatcatttgaaaacgctttaacagtgcgcatcgttaccttgcaaaatattattgattttcgcctcagaacacatctacgaaggaaaatgaaaccctgatggccattggaactgcttatgttcaaggggaggatgttgctgctagaggacgggtgcttctgttctctttcagtaaaagtgaaaatnn

SEQ ID NO: 218020 - DNA, 3487 bp, Zea Mays
  misc_feature (3486)..(3487): n is a, c, g, or t
gggttttctagggttttggtacgaaaccccccttcgtcccgtcgcatttcgttcaaaatcgcgcggtcaaatccgagctcggggccatcgccgtcgccgcgcctcccatcccgcgaagatgagctacgcggcgtacaagatgatgcatttgcccaccggaatcgaccattgcgctgccggcttcatcacccactcccccgccgacgctgccgccttctccacgcccgcgcccgcgcccaccgccgccgctggacccgacggcgatattgactccactgcggctagggcaccccggcgagtgggtcctacccccaacctggttgtgtcggcggctaacgtgctcgaggtgtatgccgtgagggccgaggtcgcgactggggccgaggatgcgggtaattcttcgtctaccggcaccatcctggatggtatctccggggctcgactggaacttgtgtgccattacaggcttcacggtaacattgaatcgatggctgtgttgtccgatggcacagagaataggcgagactccattgcagttacgtttaacgatgcaaaaataacatgtctggagtttgatgacagcatcaatggcctgcggacaagctcaatgcattgttttgaaggccctgaatggttccatctgaaaaggggcagggaatcatttgcctggggtcctatcataaaaggggatcctcaaggcagatgtggtgctgtacttgtttatggattacagataataattttgaaagcagctcaggttgggcagagcttagtaggagaggatgaacctacacgcgtgttgagttccactgctgttcggattgaatcttcgtatgtgattgatttacgtgatctagaaatgaatcacatcaaagactttacatttgtgcatggttatattgagcctgtgttggtcatacttcatgagcgagagcctacatgggctgggcgtatctcatcgaagagccaaacatgcatgctatctgcgtttagtataagcatgggtttaaagcaacatccgatgatatggtctgctgctaaacttccacatgatgcatatcaacttcttgcagtgccccctcctataagtggcattcttgtgatctgtgcaaattcaatccattatcatagtcagtccacttcttgttcacttgccttgaacagtttctcatcacagcctgacggaagcccagagattcttaaaacaagttttcatgttgagcttgatgtagctaaagcaacatggttatcccatgacattgtgatgttttcatcaaagaatggagaaatactattactaacagtggtttatgatgggcgagctgtgcaaagattagatcttatgaaatccaaagcatctgttcttagttcgggtgctacaactcttggaagttcgttcatatttcttggcagtcgtcttgcagatagccttcttgtgcaattttcatgtggcatgccaacatcggttctgcctgatctaacagatgagcctgctgatattgaaagtgatctgcctttctcaaagcgcctaaagaggattccctctgatgttctacaagatgttactagtgttgaggaactttcttttcataataaggcagtgccaaatattgtagattcagcagagaagatctcatttgttgtgagagatgctctgatcaatgttggtcctctgaaagattttgcatatggtttaagaactaattctgatcccaacgcagcaggcattgcgaagcaaagcaattatgagctggtgtgttgttctgggcatggaaaaaatggaacgctctcggcccttcaacaatctatccgtccagatttaattaccgaggtggtggaactaccaagttgcacaggtatttggacagtttactacaagagttctcgtggaaatacaactgacaataatgaatatcatgcttatttgataataagcctagaaagccgcacaatggtgcttcagacaggtgatgatcttggagaggtcactgaaacagttgactataatgttcaagggagcacaattgctgctggtaacttgtttgggaggtgtcgcgtcatacaggtatatgccaagggtgctcgtgtgcttgatggttccttcatgacacaagagctaaacttttctatgcatacttccgaatcgtcattgaattctgagcctcttgcagctgcatctgcttcaattgcagatccatatgttctcttgaaaatgagtgatggatccattcgacttctcataggagatccttcaacctgtactatttctataaatgctcctgccatattcgcaagctcaagtgagcggatatcagcatgtacactatactgtgacagaggacctgagccatggcttagaaagacccatactgatgcatggttatccactgatgttggagaggctattgatgataatgacaattcttctcacgacctgtctgatatatattgcataatttgttatgaaagcggattctggaataggggatcgagatgcttctaaagtttctgtgaagaaagaggaagcagcaaacattaagatagttgagcttgcaatgcatagatggtctgggcagttcagccggccattcctctttggattattgaatgatgggacattgttgtgttatcacgcatattattttgaaggctcagaaagcaatgtgcaatgtgctcctttctcacctcatggtggttcaccggatattggcaatgccactgattcaagactcagaaatttgagattttgtcgagtttcaatagatatctcatcacgagatgacatatcatgtcttgtacgaccaagaataacaattttcaacaatgttggaggttacgagggattatttcttggtggcccaaggccaacctgggtttttgtttgtcgacagcgatttcgggtgcatccacagttatgcgacggtccaattgtagcctttactgttctccacaatgtcaattgttgccgtggccttatttatgtgacatctcagggttttctgaagatatgtcagttgccatctgcatataactatgacaactactggcctgttcaaaaggtccccttgcatggcactccacatcaggtcacatattatggagagcagtcactttatccgcttattgtgtcagttcctcaggttcgccccttaaatcaagttctttcttctatggctgatcaagaattgggtctgcacatggagaacgatgttacaagtggtggtgacctccaagaggtctatactgttgatgaatttgaagttcgtattatggagttgggaaaatccaatggacgttgggagacaaggtccaccattccgatgcaatcatttgaaaacgctttaacagtgcgcatcgttaccttgcaaaacacatctacgaaggaaaatgaaaccctgatggccattggaactgcttatgttcaaggggaggatgttgctgctagaggacgggtgcttctgttctctttcagtaaaagtgaaaatnn

SEQ ID NO: 218021 - DNA, 3504 bp, Zea Mays
  misc_feature (3503)..(3504): n is a, c, g, or t
aaatgtcttcgctgagcgaagggttttctagggttttggtacgaaaccccccttcgtcccgtcgcatttcgttcaaaatcgcgcggtcaaatccgagctcggggccatcgccgtcgccgcgcctcccatcccgcgaagatgagctacgcggcgtacaagatgatgcatttgcccaccggaatcgaccattgcgctgccggcttcatcacccactcccccgccgacgctgccgccttctccacgcccgcgcccgcgcccaccgccgccgctggacccgacggcgatattgactccactgcggctagggcaccccggcgagtgggtcctacccccaacctggttgtgtcggcggctaacgtgctcgaggtgtatgccgtgagggccgaggtcgcgactggggccgaggatgcgggtaattcttcgtctaccggcaccatcctggatggtatctccggggctcgactggaacttgtgtgccattacaggcttcacggtaacattgaatcgatggctgtgttgtccgatggcacagagaataggcgagactccattgcagttacgtttaacgatgcaaaaataacatgtctggagtttgatgacagcatcaatggcctgcggacaagctcaatgcattgttttgaaggccctgaatggttccatctgaaaaggggcagggaatcatttgcctggggtcctatcataaaaggggatcctcaaggcagatgtggtgctgtacttgtttatggattacagataataattttgaaagcagctcaggttgggcagagcttagtaggagaggatgaacctacacgcgtgttgagttccactgctgttcggattgaatcttcgtatgtgattgatttacgtgatctagaaatgaatcacatcaaagactttacatttgtgcatggttatattgagcctgtgttggtcatacttcatgagcgagagcctacatgggctgggcgtatctcatcgaagagccaaacatgcatgctatctgcgtttagtataagcatgggtttaaagcaacatccgatgatatggtctgctgctaaacttccacatgatgcatatcaacttcttgcagtgccccctcctataagtggcattcttgtgatctgtgcaaattcaatccattatcatagtcagtccacttcttgttcacttgccttgaacagtttctcatcacagcctgacggaagcccagagattcttaaaacaagttttcatgttgagcttgatgtagctaaagcaacatggttatcccatgacattgtgatgttttcatcaaagaatggagaaatactattactaacagtggtttatgatgggcgagctgtgcaaagattagatcttatgaaatccaaagcatctgttcttagttcgggtgctacaactcttggaagttcgttcatatttcttggcagtcgtcttgcagatagccttcttgtgcaattttcatgtggcatgccaacatcggttctgcctgatctaacagatgagcctgctgatattgaaagtgatctgcctttctcaaagcgcctaaagaggattccctctgatgttctacaagatgttactagtgttgaggaactttcttttcataataaggcagtgccaaatattgtagattcagcagagaagatctcatttgttgtgagagatgctctgatcaatgttggtcctctgaaagattttgcatatggtttaagaactaattctgatcccaacgcagcaggcattgcgaagcaaagcaattatgagctggtgtgttgttctgggcatggaaaaaatggaacgctctcggcccttcaacaatctatccgtccagatttaattaccgaggtggaactaccaagttgcacaggtatttggacagtttactacaagagttctcgtggaaatacaactgacaataatgaatatcatgcttatttgataataagcctagaaagccgcacaatggtgcttcagacaggtgatgatcttggagaggtcactgaaacagttgactataatgttcaagggagcacaattgctgctggtaacttgtttgggaggtgtcgcgtcatacaggtatatgccaagggtgctcgtgtgcttgatggttccttcatgacacaagagctaaacttttctatgcatacttccgaatcgtcattgaattctgagcctcttgcagctgcatctgcttcaattgcagatccatatgttctcttgaaaatgagtgatggatccattcgacttctcataggagatccttcaacctgtactatttctataaatgctcctgccatattcgcaagctcaagtgagcggatatcagcatgtacactatactgtgacagaggacctgagccatggcttagaaagacccatactgatgcatggttatccactgatgttggagaggctattgatgataatgacaattcttctcacgacctgtctgatatatattgcataatttgttatgaaagcggattctggaataggggatcgagatgcttctaaagtttctgtgaagaaagaggaagcagcaaacattaagatagttgagcttgcaatgcatagatggtctgggcagttcagccggccattcctctttggattattgaatgatgggacattgttgtgttatcacgcatattattttgaaggctcagaaagcaatgtgcaatgtgctcctttctcacctcatggtggttcaccggatattggcaatgccactgattcaagactcagaaatttgagattttgtcgagtttcaatagatatctcatcacgagatgacatatcatgtcttgtacgaccaagaataacaattttcaacaatgttggaggttacgagggattatttcttggtggcccaaggccaacctgggtttttgtttgtcgacagcgatttcgggtgcatccacagttatgcgacggtccaattgtagcctttactgttctccacaatgtcaattgttgccgtggccttatttatgtgacatctcagggttttctgaagatatgtcagttgccatctgcatataactatgacaactactggcctgttcaaaaggtccccttgcatggcactccacatcaggtcacatattatggagagcagtcactttatccgcttattgtgtcagttcctcaggttcgccccttaaatcaagttctttcttctatggctgatcaagaattgggtctgcacatggagaacgatgttacaagtggtggtgacctccaagaggtctatactgttgatgaatttgaagttcgtattatggagttgggaaaatccaatggacgttgggagacaaggtccaccattccgatgcaatcatttgaaaacgctttaacagtgcgcatcgttaccttgcaaaacacatctacgaaggaaaatgaaaccctgatggccattggaactgcttatgttcaaggggaggatgttgctgctagaggacgggtgcttctgttctctttcagtaaaagtgaaaatnn

SEQ ID NO: 218022 - DNA, 619 bp, Zea Mays
cactaactgcattccccttctccccttctcccttcctgctgtcgttgctgtttgtgaatgtggtttggattatgacagacttcagttctgtccgacagatatgcaaaaaaagtactttgagaaacaatttgagttggctgaagcagtaaagctgcccatttttcttcacatgtgtgctgctggtgaagacttctatgaaatcatgacacaaaatttgcacagattccctggtggggttacacattccttcactgactcaacagaagatcaggataggctactttcttttgagaagatgtttatcggtgttaatggttcctctctgaaaactaaccgaaatcttgaggttctacgaggcattcctgtcgagaggttgatgatggaaacatattctccatattgtgacataataaatactcatgctggaagccagtatgtaaaatctgtctggccatccaagaagaaagaaaagtatgagccagattcaacagtaaaaggtcgcaatgagccttgtttagtcagattccctggtggggttacacattccttcactgactccgcagaagatcgggataggctactttcttttgagaagatgtttatcgaagcatccaagtaa

SEQ ID NO: 218023 - DNA, 1358 bp, Zea Mays
atgggtgctgacaccttgctgcggagcggcggcgagcctggctccatcgagaggcggcggcgtggggaatatctagggttcctcggaacccgagccccagcacacagacaccgcgcccgcggacactgctcgctccccttctcctccgtcgccgccaccgcagaagcctctaccacgcgcgaccagctcgccgccgcacccgccggggccgacggcctgcacgcgctcgccgagcaggtggtgcagctcgtgctcgccgacggctccggcgccagcagcccgcgcgtcgccttcgccgacggcgtcttcgtcgactcctcgctgaagctcaagccggccttcgaggaggtcgccgtgggaaagtacagggccgacacccagtccgtcgacttccagaaaaaggttgatttgatccccttcccaccgagctcccgaacacttgtgtcctgctaccgtagttcatactcttatgacagtggtcatatcaaccagaacttatcaaggaagtgtgaagcattagttgtgtcaggtttggcagaatatggtgatgaaatagatgggattgccccagctgatatcatgaagattcagcctatcctgcaagaagatctgaaactagatttttcaaaatcacgtacaaataagacagggaatgctgaaattactaagaggagaaggatggtcgtgatagatgaggtgttaagccaagatgagacaccattcttgtacagcctcgtgtttggtgaaggtgttgtcaatgacacaacttctgttgtgttgttcaatgcaatccagaactttgatcctggaaatatcagcggtgccaaattactgaacttcattagcagtttcctttatttgtttggctccagcaccattcttggagtagcttctggacttcttagtgcttataccattaagaagttgtactttggcaggcattcaacctatcgtgaagtttccattatgatgctaatggcttatttatcttacatgctagctgaattgctcgatttgagtggaattctcactgtgtttttctgcggtgtcgtaatgtcacactatacttggcacaatgtaacagaaagttcaagggtcacaaccaagcatgcctttgcaacattgtcgtttatctccgagacttttctgtttctttatgttggtatggatgcattggatatagagaagtggaagattgtcggtcaaacttatagcccggtaaagtctatcgctttgagcagcaccattttagccttggtgctggtttcaagagctgcttttgttttcccactatcctttctatcaaatttgaccaaaaaaactccaaatggaaagatatcttttaggcagcagtgcga

SEQ ID NO: 218024 - DNA, 1297 bp, Zea Mays
ctacaaggtggcactaaaattggaaagcaagcaaaccagccaattattttgctgatcgatgagctcgatcttcttttgacaagaaaccagtcggtgctgtataacatccttgattggcccaccaaaccatattcaaatctagttgtcataggtatagcaaacacaatggatcttccagaaaaattattgcctcgtatatcaagtcggatgggcattcaacgactgtgttttggtccatacaattatcggcaactacaggaaattataacaagccgtttaaaggggattgatgcctttgaagaacaagctattgaatttgcttctagaaagctgctatgtcaggtgatgctaggcgagctttagagatttgtagacgagcagcagagtttgcagactaccgtgttaaacagtctcgacagtctgcacagaatactgtttctgcaaataaaggtgatggtgttgtttccatgggtgacatagaagctgctattcaggaagtcttccaggcaccgcatattcaagtgatgaagaattgtccaaagtttggaaaagttatcttggttgccatagttcatgagctgtacaaaagtggactaggtgaaataatgtttgataagctgcaagcttggtgaaagcaagatcatcctctgtgaagagggtaccaagcacaagttgcagaaggtgcagctcaactatccaagtgatgatgtgacatttgccctcaaggaatctccagatcttccttggctatctaagtacttgtgaggctcttattgcattaaccattgattcctggcactctgttgcctttctgttctctttggaggctagacaattctacttcacccgcaaacctttcaaacacacatatcccatggtcgatctcctggtcactctagcctcgtatctgcaaaggaaccggcgaaggatgacggcatgtcgctgcacccaacggaacgcgtcacactaggaacgtaaaacgttagaaacatgtacgtctggaatttcgtccccttcatgactggatacgtatgtatccacttcaacccatgtagtttggagtggtttggtatgtattttaaactaaactctatattaaaccactctaatccatatcgattgaggtgaatatgcatgcgtccatatgttgtaactgaactgccgcgtagtgagatttagtaactatatatgaatggtttgttacaataacattgcgagttttgaataagaaacattgagatatcaatttgtactctgctggctccaatgcgatggccatttaaggcattgtttggtt

SEQ ID NO: 218025 - DNA, 1576 bp, Zea Mays
gaacccctcacggtgaaggtctggagcgcgactacgaactgcgtagccgtggtccagcgacgttgggcgtcgaggcgcttgacagcttgcaaggcatcgttgttctatactgtgtttatggagggagcctgatggcaccttctgggcaaaggtcaggtggtacattatccccgaagagactgcagcaggaaggcagctgcataacttgagaagagagctgtatcgtaccaatgatcttgcagacattgagatggaaacaatccttagacattgttctataatgtgccccaaagactttagggatgctaacgatggaggagatgatgtattttactgtgaatatgagtatgatattcattggcataattttaagcgtttggcagatattggtgatgaacccgagacaaaggaagatcccagtgacgagccttacaatgccagtgatgattataacagtgacactgatgaagattcagagtatgacgaggtggaagaacctacatcatctttctctgccagagggaatcaatcacatgaattggcagcgaattcaaggaagggtagaatatatggcctacaaaaaattggaatacgaaaaattcctgagcatgttcggtgccaccaaaagactgagctggagaaggctaaagcaaccctgttattggcaactctccctaagtcattaccttgcagggataaagaaatggaggagatatcgatatttgtaaaggatgcaatctgcaatgaccagtgcctaggacggtgcctttatatacatggtgtacctggtactggcaagactatgagtgtacttgctgttatgaggaggctgagatctgaatttgattctggaacactgaggccatattgttttattgaaattaatggtcttaaattagcatccccagagaatatctacaaggtggcactaaaattggaaagcaagcaaaccagccaattattttgctgatcgatgagctcgatcttcttttgacaagaaaccagtcggtgctgtataacatccttgattggcccaccaaaccatattcaaatctagttgtcataggtatagcaaacacaatggatcttccagaaaaattattgcctcgtatatcaagtcggatgggcattcaacgactgtgttttggtccatacaattatcggcaactacaggaaattataacaagccgtttaaaggggattgatgcctttgaagaacaagctattgaatttgcttctagaaaggtagctgctatgtcaggtgatgctaggcgagctttagagatttgtagacgagcagcagagtttgcagactaccgtgttaaacagtctcgacagtctgcacagaatactgtttctgcaaataaaggtgatggtgttgtttccatgggtgacatagaagctgctattcaggaagtcttccaggcaccgcatattcaagtgatgaagaattgtccaaagtttggaaaagttatcttggttgccatagttcatgagctgtacaaaagtggactaggtgaaataatgtttgataagcattactccgatcatcagcaagaattggtggatcttcagt

SEQ ID NO: 218026 - DNA, 1898 bp, Zea Mays
cagtgagcatggtgcgtgtcccgcgggcgacgagcttcaactctacggcggtagggaaggcactcccctcgtcatagacaagggcacactatttagcgccaccacattcggctaccggccgccacgagggcgcctccgtgcagaaaattggcgttttgcggcaaagcacttcatcaagaaacaccctgaagacgtggttgttcactgcagtgggtgcaactcagcagctcgaacctttgatggagttgatgtgatggggagaagattggcagacgaggtggcttctattgttgacagtagaccggagctttgcaagatttcctttgttgcgcattcattgggtggactaattgcaagatatgctattgcattattatatgagagcgagacacaaaaagattctcatgaaaagtttgagaaccatgctgttgactattctagtaaccagcacagcaaagggaaaattgttggtttggagcctattaacttcatcacttttgcaacaccacacctcggtacaatatcacacaaacaggattttgtatagtattgttgatcatatttatacaggggagtgggtactaattataaactgagttctataaagaaggtaatcagttagatgcttcattttcctcaataaatttgttcctattggtgctacaacataaggtgtccttgttttcttttatttgactcacatgacatgattgttctggtgtactaaatgcatgtacttgtttcctcatatcaatactagtaccccgtgttacttcttcataaatgtcacgtatttacaatcccaaatgctatagttcaaccatggccttttatatcactgagctagtaaagataatggcgtttattctctgtgacttcagaaaaaaatctaagataacccgtatggtaacggatcaaagagtataagtttataatgctacaggtctcatggctgcatagccatgaagaatccacatatttgactgattcggtttctgttatgcactggcagataccacttcttcgtggttccaacaaattagaaaagatggcgtatcgtttgtcttggattgctgggagaagtggaaaacatctcttcctgaaagatatggaagatgagaaaccaccacttcttctacagatggttactgattatggtggtctccatttcatgtcagctctccgctctttcaagcggcgtgttgcttactccaatgtttgtaatgactttatcgttggctggaggacatcatcaattcgtcgtcaacacgagcttcctgagccccgaagttttataaacaacaatagatatccacacattgtatatgtggaagggccaaaagttgaggatgttgattttttggatgcgatgatttacgaggcaaaaacgactagtgaaatggaagaggtgatgctcaaaggtctgaatagagtttcatgggaaagggtagatgttagcttcaaaaaaagtagacaaaggattttcgctcatagcactattcaggtcaagacctatttcttgaactccgatggagctgacgtgatcaaccacatgatcgaccattttgtttattaagatgggtgtactaagttggtaccaagttctctttgtcgatcgattctcggccaaagaggaacatgtgggaaatgttcttgttttgaagacaggattagagttatactgaaggagtagaacccactgtaaagtgtaaaggggtatcttatctctacccttcttgataattttgggccgtttaggttcttttcttcccttttcagaattcagaatctcagttgttttgtacccatatactggaccagaatttgttctccaaatacaaagatatttgctgcgtatttgcttctccgaacgatgatccctttgtcttataccaact

SEQ ID NO: 218027 - DNA, 1297 bp, Zea Mays
cagtgagcatggtgcgtgtcccgcgggcgacgagcttcaactctacggcggtagggaaggcactcccctcgtcatagacaagggcacactatttagcgccaccacattcggctaccggccgccacgagggcgcctccgtgcagaaaattggcgttttgcggcaaagcacttcatcaagaaacaccctgaagacgtggttgttcactgcagtgggtgcaactcagcagctcgaacctttgatggagttgatgtgatggggagaagattggcagacgaggtggcttctattgttgacagtagaccggagctttgcaagatttcctttgttgcgcattcattgggtggactaattgcaagatatgctattgcattattatatgagagcgagacacaaaaagattctcatgaaaagtttgagaaccatgctgttgactattctagtaaccagcacagcaaagggaaaattgttggtttggagcctattaacttcatcacttttgcaacaccacacctcggtacaatatcacacaaacagataccacttcttcgtggttccaacaaattagaaaagatggcgtatcgtttgtcttggattgctgggagaagtggaaaacatctcttcctgaaagatatggaagatgagaaaccaccacttcttctacagatggttactgattatggtggtctccatttcatgtcagctctccgctctttcaagcggcgtgttgcttactccaatgtttgtaatgactttatcgttggctggaggacatcatcaattcgtcgtcaacacgagcttcctgagaggtgatgctcaaaggtctgaatagagtttcatgggaaagggtagatgttagcttcaaaaaaagtagacaaaggattttcgctcatagcactattcaggtcaagacctatttcttgaactccgatggagctgacgtgatcaaccacatgatcgaccattttgtttattaagatgggtgtactaagttggtaccaagttctctttgtcgatcgattctcggccaaagaggaacatgtgggaaatgttcttgttttgaagacaggattagagttatactgaaggagtagaacccactgtaaagtgtaaaggggtatcttatctctacccttcttgataattttgggccgtttaggttcttttcttcccttttcagaattcagaatctcagttgttttgtacccatatactggaccagaatttgttctccaaatacaaagatatttgctgcgtatttgcttctccgaacgatgatccctttgtcttataccaact

SEQ ID NO: 218028 - DNA, 1436 bp, Zea Mays
caagggcacatttccctttcagtgagcatggtgcgtgtcccgcgggcgacgagcttcaactctacggcggtagggaaggcactcccctcgtcatagacaagggcacactatttagcgccaccacattcggctaccggccgccacgagggcgcctccgtgcagaaaattggcgttttgcggcaaagcacttcatcaagaaacaccctgaagacgtggttgttcacttgggtgcaactcagcagctcgaacctttgatggagttgatgtgatggggagaagattggcagacgaggtggcttctattgttgacagtagaccggagctttgcaagatttcctttgttgcgcattcattgggtggactaattgcaagatatgctattgcattattatatgagagcgagacacaaaaagattctcatgaaaagtttgagaaccatgctgttgactattctagtaaccagcacagcaaagggaaaattgttggtttggagcctattaacttcatcacttttgcaacaccacacctcggtacaatatcacacaaacagataccacttcttcgtggttccaacaaattagaaaagatggcgtatcgtttgtcttggattgctgggagaagtggaaaacatctcttcctgaaagatatggaagatgagaaaccaccacttcttctacagatggttactgattatggtggtctccatttcatgtcagctctccgctctttcaagcggcgtgttgcttactccaatgtttgtaatgactttatcgttggctggaggacatcatcaattcgtcgtcaacacgagcttcctgagccccgaagttttataaacaacaatagatatccacacattgtatatgtggaagggccaaaagttgaggatgttgattttttggatgcgatgatttacgaggcaaaaacgactagtgaaatggaagaggtgatgctcaaaggtctgaatagagtttcatgggaaagggtagatgttagcttcaaaaaaagtagacaaaggattttcgctcatagcactattcaggtcaagacctatttcttgaactccgatggagctgacgtgatcaaccacatgatcgaccattttgtttattaagatgggtgtactaagttggtaccaagttctctttgtcgatcgattctcggccaaagaggaacatgtgggaaatgttcttgttttgaagacaggattagagttatactgaaggagtagaacccactgtaaagtgtaaaggggtatcttatctctacccttcttgataattttgggccgtttaggttcttttcttcccttttcagaattcagaatctcagttgttttgtacccatatactggaccagaatttgttctccaaatacaaagatatttgctgcgtatttgcttctccgaacgatgatccctttgtcttataccaact

SEQ ID NO: 218029 - DNA, 3526 bp, Zea Mays
gtttccccgctcgccatcgcaatacgtttccacgccgtcgcgcccgcacccgcccagcccttcctcctcacgtcacgagccacgcttgctgccgtctcggcgctcctcctccgcctcggaatgcgggatgcgagggctccgcagttccagaggcggggccagggcggcgtcggcgtcgtcctcctcccgctgatgctcctcctcgcaggcaccgccagcggccagcagcagatccagccgcccccggtacctccggcggacctgccggacgtggagaggcggctcaacaacctgaccgaccacgtcgccaccaccatctccgacaagttccgcttctgcgtcgccgacccgaaggaggactggaacgaggcgttcaactacacatcggacctcagcttcgtggatcgctgccttaccgagacccaaggcgacctgcctcagcgtctctgcggccccgatgaagtcaagttctacttctcaagcttgtacgaccgcgatggggacaagaacatcaacctcaagacaaacataaactgcaacatgtcttcttggggcaagggatgcgatgccggatgggcctgcgccaccgatccagttccagaccgccccagcaaccgtggtagcaacgatatcccgctgagaacaagcagctgccaggcatgctgcgagggcttcttctgcccccgcggcctcacttgcatgctcccttgcccactaggctcatactgtccacgcgccacggcgaatcacacaactgggctctgcgacccgtacaagtatcagatagctccaaactcgactgatagctgtggaggtgctgacatgtgggctgatatccagagcacagaagaaatcttctgcccagctggttactactgtccaagcacgaccagaaaagataactgtagcagtgggcactattgcagattgggttccacagctgaggagaggtgcgttgtgcctgctgcttcttgtcatatacaactgctcagacaaattcctcagcatccgtgaacggaggaaagcaaggtcaagggagaatgccatccggctagctcgccagcagctaaaggcgcaggagggatggaaagcggcgaaacagtttgccaggaggcatgtgagtggcatgcagggtcatctttcacgcacgttttcgcggaggaggtcgtttcgtcagcaggtagacgcagacaagtctagccatagggtgcaggaagcgccgctgatgggtcaggtccagatgcaggaaatgtcggattctgctgtgtttgcttctgagagcgcaaatgagataacagaggcgatgccatcagtcattgtagatgtcagtgatggggaagttgttgctacaaatgaaaatcctgcgccgaaaggaaaacatagatcaacccacacacaagtgttcaagtatgcgtatggcgagattgagaaggagaaattccagcagcgacaggacaacaagaatctaacttttactggggtgatcgccatggtgaaggaccagcagaaggagataactaggcctttgctcaaggttgagttcagagacctgacactgatgctagggaagaagaagctgctgaggtctatcaatggtgaactccggccggggcgtgtaactgctgtcatgggcccatcaggggctggcaagaccacatttctcaatgccgtcactgggaaggtgaacggctacaagatgacaggttctgttcttgttaatggaaagaatcttaatatccgttcctacaaaaaggtcattggatttgtgccacaagatgacattgttcatggaaacttaacggtggaggaaaacctctggttcagtgcaaagtgcaggctatcagcaagcatgaagcatcgcgacaaggtgctcctagtggagagagtgatagattctctggatcttcagggaatcagaaattcattggttggcacagttgaaaagcgtgggatttctggcgggcagaggaagcgtgtcaatgtgggcatcgagatggtgatggagccgtcgcttctaatcctggatgaaccaacatctggcctggatagctcctcgtcacaacttctcctcagagcccttcggcatgaggcgctccaaggcgtgaacgtctgtgctgttgttcatcaaccgagctacacgctgtacaacatgttcgacgatttgatactcctcgcaaaaggggggttgatggtctacaatggcccagtaaagacggtcgaggagtacttcacagctcttggaatccatgttcctgaccgcgtaaaccccccagaccactacatcgacattctcgagggcattgtgaagcctgattcttctgccatcaaagcgaagcacctaccagtgcattggatgctacacaatggctacgaagtaccaagtgacatgcaagatgatgtcaaggaaatcggtgaacaagccccacaattcaggtccagctcctcgacatctggctcgccctctcctcactgcctccccatcagaaatgcatttgcagaagagcgtgaccgtctcgaacagcgtttgtcaaaaccgaaggacttgtccagcagaaaaacaccagggatcttcatgcagtacaaatattacttgggaagggttacgaaacagcggctgcgtgaagctaggctgctcatggttgatttcctgatactaggcctagctggtatctgcttagggacgatagcaaagctcagtgacaaaacattcgggatgcctggctacatatacactataattgcagtctctcttttgtgcaagatcgcagcactgcggtcgttttcgttggagcgattgcagtacttcagagagagagaatctgggatgagctctctggcatacttccttgctagggacacgattgatcatttcagtactgttgtgaagccgatcatttacctgtctatgttctactacttcaataacccaagatcaacaattgctgataactacattgtgctcctcgcgcttgtgtactgtgtgactgggataggatacacttttgccatctgcttcagtcctggctcagcacagctgtgttctgcgcttatcccggttgttctaaccctgttatccactcaaaagagtactccaacattaatcaggagattgtgctactcaaaatgggcattggagggcttcataattgtaaatgccaagaagtatcctggagtttggcttataacccgctgtggcctgttgtttcagagtcaatttgatattcacaactacaagctctgcattttgattttgttcatgtatggtctgttcttcaggatggtggcatttgctgcaatgattttactgaagaagagatgaatgtactctagatgtaacatttagttcatctctaatatcttcattcatttttacatgtgtaaaacaattctgatgaaaggttttagagcactgacccttgtacagatgagaaaaaaggcaataggaattcatttttttctaccattattgtttcgtacatccccatatctgaagtcctatgcttcacttgaaaaaagaagattcaac

SEQ ID NO: 218030 - DNA, 3662 bp, Zea Mays
ctcaatctatatactacactttcacaagcagtactatactactatagacgtcgtcctagctcgtttccccgctcgccatcgcaatacgtttccacgccgtcgcgcccgcacccgcccagcccttcctcctcacgtcacgagccacgcttgctgccgtctcggcgctcctcctccgcctcggaatgcgggatgcgagggctccgcagttccagaggcggggccagggcggcgtcggcgtcgtcctcctcccgctgatgctcctcctcgcaggcaccgccagcggccagcagcagatccagccgcccccggtacctccggcggacctgccggacgtggagaggcggctcaacaacctgaccgaccacgtcgccaccaccatctccgacaagttccgcttctgcgtcgccgacccgaaggaggactggaacgaggcgttcaactacacatcggacctcagcttcgtggatcgctgccttaccgagacccaaggcgacctgcctcagcgtctctgcggccccgatgaagtcaagttctacttctcaagcttgtacgaccgcgatggggacaagaacatcaacctcaagacaaacataaactgcaacatgtcttcttggggcaagggatgcgatgccggatgggcctgcgccaccgatccagttccagaccgccccagcaaccgtggtagcaacgatatcccgctgagaacaagcagctgccaggcatgctgcgagggcttcttctgcccccgcggcctcacttgcatgctcccttgcccactaggctcatactgtccacgcgccacggcgaatcacacaactgggctctgcgacccgtacaagtatcagatagctccaaactcgactgatagctgtggaggtgctgacatgtgggctgatatccagagcacagaagaaatcttctgcccagctggttactactgtccaagcacgaccagaaaagataactgtagcagtgggcactattgcagattgggttccacagctgaggagaagtgcataataaaggcctcctgcgaagaaaacgcagagaacgagcacatcgccattcttggagcttgcatagtgggtgcgttgtgcctgctgcttcttgtcatatacaactgctcagacaaattcctcagcatccgtgaacggaggaaagcaaggtcaagggagaatgccatccggctagctcgccagcagctaaaggcgcaggagggatggaaagcggcgaaacagtttgccaggaggcatgtgagtggcatgcagggtcatctttcacgcacgttttcgcggaggaggtcgtttcgtcagcaggtagacgcagacaagtctagccatagggtgcaggaagcgccgctgatgggtcaggtccagatgcaggaaatgtcggattctgctgtgtttgcttctgagagcgcaaatgagataacagaggcgatgccatcagtcattgtagatgtcagtgatggggaagttgttgctacaaatgaaaatcctgcgccgaaaggaaaacatagatcaacccacacacaagtgttcaagtatgcgtatggcgagattgagaaggagaaattccagcagcgacaggacaacaagaatctaacttttactggggtgatcgccatggtgaaggaccagcagaaggagataactaggcctttgctcaaggttgagttcagagacctgacactgatgctagggaagaagaagctgctgaggtctatcaatggtgaactccggccggggcgtgtaactgctgtcatgggcccatcaggggctggcaagaccacatttctcaatgccgtcactgggaaggtgaacggctacaagatgacaggttctgttcttgttaatggaaagaatcttaatatccgttcctacaaaaaggtcattggatttgtgccacaagatgacattgttcatggaaacttaacggtggaggaaaacctctggttcagtgcaaagtgcaggctatcagcaagcatgaagcatcgcgacaaggtgctcctagtggagagagtgatagattctctggatcttcagggaatcagaaattcattggttggcacagttgaaaagcgtgggatttctggcgggcagaggaagcgtgtcaatgtgggcatcgagatggtgatggagccgtcgcttctaatcctggatgaaccaacatctggcctggatagctcctcgtcacaacttctcctcagagcccttcggcatgaggcgctccaaggcgtgaacgtctgtgctgttgttcatcaaccgagctacacgctgtacaacatgttcgacgatttgatactcctcgcaaaaggggggttgatggtctacaatggcccagtaaagacggtcgaggagtacttcacagctcttggaatccatgttcctgaccgcgtaaaccccccagaccactacatcgacattctcgagggcattgtgaagcctgattcttctgccatcaaagcgaagcacctaccagtgcattggatgctacacaatggctacgaagtaccaagtgacatgcaagatgatgtcaaggaaatcggtgaacaagccccacaattcaggtccagctcctcgacatctggctcgccctctcctcactgcctccccatcagaaatgcatttgcagaagagcgtgaccgtctcgaacagcgtttgtcaaaaccgaaggacttgtccagcagaaaaacaccagggatcttcatgcagtacaaatattacttgggaagggttacgaaacagcggctgcgtgaagctaggctgctcatggttgatttcctgatactaggcctagctggtatctgcttagggacgatagcaaagctcagtgacaaaacattcgggatgcctggctacatatacactataattgcagtctctcttttgtgcaagatcgcagcactgcggtcgttttcgttggagcgattgcagtacttcagagagagagaatctgggatgagctctctggcatacttccttgctagggacacgattgatcatttcagtactgttgtgaagccgatcatttacctgtctatgttctactacttcaataacccaagatcaacaattgctgataactacattgtgctcctcgcgcttgtgtactgtgtgactgggataggatacacttttgccatctgcttcagtcctggctcagcacagctgtgttctgcgcttatcccggttgttctaaccctgttatccactcaaaagagtactccaacattaatcaggagattgtgctactcaaaatgggcattggagggcttcataattgtaaatgccaagaagtatcctggagtttggcttataacccgctgtggcctgttgtttcagagtcaatttgatattcacaactacaagctctgcattttgattttgttcatgtatggtctgttcttcaggatggtggcatttgctgcaatgattttactgaagaagagatgaatgtactctagatgtaacatttagttcatctctaatatcttcattcatttttacatgtgtaaaacaattctgatgaaaggttttagagcactgacccttgtacagatgagaaaaaaggcaataggaattcatttttttctaccattattgtttcgtacatccccatatctgaagtcctatgcttcacttgaaaaaagaagattcaac

SEQ ID NO: 218031 - DNA, 3125 bp, Zea Mays
ttaaaaataggaattcaaggggggaagcctgaaaactcgctggacagggccacgccaaggatggaggagcagccggtggctaaaattttggctggctccgcgggcgcacgtcgtttagcgtttccgctcgccttgggaccttgcccctggccctccgagatgccgggaccggccgtggaggcagcggccaggggcggcggctgctgcgggaagacggccggcaagtgggagaagacgtacctggatgtcctgggcatctgctgcaccgctgaggtggcgctcgttgagcggctcctggcgcccatcaacggcgtgagggcggtcaccgtcgtcgtcccctcccggaccgtcatcgtcgaccacgacacggccgccgtctcccagttccacatcgtgaaggttctgaacaaggcgggcctcgaggcctccgtccgagcctatggcagcagcgccggcgcccccgggcggtggcccagcccgttcatcgtggcctgcggcgtgctgctcgcggcgtccctgttcgcgccgctcctccctccgctgcggtggctggcggtggcggcggcctgcgtggggtcccagcccatgctgctgagggcgttcgcggcggccggcaagctcaccctggacatcaacatcctgatgctcatcgcggtggccggggccgtggcgctcgggagctacacggaggcgggcgccatcgtgttcctcttcaccgtggccgagtggctggagacgctggcgtgcaccaaggccagcgccgggatgctgtccctgatgtcctcggtgcccaagaccgtggtgctcgccgagacggggcaggtcgtcggcatgggtgacgtggcggtcggcacggtcgtcgcggtcagggccggggacgtggtccccgtggacggtgttgtggtcggcgggcagagcgaggtcgacgagagcagcctcaccggcgagtccttccccgtgccgaagcaggcgcagtccgaggtctgggccggcaccatcaacttggatggttacatctccgtgcggacgacggccctcgccgagaactcgacggtggcgaagatggagaggctggtggaggaggcccagaacagccggtccaggacgcagcggctcatcgactcgtgcgccaagcactacacccctgccgtggtcgtcctcgccgccggggtggtcctcgtgcccgtcctgctgggagctcccgacctggagcactggttccggctgtccctggtgctgctggtgagcgcgtgcccgtgcgcgctggtgctgtccacgcccgtcgccaccttctgcgcgctcctgcgggcggccaggatggggctcctcgtcaagggaggcaacgttcttgagtcgctgggcgaggtcagggtcgccgcgttcgacaagaccgggaccatcaccagaggcgagttcagcatcaaggacttccttgtggtgagggacaaggttcaaatgagccagctactttactgggtatctagcatcgagagcaaatcaagccacccaatggctgctgcacttgtcgagtatgcccagtccaaatctatacagccgaagccggaggacgtgactgagacttgcatctaccatggcgagggcatctatggggccatcaatggaaaacacatctacatcggaaacgaaaggatcatggcaaggtcctcgtgtcgtcaacaagctggccaccgagaaacagatggcctcaaaggcgtgtccgttggtctcgtgatctgcgacggcgatctcgtgggcaagttttcgctctccgacacctgcaggaccggggcggccgaggcgatcttgcagctgcgatcaatggggatcaagtcagtgatgctcaccggggacagcgaagcggcggccaagcacgcgcaggagcagctcggcggcgtcctggaggagctccactcggggctcctcccggaggacaaggtccggctcatccgggggctccaggcgcggcacggggcgacgctgatggtcggcgacggcatgaacgacgcgccggcgctcgccgcggcggacgtgggcgtgtccatgggcctgtccgggtcggcggccgccatcgagacgagccacgccacgctcatgtccggcgacgtcctgcgggtgcccaaggccgtcaggctcgggcgccgcacccgccggaccatcgccgtcaacgtggcctcctccgtcggcgccaaggccgccgtcctggcgctcgccgtcgcgtggcgccccgtgctgtgggtggccgtgctcgccgacgtcggcacgtgcctgctcgtcgtgctgcacagcatgctgctgctgagggacgcggcccgcgcgcggcggaggtgcggcggggcgtccaaggcgtgctgtgctacggcgtgcaaggcgcccaagacagcgtgctgcgctacggcgtccaaggcgtgtggcgcgacgacggtgaagcctgtggccacgaggccccagcccgcgggcgcagggaagaaggccgataggccaggaggtgacaagcatggtaatggtaaagacgactgccatcgttgctgccacaagcagagcaagctgcccgaggacgccgtcgtgatcgccataccggtacgagccgtggagcaccggaaggacgcggccgctcacgagaaggcggaaggcaacgccgccgggggatgctgcggtggcgctcccgcttcggccgcgtgctgcgcggaagcacacggtggcgaggacgaggtgtgcattgtcatcagcgcgaggtcgccctgctgcagcacggcgaggagtcggtctgcttctcccaaggacgccatgtgctgcggctccggtggtaaagacggcggcgccatctcagcccttgtgtgctgacctgacctacaacactagcatctgtggaatatcacgagtacgacttcgtagagtgctcttgtactacgctccccttagatcagttgggaatagtggctggcccattgtcagccttgtttttttttcatcaccgtcgccagcttgtgcgttgccatggtgaaatgaaaacagctgttcaattttcagctcctgctgggcactctagtatggtctcattccctaccttttagatgcaaataccgcagcaaggttgcacgcatatttcagaactaggtatgttatca

SEQ ID NO: 218032 - DNA, 3150 bp, Zea Mays
aaatgatgtagttaaaaataggaattcaaggggggaagcctgaaaactcgctggacagggccacgccaaggatggaggagcagccggtggctaaaattttggctggctccgcgggcgcacgtcgtttagcgtttccgctcgccttgggaccttgcccctggccctccgagatgccgggaccggccgtggaggcagcggccaggggcggcggctgctgcgggaagacggccggcaagtgggagaagacgtacctggatgtcctgggcatctgctgcaccgctgaggtggcgctcgttgagcggctcctggcgcccatcaacggcgtgagggcggtcaccgtcgtcgtcccctcccggaccgtcatcgtcgaccacgacacggccgccgtctcccagttccacatcggttctgaacaaggcgggcctcgaggcctccgtccgagcctatggcagcagcgccggcgcccccgggcggtggcccagcccgttcatcgtggcctgcggcgtgctgctcgcggcgtccctgttcgcgccgctcctccctccgctgcggtggctggcggtggcggcggcctgcgtggggtcccagcccatgctgctgagggcgttcgcggcggccggcaagctcaccctggacatcaacatcctgatgctcatcgcggtggccggggccgtggcgctcgggagctacacggaggcgggcgccatcgtgttcctcttcaccgtggccgagtggctggagacgctggcgtgcaccaaggccagcgccgggatgctgtccctgatgtcctcggtgcccaagaccgtggtgctcgccgagacggggcaggtcgtcggcatgggtgacgtggcggtcggcacggtcgtcgcggtcagggccggggacgtggtccccgtggacggtgttgtggtcggcgggcagagcgaggtcgacgagagcagcctcaccggcgagtccttccccgtgccgaagcaggcgcagtccgaggtctgggccggcaccatcaacttggatgatgtcgtgtgatgccgcaggttacatctccgtgcggacgacggccctcgccgagaactcgacggtggcgaagatggagaggctggtggaggaggcccagaacagccggtccaggacgcagcggctcatcgactcgtgcgccaagcactacacccctgccgtggtcgtcctcgccgccggggtggtcctcgtgcccgtcctgctgggagctcccgacctggagcactggttccggctgtccctggtgctgctggtgagcgcgtgcccgtgcgcgctggtgctgtccacgcccgtcgccaccttctgcgcgctcctgcgggcggccaggatggggctcctcgtcaagggaggcaacgttcttgagtcgctgggcgaggtcagggtcgccgcgttcgacaagaccgggaccatcaccagaggcgagttcagcatcaaggacttccttgtggtgagggacaaggttcaaatgagccagctactttactgggtatctagcatcgagagcaaatcaagccacccaatggctgctgcacttgtcgagtatgcccagtccaaatctatacagccgaagccggaggacgtgactgagacttgcatctaccatggcgagggcatctatggggccatcaatggaaaacacatctacatcggaaacgaaaggatcatggcaaggtcctcgtgtcgtcaacaagctggccaccgagaaacagatggcctcaaaggcgtgtccgttggtctcgtgatctgcgacggcgatctcgtgggcaagttttcgctctccgacacctgcaggaccggggcggccgaggcgatcttgcagctgcgatcaatggggatcaagtcagtgatgctcaccggggacagcgaagcggcggccaagcacgcgcaggagcagctcggcggcgtcctggaggagctccactcggggctcctcccggaggacaaggtccggctcatccgggggctccaggcgcggcacggggcgacgctgatggtcggcgacggcatgaacgacgcgccggcgctcgccgcggcggacgtgggcgtgtccatgggcctgtccgggtcggcggccgccatcgagacgagccacgccacgctcatgtccggcgacgtcctgcgggtgcccaaggccgtcaggctcgggcgccgcacccgccggaccatcgccgtcaacgtggcctcctccgtcggcgccaaggccgccgtcctggcgctcgccgtcgcgtggcgccccgtgctgtgggtggccgtgctcgccgacgtcggcacgtgcctgctcgtcgtgctgcacagcatgctgctgctgagggacgcggcccgcgcgcggcggaggtgcggcggggcgtccaaggcgtgctgtgctacggcgtgcaaggcgcccaagacagcgtgctgcgctacggcgtccaaggcgtgtggcgcgacgacggtgaagcctgtggccacgaggccccagcccgcgggcgcagggaagaaggccgataggccaggaggtgacaagcatggtaatggtaaagacgactgccatcgttgctgccacaagcagagcaagctgcccgaggacgccgtcgtgatcgccataccggtacgagccgtggagcaccggaaggacgcggccgctcacgagaaggcggaaggcaacgccgccgggggatgctgcggtggcgctcccgcttcggccgcgtgctgcgcggaagcacacggtggcgaggacgaggtgtgcattgtcatcagcgcgaggtcgccctgctgcagcacggcgaggagtcggtctgcttctcccaaggacgccatgtgctgcggctccggtggtaaagacggcggcgccatctcagcccttgtgtgctgacctgacctacaacactagcatctgtggaatatcacgagtacgacttcgtagagtgctcttgtactacgctccccttagatcagttgggaatagtggctggcccattgtcagccttgtttttttttcatcaccgtcgccagcttgtgcgttgccatggtgaaatgaaaacagctgttcaattttcagctcctgctgggcactctagtatggtctcattccctaccttttagatgcaaataccgcagcaaggttgcacgcatatttcagaactaggtatgttatca

SEQ ID NO: 218033 - DNA, 1423 bp, Zea Mays
gtcttttaccagaataatctcaaataagctactcttggggagattatgagattatcataatctaggttttaaattatataatctaaatccataatctagttgtttgtttacctaatggattatttgcgctagattatataatctggagagattataatctgaaacaaacaggtcctaagtctattaagcggtaaaatggttcaataaatcaaacggactagtggttccccttcagttttatagaatataatttcagggatttgggcaggcaactgtcatagtatataaactcatatgttattgttctacctaatgtttctctccagcgtagcgcaaaagggccacggataggactgctgtcttttcactttcagttgtcaatactgactggaagttaatcctgaacttgatgggttgcaatactgactggaagttgctatttttttaccgagaaaactggaagttgctgttgttcgaaacccgcaagagaaagcctttcggtcccatgttgaatgtgatatctttgttctgtctgaaaataatcgcaaaagagcataaacattttggtcgacatttatgatgactctatcgttcagtttaacgcagaagaagtggttgaataccagcttgagtccttaaaatacaatgaccagccccggcaagattatgggatagaggtcatgtaccggtttgcaggctttgaaccccttcgaaaggtcaacttagtttggatgacagtttggtctaggacaggtggtctgaaacctattcctactggctttacactggcagccagactgtgttacttactgattgccgccaatactgttcctgtttgaacgcttccggcgtctgttccaccattcagcttacagagcgctgctgggccacaaaggaagaaacatactaagcactaagcagcttatgggttgaagaggaccggtttaaacaaagagtttggttagaaggagcccggccagaggaggaagaaatatttcaatccacaatggttcagagagtcggaggctcatgggatggttactggctaacggagagcttaataataaacgatggagacgcattctcgggtcgcttactgatgtagtgaattggtccaaatcaggtgcgttgaactcatgcggatacaggtcaatgacgtgatcaagcagcagcccgtgttctcggttctcgcgacctacgacggcttaaaatgcattgtttttacagtacagaacagagaccgctgtgctgcaatgaatatatttgtagtaacgggattcacactcaccggaaaggctacctaggaggaaacttgcagtgcttgcgattgggcacgtcagtagcgtgcttgtgagacgaaaggaacatgagatcggctgtgtatatccatcctctgaccactatgtatgatctatgcagtgtg

SEQ ID NO: 218034 - DNA, 3290 bp, Zea Mays
ccgcggcggcggctgacgggctgagaataggagagagaaacccctctttctcttcctctccttctcgacgaacccgtcccacaagcacgtgcgagccaaggcagacaagagcgaggtggagagagggagagagagtgagtgagagaggaaaaccccgcccccgtccaggcaaccttcgtcgacgcatacggcggaggccacagaggcgccacgcgagggagccccgccgcagcagcggccgcgaattcggcacccccggatctccttgccggcgcccggggccccgatcgcctcctccccatggtcgtgcccctccgggcgttctcctcgcgcgggcgcctgccatgtcggacctcgcttccaccagcaaggataaacttgcgtattttagaataaaggagctcaaagatatcttaaatcagctggggttgccgaagcatggaaagaagcaggaccttgttgacagggtattggcagaattatcagatgagcaaggtcaacgccatcatggatggggaaggaaaaatgctcttacaagggaggcggtggcaaaagttgttgatgacacatacagcaggaaaatgcaagtatgtgctcctgaccttccctctaggagtcacagtgggtcagatttcaatcattttaggcccaaagaggaagccactgacttctactatgtggagactaaggtccgctgcctttgcaatagcacaatgctaaatgacaagattatcaagtgtgaagatggcaaatgccagctgtggcagcattttacctgcgtactcattccagatacacccacggagggtgctggccctgatattccacctcatttttattgtgaactgtgccgactgaaccgggcagatccgttttgggtgactacagcaaatccactactacctgtgaaatttatctcatctggtgttggaaatgatggagcaagcgcacctcaaattgtggagaagaccttccaactttcccgagcagaaagagaaacagtccagaggccagaatacgatctccaggtttggtgcattcttgtaaatgacaaagtccagttcaggatgcaatggcctcaatatgcagaattgcaagtgaacggtattcctgtacgagtaatgaccaggcctggttctcagttactagggataaatggacgtgatgatgggccactggtaaccacatgcagtagagaagggattaataaaattagcttatcaagagttgatgctcgaaccttttgctttggagttcgaattgttaggaggaggactgttcctcaggtattaagcttgatcccaaaggaaggtgaaggggagtcttttgaggatgctcttgctcgtgttcgtcgttgtcttggaggtggaggtgctacagacaatgctgatagtgatagcgatctggaagtggttactgaatctgttacagtcaaccttcgttgccctaatagtggatccagaatgaggattgctggaaggttcaagccttgtgttcacatgggctgttttgatcttgaaacttttgtggaattgaatcaacgctcacgcaagtggcaatgcccaatatgtttaaataattactctctcgagaacttgatgattgatccttatttcaatcggattacttctttgttgcacaattgcagtgaagatgttaatgaacttgatgttaaacctgatgggtcatggcgtgtgatgggtgatgccgctaccagagatttatctcagtggcatatgcctgatggtactctttgtgactcaaaggaagatacaaaccctggtgtcgcaagtgttaatgagttcaagagagagggtgcttctgatgaacatagaactttgaaacttggaattaaaaaaaaccctattggattatggcaggttagcagtaaagcagatgatatgaaacctgtggttagaaatcacatccaaaataacactgggttttcaacaccaaacattgtgcctatgatcagtagccccactgggagttacagagatggcgaagatgtaagtgtgaaccaagaagggggtggtattcaatttgatatatcattgaaccaagagtttgacagttttgcccacaactttggtcagacatacaatacagaggatagaccacaacatccacaccataatgctgcagatgtcattgttcttagtgattctgatgaagaaaatgacccgactgttcagccgccagctgtctatgaaaatactcctacaaatgatgacagttttcctttcgtcactgatgctgccggatctggatatcctgaaaggtaccaggaggatgctagtgttggtacaagtggtcttggtttattgaggcagaacactggtgaatttgaaataaataactggcaaatgctttcttacccacaaccagagcaagggtttcagttttttgtgactgatactgatgttggcaatccttttgttgctccacataattcctttactattgcaccagaagactactctcttggctgtaatgttggaatagaggacccctctgcagctcacgatgtttcaatttgccgaaacagtaatgatgtgcatggaagcttggttgataacccactggcattaacaggtgacgatccatctttgcaaatttttcttccaagtcaaccttccactgttccccttcagcaagaattgagtgagcgttctgatactccaaatggagtccaccctaacgattggaggatatcgcttacgcttgccgctggtggagggggcaatgaagagtctacaagtgttggcggtctaaaatcacaaccaaaagtttcatcgaaagagcttctgctcttggaagcatgaacaatgacagatgcactggatctaatctaaatcctaaaaggattgaaaatatattttctcatcctcgccaaccgcggtctgttaggcctcgtctgtgtttgtcattagatactgattcagagtagtttggacatcacactgggatagctgaatttgctattaatctggtaaagttggcttccagaatcttgatcgttactgtggagggctatctggttattctggttgatacaaagagatacaccagtgtggatgctttgttgcattaacctggtaagattcaagtgttctatatgatccaagtgggatctgcatagagttcatctaatgaccgatctctatcatgcatcccttctggatctcgctgccgctgccgcgccgccgcagatgacccaggtgggggtatgcggtgggcggcggtgctagatttggtggggttgagagaggaggcagcttcatgccctt

SEQ ID NO: 218035 - DNA, 3343 bp, Zea Mays
ccgcggcggcggctgacgggctgagaataggagagagaaacccctctttctcttcctctccttctcgacgaacccgtcccacaagcacgtgcgagccaaggcagacaagagcgaggtggagagagggagagagagtgagtgagagaggaaaaccccgcccccgtccaggcaaccttcgtcgacgcatacggcggaggccacagaggcgccacgcgagggagccccgccgcagcagcggccgcgaattcggcacccccggatctccttgccggcgcccggggccccgatcgcctcctccccatggtcgtgcccctccgggcgttctcctcgcgcgggcgcctgccatgtcggacctcgcttccaccagcaaggataaacttgcgtattttagaataaaggagctcaaagatatcttaaatcagctggggttgccgaagcatggaaagaagcaggaccttgttgacagggtattggcagaattatcagatgagcaaggtcaacgccatcatggatggggaaggaaaaatgctcttacaagggaggcggtggcaaaagttgttgatgacacatacaggaaaatgcaagtatgtgctcctgaccttccctctaggagtcacagtgggtcagatttcaatcattttaggcccaaagaggaagccactgacttctactatgtggagactaaggtccgctgcctttgcaatagcacaatgctaaatgacaagattatcaagtgtgaagatggcaaatgccagctgtggcagcattttacctgcgtactcattccagatacacccacggagggtgctggccctgatattccacctcatttttattgtgaactgtgccgactgaaccgggcagatccgttttgggtgactacagcaaatccactactacctgtgaaatttatctcatctggtgttggaaatgatggagcaagcgcacctcaaattgtggagaagaccttccaactttcccgagcagaaagagaaacagtccagaggccagaatacgatctccaggtttggtgcattcttgtaaatgacaaagtccagttcaggatgcaatggcctcaatatgcagaattgcaagtgaacggtattcctgtacgagtaatgaccaggcctggttctcagttactagggataaatggacgtgatgatgggccactggtaaccacatgcagtagagaagggattaataaaattagcttatcaagagttgatgctcgaaccttttgctttggagttcgaattgttaggaggaggactgttcctcaggtattaagcttgatcccaaaggaaggtgaaggggagtcttttgaggatgctcttgctcgtgttcgtcgttgtcttggaggtggaggtgctacagacaatgctgatagtgatagcgatctggaagtggttactgaatctgttacagtcaaccttcgttgccctaatagtggatccagaatgaggattgctggaaggttcaagccttgtgttcacatgggctgttttgatcttgaaacttttgtggaattgaatcaacgctcacgcaagtggcaatgcccaatatgtttaaataattactctctcgagaacttgatgattgatccttatttcaatcggattacttctttgtgaagatgttaatgaacttgatgttaaacctgatgggtcatggcgtgtgatgggtgatgccgctaccagagatttatctcagtggcatatgcctgatggtactctttgtgactcaaaggaagatacaaaccctggtgtcgcaagtgttaatgagttcaagagagagggtgcttctgatgaacatagaactttgaaacttggaattaaaaaaaaccctattggattatggcaggttagcagtaaagcagatgatatgaaacctgtggttagaaatcacatccaaaataacactgggttttcaacaccaaacattgtgcctatgatcagtagccccactgggagttacagagatggcgaagatgtaagtgtgaaccaagaagggggtggtattcaatttgatatatcattgaaccaagagtttgacagttttgcccacaactttggtcagacatacaatacagaggatagaccacaacatccacaccataatgctgcagatgtcattgttcttagtgattctgatgaagaaaatgacccgactgttcagccgccagctgtctatgaaaatactcctacaaatgatgacagttttcctttcgtcactgatgctgccggatctggatatcctgaaaggtaccaggaggatgctagtgttggtacaagtggtcttggtttattgaggcagaacactggtgaatttgaaataaataactggcaaatgctttcttacccacaaccagagcaagggtttcagttttttgtgactgatactgatgttggcaatccttttgttgctccacataattcctttactattgcaccagaagactactctcttggctgtaatgttggaatagaggacccctctgcagctcacgatgtttcaatttgccgaaacagtaatgatgtgcatggaagcttggttgataacccactggcattaacaggtgacgatccatctttgcaaatttttcttccaagtcaaccttccactgttccccttcagcaagaattgagtgagcgttctgatactccaaatggagtccaccctaacgattggaggatatcgcttacgcttgccgctggtggagggggcaatgaagagtctacaagtgttggcggtctaaaatcacaaccaaaagtttcatcgaaagaggcaggagttgaacctttacttgatgctgcctgtcaagcatttccaggatcatcgaggttaacttttgaagcttctgctcttggaagcatgaacaatgacagatgcactggatctaatctaaatcctaaaaggattgaaaatatattttctcatcctcgccaaccgcggtctgttaggcctcgtctgtgtttgtcattagatactgattcagagtagtttggacatcacactgggatagctgaatttgctattaatctggtaaagttggcttccagaatcttgatcgttactgtggagggctatctggttattctggttgatacaaagagatacaccagtgtggatgctttgttgcattaacctggtaagattcaagtgttctatatgatccaagtgggatctgcatagagttcatctaatgaccgatctctatcatgcatcccttctggatctcgctgccgctgccgcgccgccgcagatgacccaggtgggggtatgcggtgggcggcggtgctagatttggtggggttgagagaggaggcagcttcatgccctt

SEQ ID NO: 218036 - DNA, 2930 bp, Zea Mays
ccaagggcgaagattgctttgttcgactttgatctcgctctcgctcgcaactcacctctccctctccactcgcacctcgccgccgtctacccgtctgctgtcctagccccgcttctgccgcagccatgaacccttccatgccaccgcctccgccgcgtaaccctaattccttttcgtcatccgcctccatgccaccttctccgctcccaaacccctcgccgccgacggcacggccggaggcggcgtccgagcccgacttgtcttcagcggaggtgaacggtcgcgctaaccctagcacatcctcctcgatgcctccgcctccgcctcaaaaacccgccccaccggcaccgcagatggaagcgaaggcggcagaggctgagggaggcgctgtcccgagcccgagcgtgagcggttcgtcagcgaaggaggcgcccaacagcagcggggcctcctccggcaacaacgtgatggaggaagcggccgcgtcgccggtggagcggcagagggctcgcgcgccgtacgccattcccgagtggagcaccgcgccgagccaacccttcttccttgaggtgctcaaggacgggacgatcgttgatcagcttgacgtgtccaagaaaggagcttacatgtttggtcgaattgatctgtgcgattttgtattggagcatccaaccatttctcgattccatgctgttttgcagttcagaaatgatgggaaggttttcctttttgatcttggaagcacacatggatcctttatcaataaaaatctgatcaagaagaagctgtacacagagattcatgttggagatgtaattcgatttgggcaatcatcacggctgtacatttttcaaggaccatctgagctaatgcctccagaaaaagacttgcagaagcttcgggatgctagaattcagcaagacatgcttgatcgtgaagcttccattttacgtgcaaaaactcaagcagctttggcagagggaatctcatggggtatgacagatgatgcaatagaagagtctgcagagatgaaattacttggcaaacctacaaaggtcagcttactgatagacaagagaaaactcgtagcaagatagtaaaacgaatggagaagattgccaacatgaaaaaagaaattgatgcaataagagttaaggacatttctcaaggtgggctaacccaaggtcaacaaacacaaattgcacgaaatgaacaacggatgtctcagattatggaggagctagataatctagaagaaactttaaatgacagtatacgggaaagtattggtgctcgttctggaaaggcaaagcgtggcagctataaagcaagtctcgaggaagaagatgacgttcttagtgacgatgatgaattttatgatcgaacgaagaagaaatctactcagaaatcaagtgagcaacaatcggttgagactgctgacagccttcttgagaaaaaagatttcatcaccaatgatattgaaagtaaaacaaaattgctggaagaagagaagcataagctgtctcagagtgatacaccagatctcagggatgaccttgatgcttatatgagtggcttgtcatctcaattagtacatgataagattgcccgaattcagaaggagctctctgatcttcaggatgagctggacagagtagtgtacctactgaaaatagctgaccctacgggagaagcagctcgtaagagggatctaaagccaagagaagcgaaacctccaacatctaatgataatccaagactagaatcaaagaaacaaaataaaattggaaaagctacagctgaggagaaacccaaggattcttctagcgaagtgggcacagataaacctgctaaattacagacagatatctccaagaaccaagaagatggcagcaaacctgcattcgccatgccaaaacctcaatggcttggtgacaaaaggatcataaaacctgaagaaaaccttataaatgaagaaaagtctgatgcagaggaacctgataattttgtggactacaaagaccggaaaattattctttcttcaggcagtgaaaagaagcttgaagaggctgcccctgggcttattttacggaagagaaagtctgctgacgagtcagttgctagcgaggcaaattcatcttcggttgaaagtgaagcatcagttgctgatgctgtggcccttctgcttaagcataaacgtggtctacaaacctcagaagaaatggagaatgagactgaaccatattctagcaagaccgaagggaagaagtcgaaacaaaaacgtgtattgggcccagcaagaccagatttccttgaagccagacaagactctgaaacatgggtgccacctgaaggtcaaactggtgatgggcgcactgcattgaatgaccgtttgggttattgaaaagctcttccagcaacagttcccttgtggagaagtgcagtatcgtgcctatggttttgagcctgtttggggctccatattctgtgaagacaacgcaatagaagttaagaatgcttattctgttgatggcaagtttggtgaaggaactattcattgactttttagggcgctagtgggactgtagctcggctaatcctctcacactctaagggtttgttcggttattttcaatctatatggattggaggggattgatataaattgggagagattttgagtactaggaattgaaaccccatcaattcctctcaatccatttcgattgtggtagaaccgaacatgacctaaagaggatatttaggctataaagaggttcaatgtgttaaggcctattaggtctaggcctactgcacacacacacacacacacatatatatatatatatatatatatatatagggaagaggtaatggaagccctgggcttcccctactaatggaagccccagccaggacgcggtcaaccc

SEQ ID NO: 218037 - DNA, 2860 bp, Zea Mays
ccaagggcgaagattgctttgttcgactttgatctcgctctcgctcgcaactcacctctccctctccactcgcacctcgccgccgtctacccgtctgctgtcctagccccgcttctgccgcagccatgaacccttccatgccaccgcctccgccgcgtaaccctaattccttttcgtcatccgcctccatgccaccttctccgctcccaaacccctcgccgccgacggcacggccggaggcggcgtccgagcccgacttgtcttcagcggaggtgaacggtcgcgctaaccctagcacatcctcctcgatgcctccgcctccgcctcaaaaacccgccccaccggcaccgcagatggaagcgaaggcggcagaggctgagggaggcgctgtcccgagcccgagcgtgagcggttcgtcagcgaaggaggcgcccaacagcagcggggcctcctccggcaacaacgtgatggaggaagcggccgcgtcgccggtggagcggcagagggctcgcgcgccgtacgccattcccgagtggagcaccgcgccgagccaacccttcttccttgaggtgctcaaggacgggacgatcgttgatcagcttgacgtgtccaagaaaggagcttacatgtttggtcgaattgatctgtgcgattttgtattggagcatccaaccatttctcgattccatgctgatcaagaagaagctgtacacagagattcatgttggagatgtaattcgatttgggcaatcatcacggctgtacatttttcaaggaccatctgagctaatgcctccagaaaaagacttgcagaagcttcgggatgctagaattcagcaagacatgcttgatcgtgaagcttccattttacgtgcaaaaactcaagcagctttggcagagggaatctcatggggtatgacagatgatgcaatagaagagtctgcagaggatgatgcagatgaaattacttggcaaacctacaaaggtcagcttactgatagacaagagaaaactcgtagcaagatagtaaaacgaatggagaagattgccaacatgaaaaaagaaattgatgcaataagagttaaggacatttctcaaggtgggctaacccaaggtcaacaaacacaaattgcacgaaatgaacaacggatgtctcagattatggaggagctagataatctagaagaaactttaaatgacagtatacgggaaagtattggtgctcgttctggaaaggcaaagcgtggcagctataaagcaagtctcgaggaagaagatgacgttcttagtgacgatgatgaattttatgatcgaacgaagaagaaatctactcagaaatcaagtgagcaacaatcggttgagactgctgacagccttcttgagaaaaaagatttcatcaccaatgatattgaaagtaaaacaaaattgctggaagaagagaagcataagctgtctcagagtgatacaccagatctcagggatgaccttgatgcttatatgagtggcttgtcatctcaattagtacatgataagattgcccgaattcagaaggagctctctgatcttcaggatgagctggacagagtagtgtacctactgaaaatagctgaccctacgggagaagcagctcgtaagagggatctaaagccaagagaagcgaaacctccaacatctaatgataatccaagactagaatcaaagaaacaaaataaaattggaaaagctacagctgaggagaaacccaaggattcttctagcgaagtgggcacagataaacctgctaaattacagacagatatctccaagaaccaagaagatggcagcaaacctgcattcgccatgccaaaacctcaatggcttggtgacaaaaggatcataaaacctgaagaaaaccttataaatgaagaaaagtctgatgcagaggaacctgataattttgtggactacaaagaccggaaaattattctttcttcaggcagtgaaaagaagcttgaagaggctgcccctgggcttattttacggaagagaaagtctgctgacgagtcagttgctagcgaggcaaattcatcttcggttgaaagtgaagcatcagttgctgatgctgtggcccttctgcttaagcataaacgtggtctacaaacctcagaagaaatggagaatgagactgaaccatattctagcaagaccgaagggaagaagtcgaaacaaaaacgtgtattgggcccagcaagaccagatttccttgaagccagacaagactctgaaacatgggtgccacctgaaggtcaaactggtgatgggcgcactgcattgaatgaccgtttgggttattgaaaagctcttccagcaacagttcccttgtggagaagtgcagtatcgtgcctatggttttgagcctgtttggggctccatattctgtgaagacaacgcaatagaagttaagaatgcttattctgttgatggcaagtttggtgaaggaactattcattgactttttagggcgctagtgggactgtagctcggctaatcctctcacactctaagggtttgttcggttattttcaatctatatggattggaggggattgatataaattgggagagattttgagtactaggaattgaaaccccatcaattcctctcaatccatttcgattgtggtagaaccgaacatgacctaaagaggatatttaggctataaagaggttcaatgtgttaaggcctattaggtctaggcctactgcacacacacacacacacacatatatatatatatatatatatatatatagggaagaggtaatggaagccctgggcttcccctactaatggaagccccagccaggacgcggtcaaccc

SEQ ID NO: 218038 - DNA, 2932 bp, Zea Mays
ccaagggcgaagattgctttgttcgactttgatctcgctctcgctcgcaactcacctctccctctccactcgcacctcgccgccgtctacccgtctgctgtcctagccccgcttctgccgcagccatgaacccttccatgccaccgcctccgccgcgtaaccctaattccttttcgtcatccgcctccatgccaccttctccgctcccaaacccctcgccgccgacggcacggccggaggcggcgtccgagcccgacttgtcttcagcggaggtgaacggtcgcgctaaccctagcacatcctcctcgatgcctccgcctccgcctcaaaaacccgccccaccggcaccgcagatggaagcgaaggcggcagaggctgagggaggcgctgtcccgagcccgagcgtgagcggttcgtcagcgaaggaggcgcccaacagcagcggggcctcctccggcaacaacgtgatggaggaagcggccgcgtcgccggtggagcggcagagggctcgcgcgccgtacgccattcccgagtggagcaccgcgccgagccaacccttcttccttgaggtgctcaaggacgggacgatcgttgatcagcttgacgtgtccaagaaaggagcttacatgtttggtcgaattgatctgtgcgattttgtattggagcatccaaccatttctcgattccatgctgttcagaaatgatgggaaggttttcctttttgatcttggaagcacacatggatcctttatcaataaaaatctgatcaagaagaagctgtacacagagattcatgttggagatgtaattcgatttgggcaatcatcacggctgtacatttttcaaggaccatctgagctaatgcctccagaaaaagacttgcagaagcttcgggatgctagaattcagcaagacatgcttgatcgtgaagcttccattttacgtgcaaaaactcaagcagctttggcagagggaatctcatggggtatgacagatgatgcaatagaagagtctgcagaggatgatgcagatgaaattacttggcaaacctacaaaggtcagcttactgatagacaagagaaaactcgtagcaagatagtaaaacgaatggagaagattgccaacatgaaaaaagaaattgatgcaataagagttaaggacatttctcaaggtgggctaacccaaggtcaacaaacacaaattgcacgaaatgaacaacggatgtctcagattatggaggagctagataatctagaagaaactttaaatgacagtatacgggaaagtattggtgctcgttctggaaaggcaaagcgtggcagctataaagcaagtctcgaggaagaagatgacgttcttagtgacgatgatgaattttatgatcgaacgaagaagaaatctactcagaaatcaagtgagcaacaatcggttgagactgctgacagccttcttgagaaaaaagatttcatcaccaatgatattgaaagtaaaacaaaattgctggaagaagagaagcataagctgtctcagagtgatacaccagatctcagggatgaccttgatgcttatatgagtggcttgtcatctcaattagtacatgataagattgcccgaattcagaaggagctctctgatcttcaggatgagctggacagagtagtgtacctactgaaaatagctgaccctacgggagaagcagctcgtaagagggatctaaagccaagagaagcgaaacctccaacatctaatgataatccaagactagaatcaaagaaacaaaataaaattggaaaagctacagctgaggagaaacccaaggattcttctagcgaagtgggcacagataaacctgctaaattacagacagatatctccaagaaccaagaagatggcagcaaacctgcattcgccatgccaaaacctcaatggcttggtgacaaaaggatcataaaacctgaagaaaaccttataaatgaagaaaagtctgatgcagaggaacctgataattttgtggactacaaagaccggaaaattattctttcttcaggcagtgaaaagaagcttgaagaggctgcccctgggcttattttacggaagagaaagtctgctgacgagtcagttgctagcgaggcaaattcatcttcggttgaaagtgaagcatcagttgctgatgctgtggcccttctgcttaagcataaacgtggtctacaaacctcagaagaaatggagaatgagactgaaccatattctagcaagaccgaagggaagaagtcgaaacaaaaacgtgtattgggcccagcaagaccagatttccttgaagccagacaagactctgaaacatgggtgccacctgaaggtcaaactggtgatgggcgcactgcattgaatgaccgtttgggttattgaaaagctcttccagcaacagttcccttgtggagaagtgcagtatcgtgcctatggttttgagcctgtttggggctccatattctgtgaagacaacgcaatagaagttaagaatgcttattctgttgatggcaagtttggtgaaggaactattcattgactttttagggcgctagtgggactgtagctcggctaatcctctcacactctaagggtttgttcggttattttcaatctatatggattggaggggattgatataaattgggagagattttgagtactaggaattgaaaccccatcaattcctctcaatccatttcgattgtggtagaaccgaacatgacctaaagaggatatttaggctataaagaggttcaatgtgttaaggcctattaggtctaggcctactgcacacacacacacacacacatatatatatatatatatatatatatatagggaagaggtaatggaagccctgggcttcccctactaatggaagccccagccaggacgcggtcaaccc

SEQ ID NO: 218039 - DNA, 2933 bp, Zea Mays
ccaagggcgaagattgctttgttcgactttgatctcgctctcgctcgcaactcacctctccctctccactcgcacctcgccgccgtctacccgtctgctgtcctagccccgcttctgccgcagccatgaacccttccatgccaccgcctccgccgcgtaaccctaattccttttcgtcatccgcctccatgccaccttctccgctcccaaacccctcgccgccgacggcacggccggaggcggcgtccgagcccgacttgtcttcagcggaggtgaacggtcgcgctaaccctagcacatcctcctcgatgcctccgcctccgcctcaaaaacccgccccaccggcaccgcagatggaagcgaaggcggcagaggctgagggaggcgctgtcccgagcccgagcgtgagcggttcgtcagcgaaggaggcgcccaacagcagcggggcctcctccggcaacaacgtgatggaggaagcggccgcgtcgccggtggagcggcagagggctcgcgcgccgtacgccattcccgagtggagcaccgcgccgagccaacccttcttccttgaggtgctcaaggacgggacgatcgttgatcagcttgacgtgtccaagaaaggagcttacatgtttggtcgaattgatctgtgcgattttgtattggagcatccaaccatttctcgattccatgctgttttgcagttcagaaatgatgggaaggttttcctttttgatcttggaagcacacatggatcctttatcaataaaaatctgatcaagaagaagctgtacacagagattcatgttggagatgtaattcgatttgggcaatcatcacggctgtacatttttcaaggaccatctgagctaatgcctccaacttgcagaagcttcgggatgctagaattcagcaagacatgcttgatcgtgaagcttccattttacgtgcaaaaactcaagcagctttggcagagggaatctcatggggtatgacagatgatgcaatagaagagtctgcagaggatgatgcagatgaaattacttggcaaacctacaaaggtcagcttactgatagacaagagaaaactcgtagcaagatagtaaaacgaatggagaagattgccaacatgaaaaaagaaattgatgcaataagagttaaggacatttctcaaggtgggctaacccaaggtcaacaaacacaaattgcacgaaatgaacaacggatgtctcagattatggaggagctagataatctagaagaaactttaaatgacagtatacgggaaagtattggtgctcgttctggaaaggcaaagcgtggcagctataaagcaagtctcgaggaagaagatgacgttcttagtgacgatgatgaattttatgatcgaacgaagaagaaatctactcagaaatcaagtgagcaacaatcggttgagactgctgacagccttcttgagaaaaaagatttcatcaccaatgatattgaaagtaaaacaaaattgctggaagaagagaagcataagctgtctcagagtgatacaccagatctcagggatgaccttgatgcttatatgagtggcttgtcatctcaattagtacatgataagattgcccgaattcagaaggagctctctgatcttcaggatgagctggacagagtagtgtacctactgaaaatagctgaccctacgggagaagcagctcgtaagagggatctaaagccaagagaagcgaaacctccaacatctaatgataatccaagactagaatcaaagaaacaaaataaaattggaaaagctacagctgaggagaaacccaaggattcttctagcgaagtgggcacagataaacctgctaaattacagacagatatctccaagaaccaagaagatggcagcaaacctgcattcgccatgccaaaacctcaatggcttggtgacaaaaggatcataaaacctgaagaaaaccttataaatgaagaaaagtctgatgcagaggaacctgataattttgtggactacaaagaccggaaaattattctttcttcaggcagtgaaaagaagcttgaagaggctgcccctgggcttattttacggaagagaaagtctgctgacgagtcagttgctagcgaggcaaattcatcttcggttgaaagtgaagcatcagttgctgatgctgtggcccttctgcttaagcataaacgtggtctacaaacctcagaagaaatggagaatgagactgaaccatattctagcaagaccgaagggaagaagtcgaaacaaaaacgtgtattgggcccagcaagaccagatttccttgaagccagacaagactctgaaacatgggtgccacctgaaggtcaaactggtgatgggcgcactgcattgaatgaccgtttgggttattgaaaagctcttccagcaacagttcccttgtggagaagtgcagtatcgtgcctatggttttgagcctgtttggggctccatattctgtgaagacaacgcaatagaagttaagaatgcttattctgttgatggcaagtttggtgaaggaactattcattgactttttagggcgctagtgggactgtagctcggctaatcctctcacactctaagggtttgttcggttattttcaatctatatggattggaggggattgatataaattgggagagattttgagtactaggaattgaaaccccatcaattcctctcaatccatttcgattgtggtagaaccgaacatgacctaaagaggatatttaggctataaagaggttcaatgtgttaaggcctattaggtctaggcctactgcacacacacacacacacacatatatatatatatatatatatatatatagggaagaggtaatggaagccctgggcttcccctactaatggaagccccagccaggacgcggtcaaccc

SEQ ID NO: 218040 - DNA, 2066 bp, Zea Mays
atgaagattgagcaggaaaaagacttgcagaagcttcgggatgctagaattcagcaagacatgcttgatcgtgaagcttccattttacgtgcaaaaactcaagcagctttggcagagggaatctcatggggtatgacagatgatgcaatagaagagtctgcagaggatgatgcagatgaaattacttggcaaacctacaaaggtcagcttactgatagacaagagaaaactcgtagcaagatagtaaaacgaatggagaagattgccaacatgaaaaaagaaattgatgcaataagagttaaggacatttctcaaggtgggctaacccaaggtcaacaaacacaaattgcacgaaatgaacaacggatgtctcagattatggaggagctagataatctagaagaaactttaaatgacagtatacgggaaagtattggtgctcgttctggaaaggcaaagcgtggcagctataaagcaagtctcgaggaagaagatgacgttcttagtgacgatgatgaattttatgatcgaacgaagaagaaatctactcagaaatcaagtgagcaacaatcggttgagactgctgacagccttcttgagaaaaaagatttcatcaccaatgatattgaaagtaaaacaaaattgctggaagaagagaagcataagctgtctcagagtgatacaccagatctcagggatgaccttgatgcttatatgagtggcttgtcatctcaattagattgcccgaattcagaaggagctctctgatcttcaggatgagctggacagagtagtgtacctactgaaaatagctgaccctacgggagaagcagctcgtaagagggatctaaagccaagagaagcgaaacctccaacatctaatgataatccaagactagaatcaaagaaacaaaataaaattggaaaagctacagctgaggagaaacccaaggattcttctagcgaagtgggcacagataaacctgctaaattacagacagatatctccaagaaccaagaagatggcagcaaacctgcattcgccatgccaaaacctcaatggcttggtgacaaaaggatcataaaacctgaagaaaaccttataaatgaagaaaagtctgatgcagaggaacctgataattttgtggactacaaagaccggaaaattattctttcttcaggcagtgaaaagaagcttgaagaggctgcccctgggcttattttacggaagagaaagtctgctgacgagtcagttgctagcgaggcaaattcatcttcggttgaaagtgaagcatcagttgctgatgctgtggcccttctgcttaagcataaacgtggtctacaaacctcagaagaaatggagaatgagactgaaccatattctagcaagaccgaagggaagaagtcgaaacaaaaacgtgtattgggcccagcaagaccagatttccttgaagccagacaagactctgaaacatgggtgccacctgaaggtcaaactggtgatgggcgcactgcattgaatgaccgtttgggttattgaaaagctcttccagcaacagttcccttgtggagaagtgcagtatcgtgcctatggttttgagcctgtttggggctccatattctgtgaagacaacgcaatagaagttaagaatgcttattctgttgatggcaagtttggtgaaggaactattcattgactttttagggcgctagtgggactgtagctcggctaatcctctcacactctaagggtttgttcggttattttcaatctatatggattggaggggattgatataaattgggagagattttgagtactaggaattgaaaccccatcaattcctctcaatccatttcgattgtggtagaaccgaacatgacctaaagaggatatttaggctataaagaggttcaatgtgttaaggcctattaggtctaggcctactgcacacacacacacacacacatatatatatatatatatatatatatatagggaagaggtaatggaagccctgggcttcccctactaatggaagccccagccaggacgcggtcaaccc

SEQ ID NO: 218041 - DNA, 370 bp, Zea Mays
aaccaacgcggacctagggtttccttcctcatccagtgttctgtcctagcgccgccgccgccccagctcgccttgcgtgactgagagctcgtcggcttccgtccacgcgtgaagcgagagcatggacacccaggtgaagcttgctgttgtggtgaaggtgatgggcaggaccggctccaggggtcaggtgacccaggtcagagtgaagtttttggatgaccagaaccggctcatcatgaggaatgtcaaggggcccgttcgcgagggtgacatcctcaccctgctcgagtccgagagggaggccaggaggctgcgctgaagccctagcgttcttggaaggccttcagtcgggtactgtccatgcttgagt

SEQ ID NO: 218042 - DNA, 1770 bp, Zea Mays
aaccaacgcggacctagggtttccttcctcatccagtgttctgtcctagcgccgccgccgccccagctcgccttgcgtgactgagagctcgtcggcttccgtccacgcgtgaagcgagaggtgcgactcttctgtctccatccatccccccttaaacgtttcctgtttgcatggcttgattcatgtgtgagcgttctgaatcctctggtcttaggcgcttgttctggttccacatagtatgcgatgcatgagactagtagctcgattttttaaattttttctgtttgatgctgtgtgactattctcgtgtgttgttcttcctttttgatgtgatccgtagacactatgtggtacaaccttgaagagtatcctaggttttagattcctccgtgaatgaaactgatctgtatgttagtctatttaaacatcatgaataactcatatttgttctagaataatatgtatttcaagtgttgtggaactaaacatcgatgttttgggcatagtatcaccggattacttcgtttgttatgttggatgttgtgcgactgctaaactagtgatcgtgtgggtcgatttttgctgtgatcctactttgtggtacaacctaagagggtccttgagtgaacattacaagcatgctgaccaacacttatcccttagctcagtgactcgacaatattgacttgcttttgcttgataacctagtaaacgaaacattattgcggaaacactcaagttcattctttttacctctccaatgcatggtaatatttataatatggattcgtgccagcaaggtgatagtatttacgctgccattgtgctagatgatgcattagggcatgtacagtggtgtttaatgtgggggctcttaaggtgttttagggggttatttgcaaaataatcttagagccgtctctccgtgaagagacgcctctggctcgtaaaccaagtaacaacagacgcctcacttcccactgtacgaatttgtcgtctgttctatcgatctgatgctatacaaatacatttaattctgtatttattaatagactacgtttatagacactccattgtacaatagagtctcttagttgtctcctttgcttggagaaccgttttggtgtctctccactgtacatgcccttaagttaacttctcttcataccacaaacacaatgtgctggataccagatagtgcgtgttgtgttcatggttttctcatgtgcatgtaatcctgttaatttgtttgtcagtttctgttcacaaagctccagtagcaacaaaccatgtgacagtgcagttaaaatgaactatgtgatcaaagcatatggttcaccttgattactgacaaatgctttctattaatgcagcatggacacccaggtgaagcttgctgttgtggtgaaggtgatgggcaggaccggctccaggggtcaggtgacccaggtcagagtgaagtttttggatgaccagaaccggctcatcatgaggaatgtcaaggggcccgttcgcgagggtgacatcctcaccctgctcgagtccgagagggaggccaggaggctgcgctgaagccctagcgttcttggtgggctcttggccgttggtgaggcgcggcctggctcccgggcgacagacggcgaggcggccatctactggcgatgggacgagaaagcgacagaagaaagaaatgaaaaacagaatgaactgttttttagttagtaaatcatgttccaggtttgatgattctaaaactgatggattacctct

SEQ ID NO: 218043 - DNA, 1384 bp, Zea Mays
ctccatttccttttgctgccctcccctcttgcatcatccttgttcatcgtctctccagccgcgcgcccagcagcagcgttctcgatcgatcagtcgtcgatccggccgtgtgttcttcttctgtatcactatcaccttcaccgcttcacctattcggccggccagctgctgatatcttcttcttcgctgccgcctgctgccgattaatttattcactcgacggcagcgacttcatcgtctatcataggaagctgagcaaagaagacgtagggtgcagccgtgcaggaggaatagagatagagagcttcaggtatatatagcaggcaggcaggctgtgtggttgatccggtgatctatatcgatccgtcgaggatgtgcaccaggggccactggagaccgtcggaggacgagaagctgaaggagctcgtcgcgctctacggcccgcacaactggaacgccatcgccgagaagcttcaagggagatcagggaaaagctgcaggctgaggtggttcaaccagctggacccgaggatcaaccggagccccttctcagagcaggaggaggcgctgctcctggcgtcccaccgcgtccacggcaaccggtgggccgtcatcgccaggctcttcccggggcgcaccgacaacgccgtcaagaaccactggcatgtgatcatggcgcggcggtgcagggagcggatgaggctctcgaacaggggcggcgccgctgctggccagcatggtgccgtcgacaccggtgctgtggaagatggcagtaaccctaggaacgccaagaagctgaggcctgatgccagcagcgtggcctccttcctagacaagtaccgaagagaattttccgtcgtcgtcccgtttgctattaaccatgatcgcaagcagcaggactattgttcaactactaacgaagcagacgcaaacaaatcggttgaattctacgattttctccaagtgaatgcgaactcgagcgacaccaagtgtggttcgagcatcgaggagcaggaggagaaccgggatgatcaagccgaagggcaggtgcagttcatagacttcctggaggttgtaatgctttgtgaaagacgcatatgctgcaaatggcaatcgtctgctagctaacaccaaacgtacttatagaggaagcagaatgcaccgcgtacatatatgacatgtaacttattgatatgtatacatatctgtccatatccgcgcgccgtttgggggccggtacacatgcaaaattattctgagataaatgaggaattaattattatttcatcatattttgtgaattctatatctgataattatatatagatttaaagaacgtttggttccctgtccgtttctaatatgacaattgatcagaatattg

SEQ ID NO: 218044 - DNA, 1467 bp, Zea Mays
atttccttttgctgccctcccctcttgcatcatccttgttcatcgtctctccagccgcgcgcccagcagcagcgttctcgatcgatcagtcgtcgatccggccgtgtgttcttcttctgtatcactatcaccttcaccgcttcacctattcggccggccagctgctgatatcttcttcttcgctgccgcctgctgccgattaatttattcactcgacggcagcgacttcatcgtctatcataggaagctgagcaaagaagacgtagggtgcagccgtgcaggaggaatagagatagagagcttcaggtatatatagcaggcaggcaggctgtgtggttgatccggtgatctatatcgatccgtcgaggatgtgcaccaggggccactggagaccgtcggaggacgagaagctgaaggagctcgtcgcgctctacggcccgcacaactggaacgccatcgccgagaagcttcaagggagatcagggaaaagctgcaggctgaggtggttcaaccagctggacccgaggatcaaccggagccccttctcagagcaggaggaggcgctgctcctggcgtcccaccgcgtccacggcaaccggtgggccgtcatcgccaggctcttcccggggcgcaccgacaacgccgtcaagaaccactggcatgtgatcatggcgcggcggtgcagggagcggatgaggctctcgaacaggggcggcgccgctgctggccagcatggtgccgtcgacaccggtgctgtggaagatggcagtaaccctaggaacgccaagaagctgaggcctgatgccagcagcgtggcctccttcctagacaagtaccgaagagaattttccgtcgtcgtcccgtttgctattaaccatgatcgcaagcagcaggactattgttcaactactaacgaagacgcaaacaaatcggttgaattctacgattttctccaagtgaatgcgaactcgagcgacaccaagtgtggttcgagcatcgaggagcaggaggagaaccgggatgatcaagccgaagggcaggtgcagttcatagacttcctggaggttggggtctctcatccccagtgatttatctgtattaatttctatatatatatatatatatatatttaactagggatgcatccaaagcaggttgtaatgctttgtgaaagacgcatatgctgcaaatggcaatcgtctgctagctaacaccaaacgtacttatagaggaagcagaatgcaccgcgtacatatatgacatgtaacttattgatatgtatacatatctgtccatatccgcgcgccgtttgggggccggtacacatgcaaaattattctgagataaatgaggaattaattattatttcatcatattttgtgaattctatatctgataattatatatagatttaaagaacgtttggttccctgtccgtttctaatatgacaattgatcagaatattg

SEQ ID NO: 218045 - DNA, 1343 bp, Zea Mays
tgacacaattatcgagtatagctccaggttgactcgaggggacgatcagcatcagcactaaagtgacttgtcaacgaaaaatagaaggaaaaaaaagcgacgagtcctcctctgtccattctctctcttctcttccttcgtcgtctcgtcgtcggcttctcgcatccgcctccgcctccgcctccgcctccgctccccgctgcgcgtcaccggaggagaggagagaaagtgagagaggggatccctccgacccgatccaccgacataacctccgccccctggatctcctccgtccccgcgcgacgccaggacagggttggcgaattgaatcagtaatatcagatattcagggatgttcccttcagttgtgccagctggttaattcgctattaccttctctgactgctcgtgcctgcatgtgtattgagaaggataccctggctgcgggacatccttagaaataaagctgttgcatttatgagttgaaactacatgttcttgcatcagttctggtaaaataattgggcaaggtaatgaaagaacccaataaaaaaagattgttaaaccgaattataagatgatggaacagcaaaacaaatagcattatatggatgtcttgcaccttctggctgcggcacttccttagaaataaagctgttgcgtttatgatttgaacctacgtgttcttgcattggttctggtaaaaaaatgggcaaggtaatgaaagaacccaataaaaaactaatagaatatattaaacgaattataagatgatggaacagcaaaacaaatagcattatatggatgtcttgcattttttatatattgaaagtagtaattgcagttagtggggatggcttcaatagcttgcatgtagagattgagagttagtcggtggtgatgtggcatctagtgaggatgacgtgcatgttgagattggaagctattggagggatgatttggcaattggcattagtggggggatgatctggatagtttgcagttgggtttgaaagctagtggtgctaagatatagatatagatttttgtttgtgaccctaatttttctataacattctatcggaaactggaacacaatacctattgcattgaggaaagttatatatatagactcaggggaaaccctaaccctaatggcccggcaacccaacagtggtgccgacccacacacacagtctaacatccccccgcattcgcaacgggggcaccgcacacgatgagactggagtagaagccgacgggttgaaattcctctgcagtcgcaacgtcgtgagggtgcgaatgttgcggttggagtagagaccggtgtagactccgagaag

SEQ ID NO: 218046 - DNA, 1656 bp, Zea Mays
gagagagtattaaaaatacattatattactatataatatgacacaattatcgagtatagctccaggttgactcgaggggacgatcagcatcagcactaaagtgacttgtcaacgaaaaatagaaggaaaaaaaagcgacgagtcctcctctgtccattctctctcttctcttccttcgtcgtctcgtcgtcggcttctcgcatccgcctccgcctccgcctccgcctccgctccccgctgcgcgtcaccggaggagaggagagaaagtgagagaggggatccctccgacccgatccaccgacataacctccgccccctggatctcctccgtccccgcgcgacgccaggacagggttgatggataatctctctccagccactctgctcaacagtatctcctgtcttggcgccctaacatctgatgtctctactgcgagacccaagcctattcacaagtattgcaaaaatgtatatgatatctcaagcatcgtgaccccccttcttgaagatctttgcaagtctcccgaagagcaactcgatgaggtcttaagagaccttgacaccgctgtcaatgaagcttcaggccttattggaaactggcaccagacaaccagcaaaatgtatttcggttggcgaattgaatcagtaatatcagatattcagggatgttcccttcagttgtgccagctggttaattcgctattaccttctctgactgctcgtgcctgcatgtgtattgagaaggataccctggctgcgggacatccttagaaataaagctgttgcatttatgagttgaaactacatgttcttgcatcagttctggtaaaataattgggcaaggtaatgaaagaacccaataaaaaaagattgttaaaccgaattataagatgatggaacagcaaaacaaatagcattatatggatgtcttgcaccttctggctgcggcacttccttagaaataaagctgttgcgtttatgatttgaacctacgtgttcttgcattggttctggtaaaaaaatgggcaaggtaatgaaagaacccaataaaaaactaatagaatatattaaacgaattataagatgatggaacagcaaaacaaatagcattatatggatgtcttgcattttttatatattgaaagtagtaattgcagttagtggggatggcttcaatagcttgcatgtagagattgagagttagtcggtggtgatgtggcatctagtgaggatgacgtgcatgttgagattggaagctattggagggatgatttggcaattggcattagtggggggatgatctggatagtttgcagttgggtttgaaagctagtggtgctaagatatagatatagatttttgtttgtgaccctaatttttctataacattctatcggaaactggaacacaatacctattgcattgaggaaagttatatatatagactcaggggaaaccctaaccctaatggcccggcaacccaacagtggtgccgacccacacacacagtctaacatccccccgcattcgcaacgggggcaccgcacacgatgagactggagtagaagccgacgggttgaaattcctctgcagtcgcaacgtcgtgagggtgcgaatgttgcggttggagtagagaccggtgtagactccgagaag

SEQ ID NO: 218047 - DNA, 2781 bp, Zea Mays
caaatcacaatagctgctagcctgttactgcaggcctctctctctctgtcctctccccagcccgcctccgcttctcgccggactccggccgccgcccgcaacctgtgcctagggctcccgcttccgccacacctgcgcactcggccccggagacggctccttgacgagaggcctgtgggaggagttgcagctgggacgcccggtcggacttgcgtctccgcagctgggagatgctcagctcgtcggcgtccaggagggacgccgcgaggagcggcgcggagctccctcggccgcacgcggtggcagggatggcgcggagcggggagctgcccaagggcgccccctccgcgacggcccctgatgcggtgcggtgcgagggatggatggtgcgccacggccggaggaagatcgggaggtccttcttccacacgcgctacttcgtcctcgacaacggcgtgctcgcgtactacaagaagaagccgagggaccacatgatcccactcaagtcaattattattgatggaaattgcagagtggaggatagagggcttaaaacacatcatggtcaaatgatttatttgctatgcatttacaacaagaaagaaaaggagaaccaaatcacgatgggtggatacgatattgaagatgccctagcctggaagaggaagatagagcttctgattgatcagcaacaggatactacgacagctaaaaaccataaagcttttgcttcgttggactttgatatagatcttggaggaccattttcgttctctgaccatgacagcggacccgaagatgaagaagagccccgacccaccttgcttcgcaggacaactatagggaatggccctcctgattctgtacttgattggaccaaagaggctgacagtgggctgtcaaatcagaatgccaccagtcaggcttactccagaaagaactggaggcttcttagatgccagaatggattgcgcatctttgaagaacttgtggaggttgaataccttgcaagaagctatagtcgagcaatgagggctgtaggagtggtggaagcctcatgcgaggccatttttgggcttgtaatgagcatggatgcatcacgatatgaatgggattgtagcttccaatatgggagtttagttgaagaggtcgatggtcatactgcaatactgtaccatcgtctacaactgaactggttttcaatgttggtctggccacgagatctttgttatgtacgctattggcggcgcaacgatgatggaagctatgttgtgctgtttcgatctaccgaaaatcagaactgtgggcctcaaccaggatttgtggaggtttcaagatttcccctctcaaaagcctcaatgggaggccccgcactcaagttcaacaccttatgcagattgatgttaggggatggggcgtgaactatttaccatcattccagtactactctttgctgcagatgctgaactgtgttgctggattgcgtgaatatttttcgcaaacagatgaaattcatacagttccaaggattccggtgatgcataccatggttaatgcggcctcaatgaaaaaggaccaaaaccttcaagaaccagactcgaagaccaaacaagctgataacaaacatttggatatggtagatgaagagtcggaagatgatgatgactatcaagttcctgatgctgatgtggaggaagaacctaccaaatctgacagtgatgctaagaactcagacccaatagatttgtcttggttttcgggcattattcgtcaggatacaaatgagaaaagtcgtaactgttgggcagtgcctgatagcaagatctttaaagttcgtagcaagaactttccacatgacaaatcaaaggtaccagcaggtaagtatctaatggagctcgtagcagttgactggtttaaggacgccaagcgcatggatcatgtcgctaggcggaaaggatctgcggttcaggttgccgctgagaagggaatgttcactttcctggtaaacatacaaattcctggaccaagtcattacagcttggtcctttattttgtctcaaactccttgaagaaaggatcgctgttgcagcgttttgccgatggtgatgatgattttagaaacagcagactgaagcttatcccatctgttccaaaggggtcttggatagtgcggcaaagtgttggaagcacaccttgcttgctggggaaagccgtggactgcagctatttgcgtggtcctgactacttagaagtggatgtagatatcggttcgtccgcggtagccaacggggtcctgggcttggtgtttggcgttgttaccaccttggtagtcgacatggcgtttcttatacaggcaaacacgtacgacgagctcccagagcagctcctaggcgctgcgcggctgtcacacatcgaaccttctgcggccgtgtatcctgtccttgacaacatttcctgaacgggacggacaaatcaacctgtgcagattctttcgttctttccgtccgccccgccacaaaaaggctctcccaatttgttcagccactgcagcattgtgcagctcgatacatttgaggttcagacagacagactgcagcagtccacaagtgccttgtacccttcatacagttttgccatttttttaggtcttttcttttacattttactttactcggtgtagtttgagcttcctacagatattgtaatgcaatagacacatcaaagtgagatatacagatacagcatggttcagaaacaagttcgtgtactttccgattcccg

SEQ ID NO: 218048 - DNA, 2828 bp, Zea Mays
caaatcacaatagctgctagcctgttactgcaggcctctctctctctgtcctctccccagcccgcctccgcttctcgccggactccggccgccgcccgcaacctgtgcctagggctcccgcttccgccacacctgcgcactcggccccggagacggctccttgacgagaggcctgtgggaggagttgcagctgggacgcccggtcggacttgcgtctccgcagctgggagatgctcagctcgtcggcgtccaggagggacgccgcgaggagcggcgcggagctccctcggccgcacgcggtggcagggatggcgcggagcggggagctgcccaagggcgccccctccgcgacggcccctgatgcggtgcggtgcgagggatggatggtgcgccacggccggaggaagatcgggaggtccttcttccacacgcgctacttcgtcctcgacaacggcgtgctcgcgtactacaagaagaagccgagggaccacatgatcccactcaagtcaattattattgatggaaattgcagagtggaggatagagggcttaaaacacatcatggtcaaatgatttatttgctatgcatttacaacaagaaagaaaaggagaaccaaatcacgatgggtggatacgatattgaagatgccctagcctggaagaggaagatagagcttctgattgatcagcaacaggatactacgacagctaaaaaccataaagcttttgcttcgttggactttgatatagatcttggaggaccattttcgttctctgaccatgacagcggacccgaagatgaagaagagccccgacccaccttgcttcgcaggacaactatagggaatggccctcctgattctgtacttgattggaccaaagaggctgacagtgggctgtcaaatcagaatgccaccagtcaggcttactccagaaagaactggaggcttcttagatgccagaatggattgcgcatctttgaagaacttgtggaggttgaataccttgcaagaagctatagtcgagcaatgagggctgtaggagtggtggaagcctcatgcgaggccatttttgggcttgtaatgagcatggatgcatcacgatatgaatgggattgtagcttccaatatgggagtttagttgaagaggtcgatggtcatactgcaatactgtaccatcgtctacaactgaactggttttcaatgttggtctggccacgagatctttgttatgtacgctattggcggcgcaacgatgatggaagctatgttgtgctgtttcgatctaccgaaaatcagaactgtgggcctcaaccaggatttgtgagagcttctatcgaaagtggaggtttcaagatttcccctctcaaaagcctcaatgggaggccccgcactcaagttcaacaccttatgcagattgatgttaggggatggggcgtgaactatttaccatcattccagtactactctttgctgcagatgctgaactgtgttgctggtacaaagaacacacaactatttaacctgattgcgtgaatatttttcgcaaacagatgaaattcatacagttccaaggattccggtgatgcataccatggttaatgcggcctcaatgaaaaaggaccaaaaccttcaagaaccagactcgaagaccaaacaagctgataacaaacatttggatatggtagatgaagagtcggaagatgatgatgactatcaagttcctgatgctgatgtggaggaagaacctaccaaatctgacagtgatgctaagaactcagacccaatagatttgtcttggttttcgggcattattcgtcaggatacaaatgagaaaagtcgtaactgttgggcagtgcctgatagcaagatctttaaagttcgtagcaagaactttccacatgacaaatcaaaggtaccagcaggtaagtatctaatggagctcgtagcagttgactggtttaaggacgccaagcgcatggatcatgtcgctaggcggaaaggatctgcggttcaggttgccgctgagaagggaatgttcactttcctggtaaacatacaaattcctggaccaagtcattacagcttggtcctttattttgtctcaaactccttgaagaaaggatcgctgttgcagcgttttgccgatggtgatgatgattttagaaacagcagactgaagcttatcccatctgttccaaaggggtcttggatagtgcggcaaagtgttggaagcacaccttgcttgctggggaaagccgtggactgcagctatttgcgtggtcctgactacttagaagtggatgtagatatcggttcgtccgcggtagccaacggggtcctgggcttggtgtttggcgttgttaccaccttggtagtcgacatggcgtttcttatacaggcaaacacgtacgacgagctcccagagcagctcctaggcgctgcgcggctgtcacacatcgaaccttctgcggccgtgtatcctgtccttgacaacatttcctgaacgggacggacaaatcaacctgtgcagattctttcgttctttccgtccgccccgccacaaaaaggctctcccaatttgttcagccactgcagcattgtgcagctcgatacatttgaggttcagacagacagactgcagcagtccacaagtgccttgtacccttcatacagttttgccatttttttaggtcttttcttttacattttactttactcggtgtagtttgagcttcctacagatattgtaatgcaatagacacatcaaagtgagatatacagatacagcatggttcagaaacaagttcgtgtactttccgattcccg

SEQ ID NO: 218049 - DNA, 2735 bp, Zea Mays
caaatcacaatagctgctagcctgttactgcaggcctctctctctctgtcctctccccagcccgcctccgcttctcgccggactccggccgccgcccgcaacctgtgcctagggctcccgcttccgccacacctgcgcactcggccccggagacggctccttgacgagaggcctgtgggaggagttgcagctgggacgcccggtcggacttgcgtctccgcagctgggagatgctcagctcgtcggcgtccaggagggacgccgcgaggagcggcgcggagctccctcggccgcacgcggtggcagggatggcgcggagcggggagctgcccaagggcgccccctccgcgacggcccctgatgcggtgcggtgcgagggatggatggtgcgccacggccggaggaagatcgggaggtccttcttccacacgcgctacttcgtcctcgacaacggcgtgctcgcgtactacaagaagaagccgagggaccacatgatcccactcaagtcaattattattgatggaaattgcagagtggaggatagagggcttaaaacacatcatggtcaaatgatttatttgctatgcatttacaacaagaaagaaaaggagaaccaaatcacgatgggtggatacgatattgaagatgccctagcctggaagaggaagatagagcttctgattgatcagcaacaggatactacgacagctaaaaaccataaagcttttgcttcgttggactttgatatagatcttggaggaccattttcgttctctgaccatgacagcggacccgaagatgaagaagagccccgacccaccttgcttcgcaggacaactatagggaatggccctcctgattctgtacttgattggaccaaagaggctgacagtgggctgtcaaatcagaatgccaccagtcaggcttactccagaaagaactggaggcttcttagatgccagaatggattgcgcatctttgaagaacttgtggaggttgaataccttgcaagaagctatagtcgagcaatgagggctgtaggagtggtggaagcctcatgcgaggccatttttgggcttgtaatgagcatggatgcatcacgatatgaatgggattgtagcttccaatatgggagtttagttgaagaggtcgatggtcatactgcaatactgtaccatcgtctacaactgaactggttttcaatgttggtctggccacgagatctttgttatgtacgctattggcggcgcaacgatgatggaagctatgttgtgctgtttcgatctaccgaaaatcagaactgtgggcctcaaccaggatttgtgagagcttctatcgaaagtggaggtttcaagatttcccctctcaaaagcctcaatgggaggccccgcactcaagttcaacaccttatgcagattgatgttaggggatggggcgtgaactatttaccatcattccaatgaaattcatacagttccaaggattccggtgatgcataccatggttaatgcggcctcaatgaaaaaggaccaaaaccttcaagaaccagactcgaagaccaaacaagctgataacaaacatttggatatggtagatgaagagtcggaagatgatgatgactatcaagttcctgatgctgatgtggaggaagaacctaccaaatctgacagtgatgctaagaactcagacccaatagatttgtcttggttttcgggcattattcgtcaggatacaaatgagaaaagtcgtaactgttgggcagtgcctgatagcaagatctttaaagttcgtagcaagaactttccacatgacaaatcaaaggtaccagcaggtaagtatctaatggagctcgtagcagttgactggtttaaggacgccaagcgcatggatcatgtcgctaggcggaaaggatctgcggttcaggttgccgctgagaagggaatgttcactttcctggtaaacatacaaattcctggaccaagtcattacagcttggtcctttattttgtctcaaactccttgaagaaaggatcgctgttgcagcgttttgccgatggtgatgatgattttagaaacagcagactgaagcttatcccatctgttccaaaggggtcttggatagtgcggcaaagtgttggaagcacaccttgcttgctggggaaagccgtggactgcagctatttgcgtggtcctgactacttagaagtggatgtagatatcggttcgtccgcggtagccaacggggtcctgggcttggtgtttggcgttgttaccaccttggtagtcgacatggcgtttcttatacaggcaaacacgtacgacgagctcccagagcagctcctaggcgctgcgcggctgtcacacatcgaaccttctgcggccgtgtatcctgtccttgacaacatttcctgaacgggacggacaaatcaacctgtgcagattctttcgttctttccgtccgccccgccacaaaaaggctctcccaatttgttcagccactgcagcattgtgcagctcgatacatttgaggttcagacagacagactgcagcagtccacaagtgccttgtacccttcatacagttttgccatttttttaggtcttttcttttacattttactttactcggtgtagtttgagcttcctacagatattgtaatgcaatagacacatcaaagtgagatatacagatacagcatggttcagaaacaagttcgtgtactttccgattcccg

SEQ ID NO: 218050 - DNA, 2191 bp, Zea Mays
gcgcccttcatccattagccagccaaggtgatttctgagccagccaggagcttgacagtcacagggatggagcagtacgaggtgctggagcagattgggaagggttcgttcggctcggcgctcctggtgaggcacaaggctgagaggaaaaggtatgtcttgaagaagatccgcctcgcacgccagaccgaccggtgccgccgatcagcacaccaggagatggagctcatcgcaaaagtaaggaatccttacattgtggaatacaaagatgcttgggtggagaagggttgctacgtgtgtattgtcattggttactgcgagggaggggacatgtcagaggccattaagaaggctaacagtaaccatttctcagaagagaaactttgtgtgtggcttgtgcagctcctgacggcacttgattacttgcatgccaatcatatccttcatcgtgatgttaagtgctcaaacatatttctcacaaaggatcaaaacataaggcttggtgattttggtcttgctaaagtcttaacttctgatgatttagcttgttcagttgtgggaactccaagttacatgtgccctgaacttcttgctgacattccatatggttccaagtctgacatatggtccctcggctgctgcatctatgagatggctgctttcaagcctccattcaaagcatttgatatgcaagcactgataaataagattaacaagtctgctgtacctcctctaccaacgatgtactctggtgcatttaggggactcgtcaaaagcatgctgcgcaaaagtccagatcatagaccaagagctgcagaactgcttaagcatccacaccttcagccatacgtgtttgaactccaattgaaatccactcctcgcaatttgttctctgctaagcttcctaccagatacgtcacaaataaggctgcggtttctgatgccgaagacaattgtccaccaaaatacagcaagagccattcatttaaattggacaggcatggtcgtcctggttctacaactcggaaagactgtccagaactaagtgaacaaatggagggattgtcagtccaagtcaccaagaatgttaatgatgaactgatacatgagaagtatccaaaagttacaacgtctcctgcacctactccgagaagagcttcatcgacaccaagacgacgactagaagcttcaaagacatttcatgctagaacagcacataaggagcaatctcaaaggtcaaggtcttcagcaaaccaagcgagtcaagcacggagagaatcactccccatgcgtatgatcaaaactcctgataagaggcaggccactgacattctcactagattgaaatctcctgacgtttcagtaaactctcctcgaatagacagaattgctgaattcccactggcatcctttgaaaccccattacatcgcatcacaaagctcacatcgccatctatcattgaccaatatattaccaaggacaagtgcactttccaagtgctccgaagcgatagcgaaaactacactgactctcctgacgtcgaccttcttggttctgacaattcacctaggagttcatcgaatttgaggcagaggaggtttgacacgaggtcttaccagcagagagctgaggctctagagggattgcttgagttcagtgctcaattgctacagcaggagaggtttgaggagttggggatcttgctgaagccatttggacccggtaaggcatctccaagagagacagccatatggttgtcaaggagtttgaaagaaactggattataaccagcggcctgtaagtgcaacactaaacctgcaatgactttgtatcttcacaagcttcaacctaccctgtacagttacagtattgtgattttttcacttgactggtctggtcttagtggaacactgcaacatgttgacatggttagttcggcaatcatctgctttctgtaaacctgtaataacatgcttgagaatttaccaatcagatgaaaaatagcttagatgcctgtgaatttgtatcttgaaatcatgtaaatcagcaagagttgacatttggagagcccctttctatgacgcagcttgatatcgttcattgtcattgcattttgtacttttcttcaggtcatgaaaacaatgaagtgttcatggtccttcagttttgttcttgatttatatgtatctt

SEQ ID NO: 218051 - DNA, 2510 bp, Zea Mays
cccagtcaagaatcaatttcgacgatcactattttggtccactgcaaaattgtgatttctgagccagccaggagcttgacagtcacagggatggagcagtacgaggtgctggagcagattgggaagggttcgttcggctcggcgctcctggtatgtcttgaagaagatccgcctcgcacgccagaccgaccggtgccgccgatcagcacaccaggagatggagctcatcgcaaaagtaaggaatccttacattgtggaatacaaagatgcttgggtggagaagggttgctacgtgtgtattgtcattggttactgcgagggaggggacatgtcagaggccattaagaaggctaacagtaaccatttctcagaagagaaactttgtgtgtggcttgtgcagctcctgacggcacttgattacttgcatgccaatcatatccttcatcgtgatgttaagtgctcaaacatatttctcacaaaggatcaaaacataaggcttggtgattttggtcttgctaaagtcttaacttctgatgatttagcttgttcagttgtgggaactccaagttacatgtgccctgaacttcttgctgacattccatatggttccaagtctgacatatggtccctcggctgctgcatctatgagatggctgctttcaagcctccattcaaagcatttgatatgcaagcactgataaataagattaacaagtctgctgtacctcctctaccaacgatgtactctggtgcatttaggggactcgtcaaaagcatgctgcgcaaaagtccagatcatagaccaagagctgcagaactgcttaagcatccacaccttcagccatacgtgtttgaactccaattgaaatccactcctcgcaatttgttctctgctaagcttcctaccagatacgtcacaaataaggctgcggtttctgatgccgaagacaattgtccaccaaaatacagcaagagccattcatttaaattggacaggcatggtcgtcctggttctacaactcggaaagactgtccagaactaagtgaacaaatggagggattgtcagtccaagtcaccaagaatgttaatgatgaactgatacatgagaagtatccaaaagttacaacgtctcctgcacctactccgagaagagcttcatcgacaccaagacgacgactagaagcttcaaagacatttcatgctagaacagcacataaggaggtatgaagtacctgaccatttgaaaactcaccaagttgttggtagccttattttcagtcattgttcagattttacaacataactgattaactgttgatattgtcagtccctagccagtagacaccactaaggcactaacctgttcttcagaaaatgaaaagcaactaggtttttcagaaactgacatttccttgcctcttgccaagaaaaaacaagatgaaagattgcttctagcttctttgtggcatcttaaaacattttaaattggcaacttgttatctttgaagtgattctacaaaatttatgttgttttggcaccagcaatctcaaaggtcaaggtcttcagcaaaccaagcgagtcaagcacggagagaatcactccccatgcgtatgatcaaaactcctgataagaggcaggccactgacattctcactagattgaaatctcctgacgtttcagtaaactctcctcgaatagacagaattgctgaattcccactggcatcctttgaaaccccattacatcgcatcacaaagctcacatcgccatctatcattgaccaatatattaccaaggacaagtgcactttccaagtgctccgaagcgatagcgaaaactacactgactctcctgacgtcgaccttcttggttctgacaattcacctaggagttcatcgaatttgaggcagaggaggtttgacacgaggtcttaccagcagagagctgaggctctagagggattgcttgagttcagtgctcaattgctacagcaggagaggtttgaggagttggggatcttgctgaagccatttggacccggtaaggcatctccaagagagacagccatatggttgtcaaggagtttgaaagaaactggattataaccagcggcctgtaagtgcaacactaaacctgcaatgactttgtatcttcacaagcttcaacctaccctgtacagttacagtattgtgattttttcacttgactggtctggtcttagtggaacactgcaacatgttgacatggttagttcggcaatcatctgctttctgtaaacctgtaataacatgcttgagaatttaccaatcagatgaaaaatagcttagatgcctgtgaatttgtatcttgaaatcatgtaaatcagcaagagttgacatttggagagcccctttctatgacgcagcttgatatcgttcattgtcattgcattttgtacttttcttcaggtcatgaaaacaatgaagtgttcatggtccttcagttttgttcttgatttatatgtatctt

SEQ ID NO: 218052 - DNA, 2795 bp, Zea Mays
acacattatcagattcgttctgcagtacaataatgggagcctgcaactcgtgcgaggccacggcggtggcggcggcgccggggccggcgacggcggaggcgagggtggtgctcgcggacggcgcgctgcggcggttcccgggcggcacgcgggcgtcgcaggccgtgaaggcggccgccgccggggcggcctcgtggttcctgtgcagcgcggacgggctggagctcggcggcgccgtggtgcccgtgcggcccgaggaggcgctgcagcccgggcagctgtacttcgtgctccccgccgcgatgcggcgccgcccgctgcaggcggaggagatggccgcgctcgccatccgcgccagcgccgcgctggccggcgaccacgacggcccgctcgtgttcccggaggccgccgctgccgccggcgccggggcgcggtgcggcaaggggccagctcgcttcacccctttcggtctcggcggccgtcgggcccacgccgcagaagccccgacggcgctagccgcgctacgctacgctacgctacgcaccgcgtttctccgcttcagcggttcgcctctgcgccgcaagctcctagagatggcggcgaagtctggatacacacgccggctcccgctcaccggggagaccgctcctccacctcccagcgccgtcctctatgtggccaactgcgggcccgcggtgggagtgaccgacgccgacgtccgctcgacattcggcgccttcggggaggtcgcaggagtccaggctgccgacgacagcggcgcccgcatcatcgtccggttccacgagcccgccgccgcggaggccgccatggctgcgctccacgggcgcccctgcgacctccttgcgggtcgcgtgctgcacataaggtactcggtgcccgtgaagccaaaggctcgtcctgggggctctgtaccggtggctcacgcggcatcggagctcggaatccccgggatttacatggttcaggagttcgtgactgccgctgaggaacaggagttactttcagctgtggatagcaagacgtggaaaagactggcgaaaagacgagttcagcattacggttatgagtttctgtacgaagtaagttcgaccttacaaggaatgttgattcgaagcagttcttgggtgaactgcctacttttgtttcaactgtccttgagaagattgcttcttttcctggtgtgaaggactgcgccaccagattagttgatcaattgaccgtaaatgaatatccttgtggtgtaggtttgtctccacatatagacacacactcagcatttgaggaaatgatttttagcctttctttggctggaacttgcatcatggagttcagaaaatatactaaaggcacttggcgtgctccaagtgtggtcgatggagttgatgaagatagcagtcaagagccagaatgcataaggaaagccattttcctacctcctcggtcaatgctattgatgtcaggagaaggtcgttatgcctggcatcactatataccacatcataaaatcgatgccgtgggtggtcaagtcatcaaaaggaattcaaggcgagtttctttcactttccgaaaggtgaggatggggccttgtgattgcgaatacaagcaattttgtgatgctcatagcaagagatgttaagctgagaaggctgatattttcaaaactacctgctgctacaaccattggcaagtctcataacataataacaatctgtcggtattttgtctcgcacaatcaaaatggtcaaggagcccaccgatcaaactcatatcaatttacagatgtgtcatctgacgtgtgtgcaaatgaatagatagagaaatgtagggaatagccagatgtaacttttgaaccttgtattcatctcgttgagattgagaattgcttgaacgagcctgtagtttgtcattattttttcctgatatctcgaaacaacaaagttctatttataatatgatgaaaaaaatgacaccattgtttttgctactgtcgaacttggtggaattggccttcgtaccaggacatttttctagataacctggtttcatcatttggttactcagtttaatgatctcaaaaatttattggtgttgagctttacaataaaatgtctccttcaggtttcatagatgcacataagcataaggagataacgtccagcacaaagcaaaaaaaaaagtaactcgatgatttttcatcttcatttgagtacgccatcttcaatatgaacaaattgctgtacacttcaccatgcatgtcaggtgtcttggtcttggactgcgactaaaagctgtatgaggctacatgcaccgagcaaatacctttgctggtcttgtaaacactcactgctcaccgcggcttgcaagacgccgcattcaagtattcaactaatgcgatatccttcctgcatgactgcatccaggtccaggccatcagggtctcaacctgcagggttatttcaccgctcacgagtagtgcgggagttcagtttgttgttcatatatatgtaaatgttccgaaatgccccaatttcgtcaaggtgacaaggtgtcaatgctgcagataaccaaaaggccaatctgtcatagcctgagctgatcacgtcatgggacatgaacaaacaccagatcagcaagctttccactgctgcagtactgattcatgtcagatgatttcatctctaccgtaatcaactacatgcagtaatgagtgttcatggccatttttagggtagctttgcaatgctgcatgctggactttaatccaactagaacct

SEQ ID NO: 218053 - DNA, 2751 bp, Zea Mays
aataatgggagcctgcaactcgtgcgaggccacggcggtggcggcggcgccggggccggcgacggcggaggcgagggtggtgctcgcggacggcgcgctgcggcggttcccgggcggcacgcgggcgtcgcaggccgtgaaggcggccgccgccggggcggcctcgtggttcctgtgcagcgcggacgggctggagctcggcggcgccgtggtgcccgtgcggcccgaggaggcgctgcagcccgggcagctgtacttcgtgctccccgccgcgatgcggcgccgcccgctgcaggcggaggagatggccgcgctcgccatccgcgccagcgccgcgctggccggcgaccacgacggcccgctcgtgttcccggaggccgccgctgccgccggcgccggggcgcggtgcggcaaggggccagctcgcttcacccctttcggtctcggcggccgtcgggcccacgccgcagaagccccgacggcgctagccgcgctacgctacgctacgctacgcaccgcgtttctccgcttcagcggttcgcctctgcgccgcaagctcctagagatggcggcgaagtctggatacacacgccggctcccgctcaccggggagaccgctcctccacctcccagcgccgtcctctatgtggccaactgcgggcccgcggtgggagtgaccgacgccgacgtccgctcgacattcggcgccttcggggaggtcgcaggagtccaggctgccgacgacagcggcgcccgcatcatcgtccggttccacgagcccgccgccgcggaggccgccatggctgcgctccacgggcgcccctgcgacctccttgcgggtcgcgtgctgcacataaggtactcggtgcccgtgaagccaaaggctcgtcctgggggctctgtaccggtggctcacgcggcatcggagctcggaatccccgggatttacatggttcaggagttcgtgactgccgctgaggaacaggttactttcagctgtggatagcaagacgtggaaaagactggcgaaaagacgagttcagcattacggttatgagtttctgtacgaaacaaggaatgttgattcgaagcagttcttgggtgaactgcctacttttgtttcaactgtccttgagaagattgcttcttttcctggtgtgaaggactgcgccaccagattagttgatcaattgaccgtaaatgaatatccttgtggtgtaggtttgtctccacatatagacacacactcagcatttgaggaaatgatttttagcctttctttggctggaacttgcatcatggagttcagaaaatatactaaaggcacttggcgtgctccaagtgtggtcgatggagttgatgaagatagcagtcaagagccagaatgcataaggaaagccattttcctacctcctcggtcaatgctattgatgtcaggagaaggtcgttatgcctggcatcactatataccacatcataaaatcgatgccgtgggtggtcaagtcatcaaaaggaattcaaggcgagtttctttcactttccgaaaggtgaggatggggccttgtgattgcgaatacaagcaattttgtgatgctcatagcaagagatgttaagctgagaaggctgatattttcaaaactacctgctgctacaaccattggcaagtctcataacataataacaatctgtcggtattttgtctcgcacaatcaaaatggtcaaggagcccaccgatcaaactcatatcaatttacagatgtgtcatctgacgtgtgtgcaaatgaatagatagagaaatgtagggaatagccagatgtaacttttgaaccttgtattcatctcgttgagattgagaattgcttgaacgagcctgtagtttgtcattattttttcctgatatctcgaaacaacaaagttctatttataatatgatgaaaaaaatgacaccattgtttttgctactgtcgaacttggtggaattggccttcgtaccaggacatttttctagataacctggtttcatcatttggttactcagtttaatgatctcaaaaatttattggtgttgagctttacaataaaatgtctccttcaggtttcatagatgcacataagcataaggagataacgtccagcacaaagcaaaaaaaaaagtaactcgatgatttttcatcttcatttgagtacgccatcttcaatatgaacaaattgctgtacacttcaccatgcatgtcaggtgtcttggtcttggactgcgactaaaagctgtatgaggctacatgcaccgagcaaatacctttgctggtcttgtaaacactcactgctcaccgcggcttgcaagacgccgcattcaagtattcaactaatgcgatatccttcctgcatgactgcatccaggtccaggccatcagggtctcaacctgcagggttatttcaccgctcacgagtagtgcgggagttcagtttgttgttcatatatatgtaaatgttccgaaatgccccaatttcgtcaaggtgacaaggtgtcaatgctgcagataaccaaaaggccaatctgtcatagcctgagctgatcacgtcatgggacatgaacaaacaccagatcagcaagctttccactgctgcagtactgattcatgtcagatgatttcatctctaccgtaatcaactacatgcagtaatgagtgttcatggccatttttagggtagctttgcaatgctgcatgctggactttaatccaactagaacct

SEQ ID NO: 218054 - DNA, 1084 bp, Zea Mays
ctcccctccgttcgtgcgcgccacgagctcaaggaagttttgaggactgtccctgaggttcaagaattagttgacaaagaagaatctaggaagcttttgagtgtcaaagagcaagatgggggaatcggagtgaggtcatatttgaaatcagctttcaccaagttaatgacagcgtgtgatgaagcagtttctgaagcaattacaaaccttaagagtcgcttaaaaagtgagagtaaggctagaagtttaacgaagaaggagcaacttgttctgtcattggagaagcagtacccaggagatgttggtgttctggcagcattcttccttaattttgttaagctcaatcctggtgaagcactttatgttagtgcaaacgaacctcatgcatatctctcaggggagtgcatcgaatgtatggccacttcagacaatgttgtccgtgcaggtctaactcctaaatacagagatgtgcaaactctctgctcgatgttgacttataatcaggccttccctgaaattctgcaaggaatgcctgtacagccatacgtgactcgttacaccccatcaactgatgaattcgaagttgaccgctacttgctacctcctggaaaatcagtcaccatgtctccggtgcctggtccatccatattcatcgtcttgacaggagaaggagaaatccaggcaggtttcatgactggcagtgcaaaggcgaaggaaggtgacgttttctttgtgccggctaacaccaaggtcaagctctacacttcttgccccaggtccatgcaactgtatagggctggggttaacagcagtttcctgagttgatgggcaactggtttctagggttggcatctgtaggttaggtaccagctacacaaggattttcatgtttggcacttgtccaagaagtaagttaattatgtgggttctcatcgtgtataggaaatatggagaataagttcatcccttgtttattttataaatttgtatttcatttccaaatctgacgagctgctgggatcacaaggatatgtaattcgagttcaaagttaaatgtgcatcttgtgaacattagggctggaaa

SEQ ID NO: 218055 - DNA, 2014 bp, Zea Mays
ctcgtaccgagacaggacgtgtgtacacgtactgtacatctatgtcactagttattattcggctgcaaatacggccacagcattcttcccgccgtgtgacgacaaaaaaagaaaaaaaacgaaacaaaattatagagaaatacggccatcggccagaaccagtagctaccactcctgtctatctcagtatctctacgcgcgaaaaagggcgacgacccgggcccaccacgcggcgcaaccgcttcttccgcggtgaaccaaaccaaaccaaaccaaaccaacctcctcccctgtctgcctgccctggctccagctcccgcccgtgcacgctctcgcgccgttcaccgtcgccacctcctcccctaccggccgctccgtccataaaacccaaccgctcccaacccactccacatttcctcccctggggtacaccgtgcacacaaccgccgccgcagcccctcagactccctcctcctcctcctcctccgcgcgggaacgggaaatggcgtccaccacggcctccctcgcccccgcggccgcgctggagcggctgggcctcctcgccgcgcccaccgacgccgacgacccgtccccgccgctgcccgcgccgctcccggggctcctccccctgcgctgcgccgtgcagcactacgagtggggccggcgcggcgccgactccctcgtcgcgcgcctcgccggcgacggggacggccggccctgcgccgagctctggatgggcacgcaccccgccgcgccctcctcgctggcgcccgacgtctcgctccgcgactgggtcgcgcgcaacccggccgcgctcggccgcgccgtcgccgcgcgctggggcggcgacctcccgttcctcttcaaggtgctgtcggtggccaaggcgctgtccatccaggcgcacccggaccgggagctcgccgcggcgctgcacgcgctgcgcccggccacgtaccgcgacgccaaccacaagcccgagatggccgtcgccgtcaccgagttccacgcgctctgcggcttcgccgccacgcaggagctcaaggaagttttgaggactgtccctgaggttcaagaattagttgacaaagaagaatctaggaagcttttgagtgtcaaagagcaagatgggggaatcggagtgaggtcatatttgaaatcagctttcaccaagttaatgacagcgtgtgatgaagcagtttctgaagcaattacaaaccttaagagtcgcttaaaaagtgagagtaaggctagaagtttaacgaagaaggagcaacttgttctgtcattggagaagcagtacccaggagatgttggtgttctggcagcattcttccttaattttgttaagctcaatcctggtgaagcactttatgtctaactcctaaatacagagatgtgcaaactctctgctcgatgttgacttataatcaggccttccctgaaattctgcaaggaatgcctgtacagccatacgtgactcgttacaccccatcaactgatgaattcgaagttgaccgctacttgctacctcctggaaaatcagtcaccatgtctccggtgcctggtccatccatattcatcgtcttgacaggagaaggagaaatccaggcaggtttcatgactggcagtgcaaaggcgaaggaaggtgacgttttctttgtgccggctaacaccaaggtcaagctctacacttcttgccccaggtccatgcaactgtatagggctggggttaacagcagtttcctgagttgatgggcaactggtttctagggttggcatctgtaggttaggtaccagctacacaaggattttcatgtttggcacttgtccaagaagtaagttaattatgtgggttctcatcgtgtataggaaatatggagaataagttcatcccttgtttattttataaatttgtatttcatttccaaatctgacgagctgctgggatcacaaggatatgtaattcgagttcaaagttaaatgtgcatcttgtgaacattagggctggaaa

SEQ ID NO: 218056 - DNA, 4815 bp, Zea Mays
cacggccacggacagtgttgccttctcctcccccttctccttctcccgtccactcagcgtgcctgactgcccgtgcgcgccctcgctcagtcgctctcgcgcgcggcgacaactgagccaccgccgacggtccaactcttcgtcggaccctttgccggcgacgagcacccaccaggggtttcatggtagcgtgacctgtctcggcctagaaaatgtatataaagaaggtcgtaatcgaagggtttaagagctacaaggaggagatatcaacagagcccttcagtcccaaagttaacgtagttgttggtgcaaatggatctggcaaatcaaatttctttcatgctatacgatttgtcctgagtgacatgtttcagaacctgcgaagtgaagataggggtgcccttctccatgaaggtgctggacactcggttgtatctgcttttgttgagatagtgtttgacaattcagacaatcgtattccagttgataaagaagaggtacgcttgcgcaggacaattgcttcaaagaaggatgaatactacttggatgggaagcatgtcagtaaaactgaagtcatgaatctgctagagagtgctggtttctctcgttctaatccatactacgttgtgcagcaaggaaagattgcatcccttaccttgatgaaagattctgaacgactggatcttctcaaagagattggtggtacacgtgtttatgaggatagacggaaggagagcttgaaaataatgaccgaaacagccaacaaaaggaagcagattgatcaagttgtccactacttagaggaaagactgagagaactcgatgaagagaaagaagaactaaagaagtaccagcagctggacaaacagagaagatcacttgagtatactatattggaccatgagcttaatgacgcaaggaatgaattagcttcgatggatgataaccgaagaaaaatttctgaaagtatgtcccttgcggacaatgaagtggtggatgtccgagagatgatcaagagttttgataaagaaataaaagtctcaactaaagggataaatgataccaaggcgcaaaaggaaggtgttgagaagaggcgtactgaagctctgaaggtagttgctaagattgaacttgatttgagagatataaaagataggattgtgaatgagaagcgagcaaaggatgaggcagcgagggatttgcagagtgtgaggagagagagtgaaaagtcaaagtctgaattggctgaaattagtaaggtgcatcaggccaaactaaaggaagaggaggatatatcgaagagcattatggatcgtgagaagcggctaagtatattgtaccaaaagcagggaagggcgacccaattcgcaaacaaagctgctagagataagtggcttcaaaaggaaattgaagatctcaagcctgtacttttatcaaataaaaagcaggaaggtttacttcaagaagaaatccagaagcttaaagatgaaatcaatgatttaactaactacatcgagtctcggaaaagcgaatcaagtaagttagaggaaacacttgcgaaaagacataatgactataacgatttgaggaagcagagagatgtgcttcaagaagaaaggaagtcatattggaaggaggaatctgaggtgacagctgaacttgataggctacaagaagatcttataaaggcacagaaaagcttggaccaagcaactcctggggatatcaggagaggcctgaattctgttagcagaatcattaaggaccatggtattactggtgtttttggtcctgtattagaactggttgattgtgaagagaagttctttacagctgttgaggtcactgctgcaaatagcttgttccatgtggttgtcgagaatgatgacatatcaacaaagatcattcaaatattaactagagaaaaaggtggaagggtgacatttataccattgaacagagtgaaagttccagatctcagctgtccgcaaagtcctgattttgttccattgttgaaaaaattgaaatatcgatctgaccatcgtcgtgctttcgaacaggtttttggcaggacagtcatatgccgagatctggaaactgcgactaaagttgcacgtagcaatggtctagattgcatcacacttgatggtgatcaggtagggaaaaaaggtgctatgacaggaggcttctatgattctagacgctcaaaactaaagtttgtgaagataataagggataacaagacagcaattgatagaaagacgggtcatctagagagtgtcgtaaacaagctaaaagatatagataagaaaattacagatttagttaccaaacagcagcaaatggatgctgaacgtgatcatgcgaagtcagagttggaacaatttaaggctgacattgccagggctatgaagcaaagggggtcacttgagaaagcccttgtcaagaaggaaaaatcacttaacaacatctgcaaccaaattgagcaagtccagtctagcattgcaatgaagaatgatgaaatgggcacagagcttattgatcagctaacttcagaagaaagagatctcctttcacgattgaatcctgaaattactgatttgaaggagagatttctaatgtgtaaaaacagtcggattgagatcgaagcacgaaaggaagaattggagaccaatttatcaacaaatcttatcaggcgtcagaaagagctagaagcgataatttcatctgcagattctagaaccttgcctttggaagctgaggcaaaggagcaagaactgaaaagttccaagagaaaccttgatgaactaacttcattattaaaggctaatgtcgatgccataaataatttcaccagaaagatggatgatctgaaaagaaaaagggatgatctgaaggctcgtgaagctattttagagcagactgtacaagatggtgccaaagacttagaacagttgatgaacagcaggaacacttatctagccaagcaagaagagtgcacgaagaagatccgagatttgggcttgttgcctgctgatgcttttgaagcgtacaagaggaaaaacaagaaacagctacataagatactctatgactgtaatgagcagttgaagcagtttagtcatgtgaaccaaaaggctcttgaccaatatgtgaacttcacagaacaacgcgaacaactgcagagaaggcgagctgaacttgatgccggtgatgtgaaaatcatggaactcatatcggttttagaccaaaggaaggatgaatccattgagcgcacatttaaaggggttgcaaggcacttccgtgaagtgttttctgagctggtgcaaggtggtcatggatatttggttatgatgaagaaaaaggatggggatgcagttgatgatgatgaggaggaggatggacctcgtgatccaggccctgatgggagaatagaaaagtatatcggtgtgaaagtcaaggtatcatttactggcaagggagaaactcagtctatgaaacaattgtcaggcggacagaagacggtggtcgcactaacactgattttcgctatccaacgatgtgacccagctccattttatctgttcgacgagatcgatgctgctctggatccacaataccgaacagcagttggaaatatgatccgccgtctagctgacatggctgacactcagttcattgcgaccacattccggccagagattgctaaagtggctgataagatatatgccgtgagacacaagaatagggtgagcaacatcgacgtggtgtccaaggaggaggccctggacttcatcgagcgtgatcagacgtacaatgctagctgaggctgctgctgctgctgctgctgctgtgtattgattgatctgcaggcagatgctaacgcagacaggatagttcttgttgtgttatggatattctggcctattgttgtagctgtgtatatgtgtgatgcagttaggtagctattggaccagcttgtttggcgcatcaacgttgtgaatgtagcagctaccaccttggtttggtaccagctttaattaagtttgggaagcgctgattagactagacgtacgttacatgttgccccatgattgttgtatggcacgcccagcccaaaatggcagtaatcagttcatttcgacaattaacgtaagtgtaagtgtacgagtagtggtattcaaatgttttttaactgtatttttctagtacatttattttttgtacccataaatcatgttacacgtagtttcattggagggagcataaacatgttcctttgacagaaagcctaataaggctataaaacaaaaattactacacgtagtttcagcaacgcaaacaaaaaaccccgtgcctgcctaatgaattggtcattaggcatgggcttctgcttctctataaggcgactacgagctcccagctgctcagtagctagggtacatgcccatccttcctatggtgctcctgcagccgaagttgacagagcctcgaggctttctgctgccatttgccttcgtggtggatttcgcaatcctcttttccttgcccgtgaacttatcactgtctcgagctctttctttcgaccgtgccacttttgtcattgacgagagagagctttaagtcagtaccaggtcatggcaaaatcaaatggaaactaaatagtatagcaggttatctgaacacaaacaactctatttggaagatctgtgaaactagagtcataataatctggggctgtaggcattaccttagctagcctctccttaagctttggccttgcagatactaccactcttgctggttgacggtccg

SEQ ID NO: 218057 - DNA, 4812 bp, Zea Mays
ctcccgtccactcagcgtgcctgactgcccgtgcgcgccctcgctcagtcgctctcgcgcgcggcgacaactgagccaccgccgacggtccaactcttcgtcggaccctttgccggcgacgagcacccaccaggtaacccctcactctcttccctcgcatgctcttttgcaggggtttcatggtagcgtgacctgtctcggcctagaaaatgtatataaagaaggtcgtaatcgaagggtttaagagctacaaggaggagatatcaacagagcccttcagtcccaaagttaacgtagttgttggtgcaaatggatctggcaaatcaaatttctttcatgctatacgatttgtcctgagtgacatgtttcagaacctgcgaagtgaagataggggtgcccttctccatgaaggtgctggacactcggttgtatctgcttttgttgagatagtgtttgacaattcagacaatcgtattccagttgataaagaagaggtacgcttgcgcaggacaattgcttcaaagaaggatgaatactacttggatgggaagcatgtcagtaaaactgaagtcatgaatctgctagagagtgctggtttctctcgttctaatccatactacgttgtgcagcaaggaaagattgcatcccttaccttgatgaaagattctgaacgactggatcttctcaaagagattggtggtacacgtgtttatgaggatagacggaaggagagcttgaaaataatgaccgaaacagccaacaaaaggaagcagattgatcaagttgtccactacttagaggaaagactgagagaactcgatgaagagaaagaagaactaaagaagtaccagcagctggacaaacagagaagatcacttgagtatactatattggaccatgagcttaatgacgcaaggaatgaattagcttcgatggatgataaccgaagaaaaatttctgaaagtatgtcccttgcggacaatgaagtggtggatgtccgagagatgatcaagagttttgataaagaaataaaagtctcaactaaagggataaatgataccaaggcgcaaaaggaaggtgttgagaagaggcgtactgaagctctgaaggtagttgctaagattgaacttgatttgagagatataaaagataggattgtgaatgagaagcgagcaaaggatgaggcagcgagggatttgcagagtgtgaggagagagagtgaaaagtcaaagtctgaattggctgaaattagtaaggtgcatcaggccaaactaaaggaagaggaggatatatcgaagagcattatggatcgtgagaagcggctaagtatattgtaccaaaagcagggaagggcgacccaattcgcaaacaaagctgctagagataagtggcttcaaaaggaaattgaagatctcaagcctgtacttttatcaaataaaaagcaggaaggtttacttcaagaagaaatccagaagcttaaagatgaaatcaatgatttaactaactacatcgagtctcggaaaagcgaatcaagtaagttagaggaaacacttgcgaaaagacataatgactataacgatttgaggaagcagagagatgtgcttcaagaagaaaggaagtcatattggaaggaggaatctgaggtgacagctgaacttgataggctacaagaagatcttataaaggcacagaaaagcttggaccaagcaactcctggggatatcaggagaggcctgaattctgttagcagaatcattaaggaccatggtattactggtgtttttggtcctgtattagaactggttgattgtgaagagaagttctttacagctgttgaggtcactgctgcaaatagcttgttccatgtggttgtcgagaatgatgacatatcaacaaagatcattcaaatattaactagagaaaaaggtggaagggtgacatttataccattgaacagagtgaaagttccagatctcagctgtccgcaaagtcctgattttgttccattgttgaaaaaattgaaatatcgatctgaccatcgtcgtgctttcgaacaggtttttggcaggacagtcatatgccgagatctggaaactgcgactaaagttgcacgtagcaatggtctagattgcatcacacttgatggtgatcaggtagggaaaaaaggtgctatgacaggaggcttctatgattctagacgctcaaaactaaagtttgtgaagataataagggataacaagacagcaattgatagaaagacgggtcatctagagagtgtcgtaaacaagctaaaagatatagataagaaaattacagatttagttaccaaacagcagcaaatggatgctgaacgtgatcatgcgaagtcagagttggaacaatttaaggctgacattgccagggctatgaagcaaagggggtcacttgagaaagcccttgtcaagaaggaaaaatcacttaacaacatctgcaaccaaattgagcaagtccagtctagcattgcaatgaagaatgatgaaatgggcacagagcttattgatcagctaacttcagaagaaagagatctcctttcacgattgaatcctgaaattactgatttgaaggagagatttctaatgtgtaaaaacagtcggattgagatcgaagcacgaaaggaagaattggagaccaatttatcaacaaatcttatcaggcgtcagaaagagctagaagcgataatttcatctgcagattctagaaccttgcctttggaagctgaggcaaaggagcaagaactgaaaagttccaagagaaaccttgatgaactaacttcattattaaaggctaatgtcgatgccataaataatttcaccagaaagatggatgatctgaaaagaaaaagggatgatctgaaggctcgtgaagctattttagagcagactgtacaagatggtgccaaagacttagaacagttgatgaacagcaggaacacttatctagccaagcaagaagagtgcacgaagaagatccgagatttgggcttgttgcctgctgatgcttttgaagcgtacaagaggaaaaacaagaaacagctacataagatactctatgactgtaatgagcagttgaagcagtttagtcatgtgaaccaaaaggctcttgaccaatatgtgaacttcacagaacaacgcgaacaactgcagagaaggcgagctgaacttgatgccggtgatgtgaaaatcatggaactcatatcggttttagaccaaaggaaggatgaatccattgagcgcacatttaaaggggttgcaaggcacttccgtgaagtgttttctgagctggtgcaaggtggtcatggatatttggttatgatgaagaaaaaggatggggatgcagttgatgatgatgaggaggaggatggacctcgtgatccaggccctgatgggagaatagaaaagtatatcggtgtgaaagtcaaggtatcatttactggcaagggagaaactcagtctatgaaacaattgtcaggcggacagaagacggtggtcgcactaacactgattttcgctatccaacgatgtgacccagctccattttatctgttcgacgagatcgatgctgctctggatccacaataccgaacagcagttggaaatatgatccgccgtctagctgacatggctgacactcagttcattgcgaccacattccggccagagattgctaaagtggctgataagatatatgccgtgagacacaagaatagggtgagcaacatcgacgtggtgtccaaggaggaggccctggacttcatcgagcgtgatcagacgtacaatgctagctgaggctgctgctgctgctgctgctgctgtgtattgattgatctgcaggcagatgctaacgcagacaggatagttcttgttgtgttatggatattctggcctattgttgtagctgtgtatatgtgtgatgcagttaggtagctattggaccagcttgtttggcgcatcaacgttgtgaatgtagcagctaccaccttggtttggtaccagctttaattaagtttgggaagcgctgattagactagacgtacgttacatgttgccccatgattgttgtatggcacgcccagcccaaaatggcagtaatcagttcatttcgacaattaacgtaagtgtaagtgtacgagtagtggtattcaaatgttttttaactgtatttttctagtacatttattttttgtacccataaatcatgttacacgtagtttcattggagggagcataaacatgttcctttgacagaaagcctaataaggctataaaacaaaaattactacacgtagtttcagcaacgcaaacaaaaaaccccgtgcctgcctaatgaattggtcattaggcatgggcttctgcttctctataaggcgactacgagctcccagctgctcagtagctagggtacatgcccatccttcctatggtgctcctgcagccgaagttgacagagcctcgaggctttctgctgccatttgccttcgtggtggatttcgcaatcctcttttccttgcccgtgaacttatcactgtctcgagctctttctttcgaccgtgccacttttgtcattgacgagagagagctttaagtcagtaccaggtcatggcaaaatcaaatggaaactaaatagtatagcaggttatctgaacacaaacaactctatttggaagatctgtgaaactagagtcataataatctggggctgtaggcattaccttagctagcctctccttaagctttggccttgcagatactaccactcttgctggttgacggtccg

SEQ ID NO: 218058 - DNA, 3078 bp, Zea Mays
gactgcccgtgcgcgccctcgctcagtcgctctcgcgcgcggcgacaactgagccaccgccgacggtccaactcttcgtcggaccctttgccggcgacgagcacccaccaggtaacccctcactctcttccctcgcatgctcttttgcaggggtttcatggtagcgtgacctgtctcggcctagaaaatgtatataaagaaggtcgtaatcgaagggtttaagagctacaaggaggagatatcaacagagcccttcagtcccaaagttaacgtagttgttggtgcaaatggatctggcaaatcaaatttctttcatgctatacgatttgtcctgagtgacatgtttcagaacctgcgaagtgaagataggggtgcccttctccatgaaggtgctggacactcggttgtatctgcttttgttgagatagtgtttgacaattcagacaatcgtattccagttgataaagaagaggtacgcttgcgcaggacaattgcttcaaagaaggatgaatactacttggatgggaagcatgtcagtaaaactgaagtcatgaatctgctagagagtgctggtttctctcgttctaatccatactacgttgtgcagcaaggaaagattgcatcccttaccttgatgaaagattctgaacgactggatcttctcaaagagattggtggtacacgtgtttatgaggatagacggaaggagagcttgaaaataatgaccgaaacagccaacaaaaggaagcagattgatcaagttgtccactacttagaggaaagactgagagaactcgatgaagagaaagaagaactaaagaagtaccagcagctggacaaacagagaagatcacttgagtatactatattggaccatgagcttaatgacgcaaggaatgaattagcttcgatggatgataaccgaagaaaaatttctgaaagtatgtcccttgcggacaatgaagtggtggatgtccgagagatgatcaagagttttgataaagaaataaaagtctcaactaaagggataaatgataccaaggcgcaaaaggaaggtgttgagaagaggcgtactgaagctctgaaggtagttgctaagattgaacttgatttgagagatataaaagataggattgtgaatgagaagcgagcaaaggatgaggcagcgagggatttgcagagtgtgaggagagagagtgaaaagtcaaagtctgaattggctgaaattagtaaggtgcatcaggccaaactaaaggaagaggaggatatatcgaagagggaagggcgacccaattcgcaaacaaagctgctagagataagtggcttcaaaaggaaattgaagatctcaagcctgtacttttatcaaataaaaagcaggaaggtttacttcaagaagaaatccagaagcttaaagatgaaatcaatgatttaactaactacatcgagtctcggaaaagcgaatcaagtcatattggaaggaggaatctgaggtgacagctgaacttgataggctacaagaagatcttataaaggcacagaaaagcttggaccaagcaactcctggggatatcaggagaggcctgaattctgttagcagaatcattaaggaccatggtattactggtgtttttggtcctgtattagaactggttgattgtgaagagaagttctttacagctgttgaggtcactgctgcaaatagcttgttccatgtggttgtcgagaatgatgacatatcaacaaagatcattcaaatattaactagagaaaaaggtggaagggtgacatttataccattgaacagagtgaaagttccagatctcagctgtccgcaaagtcctgattttgttccattgttgaaaaaattgaaatatcgatctgaccatcgtcgtgctttcgaacaggtttttggcaggacagtcatatgccgagatctggaaactgcgactaaagttgcacgtagcaatggtctagattgcatcacacttgatggtgatcaggtagggaaaaaaggtgctatgacaggaggcttctatgattctagacgctcaaaactaaagtttgtgaagataataagggataacaagacagcaattgatagaaagacgggtcatctagagagtgtcgtaaacaagctaaaagatatagataagaaaattacagatttagttaccaaacagcagcaaatggatgctgaacgtgatcatgcgaagtcagagttggaacaatttaaggctgacattgccagggctatgaagcaaagggggtcacttgagaaagcccttgtcaagaaggaaaaatcacttaacaacatctgcaaccaaattgagcaagtccagtctagcattgcaatgaagaatgatgaaatgggcacagagcttattgatcagctaacttcagaagaaagagatctcctttcacgattgaatcctgaaattactgatttgaaggagagatttctaatgtgtaaaaacagtcggattgagatcgaagcacgaaaggaagaattggagaccaatttatcaacaaatcttatcaggcgtcagaaagagctagaagcgataatttcatctgcagattctagaaccttgcctttggaagctgaggcaaaggagcaagaactgaaaagttccaagagaaaccttgatgaactaacttcattattaaaggctaatgtcgatgccataaataatttcaccagaaagatggatgatctgaaaagaaaaagggatgatctgaaggctcgtgaagctattttagagcagactgtacaagatggtgccaaagacttagaacagttgatgaacagcaggaacacttatctagccaagcaagaagagtgcacgaagaagatccgagatttgggcttgttgcctgctgatgcttttgaagcgtacaagaggaaaaacaagaaacagctacataagatactctatgactgtaatgagcagttgaagcagtttagtcatgtgaaccaaaaggctcttgaccaatatgtgaacttcacagaacaacgcgaacaactgcagagaaggcgagctgaacttgatgccggtgatgtgaatctgaaagactact

SEQ ID NO: 218059 - DNA, 1632 bp, Zea Mays
atctttctctattacattgccgatcacttgcctgacaggggtagcagcctcttcgcggtggctggggatggcgggcggcaggcggagggcggcggcgagggctagctccggtggtcgccggccacgcgaatcatctctttctctgtgaatgtggcgtccgcttcgaactacatcgtccgttggccatctgcacctccttcccggtgaaccctacaagcccctaacctcccaggaacaaagtttgtggtggtgtttcagagctgcagctgccaaaatgttctggtggtaatatgttacacaaatcaagaactgtattgatcgtgtctattgccataggatctatcttggccctaatccttgccacatgcacttttgtgatgtatgctcgaaagcgactgaatcagaagcttgtgcagagtaatgagacacctcctgttccaaagttgatggaccagcaattgaaactgtcgtatgctgaactgagtaggtctactgatggcttctctacagctaacctcattggcgttggaagctttggctcagtatacaggggaacactaagcgatgaagagcaggaagtcgcagtaaaagtactgaacctcctgcagcacggcgctgagcggagtttcctggctgaatgcaagatggctccatccgtccaccggggaaggcggtgagaggtcctcccgcacgctgaccatggctgagagagtgagcattgcactcgacgtcgctgaggctcttgactaccttcacaaccatggccaagtgccaattatacactgtgatctgaagccgagcaatgtccttcttgaccacgacatggttgcccgtgtaggggactttgggctgtcacggtttgtccagggagctaacagcaactcgttccaacccatagccaacactactggaatcaaaggcaccattggatacattcctccagagtatggaatgggtggcggagtttcagtggaaggtgatgtctacagctatgggactctcctgctcgagatgttcacggcaaagcggccaacagatcccttgtttcagggaggccaaagcatccgcagctatgtcgcagcggcttatcccgagagagtaacagcagtcgctgacctatctctgttgcagcacgaagagagaaacctggatgaagagagcctagaagagtccctcgtgtcagttttccgggtcgcgctgcgatgcaccgaggagtcaccgagagcaaggatgctcactagagatgccatcagagagcttgctggtgtaagggatgcttatgggtagctacttggtacgtaggggtgacaacgggctctatattttacactataaaattgaaggatttacactataaaattaaaggatcggatcgggttacgatcgggtcatatttatattcatttttgaactaaaataatttaaggcttagcaatttatgaagaaacatttgaatcacgatccattaccaccacccctacttgaacgttagcaagttacagtccatagagtaatatgtaaatagcactggaaacgattttattttttgtaagtgaagtagaatgtaggaattgtgtgtattgatagagaagagtgctgttacatacataggggaagagccataggtaaaag

SEQ ID NO: 218060 - DNA, 2362 bp, Zea Mays
cgacgttttcattttggaacgtcttgagggcatgtttgtttaagattatccagactatataatctcatttattttgaactctgggcagattataatcgtgtcagtgtcacaccatgtggcctgtttgtgtttgaccaaccagctccaaagaccgaagcattcgaagtccccctgaaaccaatccaccgccgctcttcaccgccacgccggagctaccccccgccgaagtgcccgcttcccgctctcctcattcaccaccttcgtctcgcggcacgcgcttatctgaggcaacagcggccgcctcctgccccgccgcggagctatacgtggaggccggcatccccgtcgctgcccgcccgttcccaggctacccagggcagattgatctctgtaatctctgaggcggagaagaccaccccgaggcccaaacagtccgggaaccgattggggcgccgctcggccgacgatgtcgtcgagcaggttctcgccggtgctgcaggcgtccgacctcaacgacttcatcgccccgtcgcaggactgcatcatctccctcaataagaacacctcctcctcccgccgcctccagaaaaatcagaaagaaactacagtgagctcaaaacctccagaggaagcagtcaagatttcactaaaagactgtctagcatgcagtggctgtataacatcagcagagacggttatgctggagaaacaaagcttgagtgacttcattgatcacataaactctgataaagctgttattgtatctgtgtctccccagtcaagagcatcactagctgcattcttcggtctttctcagtcacaggttctcagaaagctgactgctttgttcaagtcgattggtgtaaaggctgtctttgacacaagctcgagtcgagatctatctcttattgaagcatgcaatgaatttgtttcacgttatcagaaaaaccattcatgtagtggccaagaagctggagccaatcttccaatgatttcatctgcatgcccgggttggatatgctatgctgaaaagactcttggttcatacatcctaccttacatctcatctgtgaagagcccgcaacaggcaattggtgcagccattaagcaccatgtggttgataaacttggtctaaagccgtatgatgtttatcatgtcactgtgatgccctgctatgacaagaagctagaggctgtccgggatgatttcactttctcagtagacggtaaagaggtcaaagaggtggattcagtactgacaactggtgaagtgttagacttgatacagtccaaatctatcgatttcaagacagtagaggaatcttcattggacagattgttaacaaatgttgatgaggaaggccatctatatggggtttctggaggttctgggggctatgcagaaacagtctttcgctatggagcaaatgtaatttacaaaagagaaatagagggtcctcttgacttcagaatcttgagaaattcagattttcgtgaaattacattggaggtggagggcaaacctgttttgaagtttgcactttgttatggattcaggaacctgcagaatattgttaggaagattaagatgggaaaatgtgaatatcactttattgaagttatggcgtgcccttcaggttgtcttaatgggggaggtcaattgaagcctgttcaaggccaatctgctaaggaacttatccagcaattagagagtgtgtacacacaagatatatcaatatcggatcctttcagtaaccctatcgcgaaaaaactatatgacgaatggctggggcaacctggttcagagaatgcaaagaagtatttgcacacagaatatcacccagtggtgaagagtgtggcctcacagttacagaactggtgatagaggtttcttgttgcactgggaactcctatgttcctcaagagccaagaggaacctgcaaaccgagcaaacatggcgacctgtccatgctaagcaaatatggatcacacaagaattaaacttactcaagtttttttggcattatggcgaagaagttttgttaacatataggttttcagctgctttctagttaaatgttgtgccagggaaacaacagctaaatcgcaatgtgtaaaatgaacgaagtaatgtgtaaaataaacaacagctaaacatggcgaccttttcattgtctggtacacgccctttgccacatttttttttttggtaaggaaggatagctcgttggttgcccgtatatgttttttagatgctcgggcatagtagagaagggaacgaaaaacatactcagtcccggtatattttagggattttaagacagataaaaaggacaacacaagagatgcacgtgcttttact

SEQ ID NO: 218061 - DNA, 1958 bp, Zea Mays
atccgacccggacagccaaacccatacgacgtgcaccaccgcggccgttctcaccaagccgccatcgacttgctgacgacgacgacgttcgtcaggcggtgcgcgctcagaccaccatggccagcgtcggcgacgacgcgccgctgctcggcggcggcgggaaggcggccgtgtggcgcgagcgctgccccgggtgcaggcagcagaggagggtgcaggccagtgacgggatcccttacgcggacttcctctacgtctggatcgcctgcctctgcgcctctctgccggtccagtcattgtttccttatgtatacttcatgatcagggacttgaaggtggcaaaagaagagcaagacattggattctatgctggttttgttggggctacctatttcctcggaagaaccatcagtgccgtgccatggggcatgtttgccgacaagtatggaaggaagccatgcatcgtgatcagcatcctctcagtgattgtgttcaacacactttttggacttagcacaacttactggatggcaattgtaactagaggactacttgggttgctatgtggcatactaggacccatcaaggcttatgcttcagaagtctgcaggaaagaacaccaagccctgggaatatctcttgttacatcttcacgagcgatagctcttgttattgggccagctcttggcggctttcttgcacagcctgcacaaaagtacccaaatcttttctccgaagagtccatatttgggaggtttccatactttcttccttgtttcataatatcattgctagcagcaggatcatgtatcgcatgcatttggcttccggaaacgctacactttcatgatgatgacaaagtagaagtttttgaagaactggaggcacaagttggtggctccgaatctacaacaaatctgctaaagaattggcaactgatgtcagcaatgatcctctactgtatcttttctctgcatgacacagcttatatggagatattttcactctgggctgtgagcagtacaaaattccggggccttagcctcacatcccaggatgtcggtactgtgctatccttctcaggttttggagtactcgtataccaacttgctatttatccttcccttgcaaagtatttcggaccaatcaagacatttcggcctgcggcgatcctgtcgatcattctcctcgctacgtatcccttcatggccaatctacatggcctggagctcaaaatacttatcaacatggcatcagttttgaagaacatgtttgctgctactattactaccacgtgcaacattctacagaacactgcagtgacacaagagcagagaggtgttgcaaatggcatctctgttactctaatgtcaatgttcaaagctgtagctccagcagcagcaggaattctgttctcatgggctcagaagcacataagcggactgttcttaccagcctcaaggctgcaatgcaagaacctgtcctcccaacagagccctctgaatgtgactgctacttgtgcttctttcgctgagaagaggctggttcttgtccatgccacggcagagggttctgaggctggtgcggagcagccagaagagccgaaaccagcgaccaagatcgaggaaatgccactcgagtcgaagcagaagatgatcatggagcaaagagcgcggatgaagcttgccaagaaactgaggcagcggcgcaagcggcttctccgcaagaggaagcttaggaagaagggcaggtggccaccgtccaagatgaagaagctcaagaatgtatgaacaacgtcaacgttgactgccactctgccttggttttatgtgttgtgattgtgattgcccagcttacgaattttgctgttcagaatctgagacacggtacctacaaaatgtaactctgttttcacgtaatttgaatcttcttacagtctagcgtgctcgttgtgtctg

SEQ ID NO: 218062 - DNA, 1122 bp, Zea Mays
taggagcaatccttttgttacatcttcacgagcgatagctcttgttattgggccagctcttggcggctttcttgcacagcctgcacaaaagtacccaaatcttttctccgaagagtccatatttgggaggtttccatactttcttccttgtttcataatatcattgctagcagcaggatcatgtatcgcatgcatttggcttccggaaacgctacactttcatgatgatgacaaagtagaagtttttgaagaactggaggcacaagttggtggctccgaatctacaacaaatctgctaaagaattggcaactgatgtcagcaatgatcctctactgtatcttttctctgcatgacacagcttatatggagatattttcactctgggctgtgagcagtacaaaattccggggccttagcctcacatcccaggatgtcggtactgtgctatccttctcaggttttggagtactcgtataccaacttgctatttatccttcccttgcaaagtatttcggaccaatcaagacatttcggcctgcggcgatcctgtcgatcattctcctcgctacgtatcccttcatggccaatctacatggcctggagctcaaaatacttatcaacatggcatcagttttgaagaacatgtttgctgctactattactaccacgtgcaacattctacagaacactgcagtgacacaagagcagagaggtgttgcaaatggcatctctgttactctaatgtcaatgttcaaagctgtagctccagcagcagcaggaattctgttctcatgggctcagaagcacataagcggactgttcttaccaggagatcagatcttgtttctattgctaaacatggtgtcggtgattggtctggtgctgacgttcaagccatttttctccctaccaaattcaatgaggcattcataatttgtatatatgaagtttcttcttaatataatgatgcgcaatctcctataggttcgagagagaaaaaaatatatatcagggacactgtttgggttttgaacggcaagagttcatgtattgtgttggtccatacttttcgccttatgatgaattaagtcgttatatataaagggttctctgagtttatg

SEQ ID NO: 218063 - DNA, 1658 bp, Zea Mays
aaagaacagatactatggaaccaggcttatagctacagttcgtggtaaccttatcttctctctcaatggaacacacaccgtgtcgttttagtgttctcatcctccatccgcttgctcctgctctctcaagtcaaagcagttgatacggtggcgcgagcagcaagctcgggaggccaggtagcaaaactagtgtcttgaatcggctgttcgtgagccgagtgcgctgggtgggctgtgccgacggcggcggcggtccggttcacagctacctcttacctagaggagcgcgcgcgcacactacacgcggacggaccagacaccggcgatggccactctggcgacggccgcggcggcgtggacaagggaggaggacaaggcgttcgagaacgcggtcgcggccgccgcggcgcccccggacgacgggccgccggatgatgggtggttcacggcgctcgtggccagtgtgccggcgcggacggcggaggaggtgcggcggcactacgaggcgctggtggaggacgtggccgctatcgaggccggccgcatcccgctcccgcgctatgctggagaggagtcgtccgccgcgacgcccgagggctccggatccgccgcctccgcgcccaaggacgctggaggaggaggaggaggcggtgggcaccgacgcgaagaacggaagagcggcgtcggcgttgacgtggggaagagtagctctaaggctgagcaggagcggcggaagggcatcccgtggacggaagaggagcacaggttgttcttgctgggtctggacaagttcggcaagggcgactggcggagcatctcgcgcaacttcgtcatctcacggacgccgacgcaggtggcgagccacgcgcagaaatacttcatccgtctcaactccatgaaccgggaccggcgccgctccagcatccacgacatcaccagcgtgagcgcgggcgaagtcgccgcggccggcgcacccatcacgggcggcccaaccacggcgggagcgatgccgatgggtcccgcgggcatgaagcaccaccaccaccacccggctccgccgatgggcatgtacgggcacgcgcccatgggccacccggtctcggggcacatggtggcgccggcggccgtcggcacgcccgtcatgttcccgccgggtcatcactcgccctatgtcgtgccagtgggatacccggcgccgccggccaagatgcaccaatgatcgtttacccggcatttgcacatctgcagagctgcatttcgttgcttgttctttcttgattttgttgatcttgtgtagccagagcaatctatccatcctttcctgatctcctggagtgagtgcagggcaggcaggcaggcaggcgatgcgacgaagaataagtatctgctgactgttgcaatagcgctacttgtagtagtcacactgatggaggctccaggaatgttactagtagcagccttccaggttgcggatacttactgatcatttgtgcagagttgcaagttgcacctggggactgatccgattccattgtccgaatgtaaatggattgtctataatattactatctcatctgtttatttaaagaaggaattacacttggcatgttgtaaaaaaaaacttataccatgttatcttagctttaattcatacctgc

SEQ ID NO: 218064 - DNA, 1505 bp, Zea Mays
gcgtgatcatcatattatcgatagtctatgtagggatcgataaagaacagatactatggaaccaggcttatagctacagttcgtgtcaaagcagttgatacggtggcgcgagcagcaagctcgggaggccagcgcgcgcgcacactacacgcggacggaccagacaccggcgatggccactctggcgacggccgcggcggcgtggacaagggaggaggacaaggcgttcgagaacgcggtcgcggccgccgcggcgcccccggacgacgggccgccggatgatgggtggttcacggcgctcgtggccagtgtgccggcgcggacggcggaggaggtgcggcggcactacgaggcgctggtggaggacgtggccgctatcgaggccggccgcatcccgctcccgcgctatgctggagaggagtcgtccgccgcgacgcccgagggctccggatccgccgcctccgcgcccaaggacgctggaggaggaggaggaggcggtgggcaccgacgcgaagaacggaagagcggcgtcggcgttgacgtggggaagagtagctctaaggctgagcaggagcggcggaagggcatcccgtggacggaagaggagcacaggttgttcttgctgggtctggacaagttcggcaagggcgactggcggagcatctcgcgcaacttcgtcatctcacggacgccgacgcaggtggcgagccacgcgcagaaatacttcatccgtctcaactccatgaaccgggaccggcgccgctccagcatccacgacatcaccagcgtgagcgcgggcgaagtcgccgcggccggcgcacccatcacgggcggcccaaccacggcgggagcgatgccgatgggtcccgcgggcatgaagcaccaccaccaccacccggctccgccgatgggcatgtacgggcacgcgcccatgggccacccggtctcggggcacatggtggcgccggcggccgtcggcacgcccgtcatgttcccgccgggtcatcactcgccctatgtcgtgccagtgggatacccggcgccgccggccaagatgcaccaatgatcgtttacccggcatttgcacatctgcagagctgcatttcgttgcttgttctttcttgattttgttgatcttgtgtagccagagcaatctatccatcctttcctgatctcctggagtgagtgcagggcaggcaggcaggcaggcgatgcgacgaagaataagtatctgctgactgttgcaatagcgctacttgtagtagtcacactgatggaggctccaggaatgttactagtagcagccttccaggttgcggatacttactgatcatttgtgcagagttgcaagttgcacctggggactgatccgattccattgtccgaatgtaaatggattgtctataatattactatctcatctgtttatttaaagaaggaattacacttggcatgttgtaaaaaaaaacttataccatgttatcttagctttaattcatacctgc

SEQ ID NO: 218065 - DNA, 6283 bp, Zea Mays
atggagacggctgccgcgaccgcgaggcccggcgcagcgaggaagcggcggtggaaccaatcgcagccttgccaaggggagggtccgagcgatctcaagttcgctagacttcgcttcgacggcgacggcggcgccaagggcgcgtgggaacacctcgacctcgtcctctccctccagagcaaggagctgtcgctcgaaagaaagattgagctagcggtcgaatttctaaccacactgccaaataactcaagctgcagcattcagctattgcggctggtgtcatttattggaaactggttgcagtctatcttaaattttcctgagaatagtaaaaagattctacatatttttgatccagcattggatagtagatgctgggcaattttgagagtgtgtgttgaaaagaaaccatccatttcaatatctctgaacttacttaaatcccttagtcgagttgcaagtcatggtttgggcagagttgatagcaacacatcatgtcctgacaatgaatctattgagctctttgaacaagtgtttgactgcatgtcattgcttttctcttccaatacaagagctttcttcaacgctggtgtggatttatgggcctcttgtgccattgaggttgtcaatcttgctcagaaggtgtcagctaaaaaggacaatttttgccctgttcttcagaagcttgcaaattgcctcctcgggcaattcgcatgcttcctgagattttatgcaaatccgaagaatattttccatgcttttgttgataaggttcttgggccattgttggaattgttagttttacttaattcacaagcacattccagtgaacacaagcagacaggaacaatgttgaaaattgttgaagatgttttttcaaatggactgtttcatccccaacatcttagtggatatttcggtctcaggagtttgaataaatcttctgctgctaaggatatcaaaggaagctaccatagacatctatttcagcgattcaaaggaataaaaacagaaaacaaggctgtattgctggctgggtttggctacttgtttcaattgtttgttaggagggctagaaatcaaagaacaactgtagcaccaagtagaacgactttgggtacgctgcacaaaagcaatgatggttctgaagaaccacaacatagggaatcactttttgaagtgtttattatgttcatggaacccatcgtattagagtgtaaatcgtattcccaaaaggacttctctaagttaggggtgacaaggctagtagaggtccattgcatgctgaaatccattaatgtgatgctgataacccttattgaagagaagatctatgttcctacagaggacacattggaaggatctcacttcaattttttgcaagatatttactctgtcttgatcttaatatctgaaaagatgtacaaattctggatgtctgctgtgcatctagaagatgtaaacattaagaagatagtacctttaatgtttgcagagattatttctgcagttggcaattttctagaaatcgagtacaaagttctaggagacgaccttgtgaaattgtggttaatgatttttgctttgtctgctattaatacatcttccaaggacatcgaaccctgttttctgcttgcttcaaagatttcaagcctctcagcccaagtgatttgcacattcagtgaacttcgtcaggtttcccgctcaattttcagtctgtgtgatgctgtgagggcattcagagttgagggccctgatggagtacatggctcattttctgtggcctctttatcgtcccaggagtgtttgggatcattgacaacactgttgagttccgaaacattgatgggtgctattcgcacttcaattaagtcgatgcctcaaggccagtctagccgatgtatagaggagcttacatcggatctcacagaaacattgaattggatggcagattgcagttttgaagatgatgtaagcaaactcagagagccatccattgccaggaagtctattttttgtcagaaagccgaacttcttggcagacacttatctgaagtatatgctagcattcttgattcaataactgtcactgtttcaaatagtacactggtaggaaaatctgttgaaaggttggtcaatgcagtccggcgaaatttcagtcacttggtcagaaacaaatcaaaaaatataaatggatttatttcttcaattatgggaaaaaatgtatctaaaaaactacatgccaaccggcagaagatcccaagtttttcctggattttttgcctattctgtcgcctatatatatcatgtagaagcttgtatcagcaatctattggcctcatgcctccagatgtagccatagatgcaacaaagttagtggggaatccattcattgtatgttcaggaaaggaatggaccaatccgacgaatattcttgggaagggttattttgcattgatcgatgaaaattcaaactcccttttggatgttattgagagtttatcagagtctctctcaacaaactgtgcttcttttgctccacttgtttacatcttccatgtcatggttctgcagagactcaatgaccttaacaggcagattaaggcatttcaatttttgcttgaagatgatgcttggcaaatagataataaggatataggaaacactcgactgttaaaggaatcttgcagtctggaggctgctaaattgatgagttttgtgatgaattatgtgaagctattatcttcaggagaaactggtccttttgggtcttatgatgttagtagttcctgggatttgagtctatgttccttagatgaaggctcttttcctatagccacgtggcagcttctgtgtgaaaacattgacgtttggagctctcatgtttctaagaaggatttaaagaactttttctctaatttgataaggttttcttttactcaaaagagatcttccctggacaaggagaataatggcactcaatcttcgggcagagaaatgactttgcatagtgtctctattggagtcctttgtgatacaattatttatgaaaaaaaggtaattttgaagaatctggcatcaagtttttgtcatgctttgaagaaatcgttttcttttgttaccaactctgatggagataatgtctttttggacacttcacctgatttgatggagacaataagtaacctggaaaatgagaagttgattggtacaggttctggtgctacgcatgcgcactgcttagacaaacactggatctgtgaggatttccttaatttttttagtgctgttcctggatttcatgcaaattccaaggcattcatacggcttataaactatattctccatcttgaaagactgctgctgcttaaattgctaggtcttcgttgtgaatcctgcaatcccatgaagttactgcgtttgtttatatgttgtcgtagggctctgataaatctcatcttgaaattcgggaaagagtgcccagaggcaaggcaatacttgtccttttcaaataaaaatggtaactcatattccctggtttggtttttgagatctgttcaggaaattgttggttcatcacataaaatatttgacgagtgtactgatgaggtgaataggttgatgttctccttgttagataagacatcagaattattttctacactagctagtttgaattcatcagtttacttgtttgatttaaagaaacaaattgaatcttcccttgatggtagtcctattaaaaaggagacttcagaacataatgaccaggcatttgatatagtagaagtatcagccttagagtgtgtcagaagtatggctgaattgttgcagaagactgcaactgggatacctgttaccataaaggacagcaagtgtgttatcaaaatagaagactgccgtaacactgtatgttggaaaagattgtcatgcagcatgtcttgcataggaggatttttgcagggacttaattcagcattagaaagcacattcaatgatcacccaatagcaagcccagaggacaggaagatgttgcttcagtattgctcaagatttagcagttatgtcgctaagtttgggacctttgtagatatttgtgttcatgtcttgtttatggataacaaagattctgcctctatagatttagtctctgttcatcttccacaagagctagattgtgcgaatggttttctgaatattgaagcaatcatggatgaattgacaaagtgtggaagtcatggagttgatctgtctaagatacagtacatggaaaatgttcttctggaaaacctgttgaaaggtgaatgcccactcatatcattcactttgagagagatatacagtatatctgctgctatcattaaatttcatggttacctatccttttcaagtgatgtttctaggcagacttgcagccctgtcgaacagctttcattgggtaccatgcttgggatagctttcatcactctacagaaagttgcagacatgtctagctggccacacatgttttgtcttgtatggattgatggggtattaagatatcttgaagtcttaggaagtgcatttacattgtctgagctcaatatttcaatagaactgtatactcagattataaatgctttattgagggctgttggtaaatgcatcttacttcaacagaagaatgctactctccctactcatgagattggctcaagcacgaaaacactgcaattacagaatgcatctggttatgcttttcctaaagatttcattgatacacagaatagattaaattcattgaaatcgaggcttcgactagtacttggaaaatttgtcagtattgcatcaaacacacatctaaatgcagctctacaagtaattgaaagggcattggttggagtgaatcattgcagtcattcaatataccaaatttacactggaaatcctgatggtgggacagtttcttctgatgttgctgctgggatcgactgcctctatatgattcttgattttgtgccaggaaacaagcgcgtttttaagaggactgtccctggcctagttggtgctttattcaacattatactacaccttcagagtccacatattttctatagtcagaacctgccacctcaagtgtctgcttgttcctgtgacactcttcaaagagtttaaacatcttctagcaaagtactgcaaccaaagtgtacaacaccatggagatcatgctgaatatattcttgacagacaattttcagttgatatctatgctgcatgttgcaaattgttatgcactactcttcggcaccaacaacgtgagattgggtggtgtgtggccctcctggaggattcagtaagcatactgctcggttgtttggagtccacagattcgaagatgattaacgtagctggatattttgcttggaatatggaagaggcactaaaatgtgcttcctttttcagaaggatctatgaagagatgcgccagcagagagaaaccctaggaaaacatgccatgcactttcttgctggttatatttccatgttttctggacagggtccttttcagacagggataacacgagaaattgatgaggtcctgagacctggtgtgtattccctgattgatatatgcgaggaaagtgattttcaacagctccacacatacctgggtgagggtccatgccgaaccactcttgctgatctggtgcgtgattataaattacacttccagtatcagggcaagatctaagccagcctgttctttatttttgaacaactggcgtttatcctgtcacgtctggttagaaaatctatgaagtaccatcttctggatgatcttgtgttttgggtggactaattttggcctaatggctgcttaccgacttatcaaggagacatggtggctaataaagatttaaggcttgtgaaatcaacttcataggatctacagctgcctcgtgctgttctgcaagttgacctggacacctggttttcctggtacttaacaacagcaaaaataggacggttagtatcaagtggtgtttggctaccttgtaagagatttactgattaaaacattgtaatgctaaagcttgaatagatcataattgaggaaagagaattatctagtgtcctggtgaagttctgccggtgttggtctcgatcgacctgcttctagtgcaatccagatccaggcatatttatcactcagaatcgagcccccctacttctgttttgcccgttttctttttgcagtttcctttcacagtttgacacaaccacaaaagtcttttactctccc

SEQ ID NO: 218066 - DNA, 5577 bp, Zea Mays
atggagacggctgccgcgaccgcgaggcccggcgcagcgaggaagcggcggtggaaccaatcgcagccttgccaaggggagggtccgagcgatctcaagttcgctagacttcgcttcgacggcgacggcggcgccaagggcgcgtgggaacacctcgacctcgtcctctccctccagagcaaggagctgtcgctcgaaagaaagattgagctagcggtcgaatttctaaccacactgccaaataactcaagctgcagcattcagctattgcggctggtgtcatttattggaaactggttgcagtctatcttaaattttcctgagaatagtaaaaagattctacatatttttgatccagcattggatagtagatgctgggcaattttgagagtgtgtgttgaaaagaaaccatccatttcaatatctctgaacttacttaaatcccttagtcgagttgcaagtcatggtttgggcagagttgatagcaacacatcatgtcctgacaatgaatctattgagctctttgaacaagtgtttgactgcatgtcattgcttttctcttccaatacaagagctttcttcaacgctggtgtggatttatgggcctcttgtgccattgaggttgtcaatcttgctcagaaggtgtcagctaaaaaggacaatttttgccctgttcttcagaagcttgcaaattgcctcctcgggcaattcgcatgcttcctgagattttatgcaaatccgaagaatattttccatgcttttgttgataaggttcttgggccattgttggaattgttagttttacttaattcacaagcacattccagtgaacacaagcagacaggaacaatgttgaaaattgttgaagatgttttttcaaatggactgtttcatccccaacatcttagtggatatttcggtctcaggagtttgaataaatcttctgctgctaaggatatcaaaggaagctaccatagacatctatttcagcgattcaaaggaataaaaacagaaaacaaggctgtattgctggctgggtttggctacttgtttcaattgtttgttaggagggctagaaatcaaagaacaactgtagcaccaagtagaacgactttgggtacgctgcacaaaagcaatgatggttctgaagaaccacaacatagggaatcactttttgaagtgtttattatgttcatggaacccatcgtattagagtgtaaatcgtattcccaaaaggacttctctaagttaggggtgacaaggctagtagaggtccattgcatgctgaaatccattaatgtgatgctgataacccttattgaagagaagatctatgttcctacagaggacacattggaaggatctcacttcaattttttgcaagatatttactctgtcttgatcttaatatctgaaaagatgtacaaattctggatgtctgctgtgcatctagaagatgtaaacattaagaagatagtacctttaatgtttgcagagattatttctgcagttggcaattttctagaaatcgagtacaaagttctaggagacgaccttgtgaaattgtggttaatgatttttgctttgtctgctattaatacatcttccaaggacatcgaaccctgttttctgcttgcttcaaagatttcaagcctctcagcccaagtgatttgcacattcagtgaacttcgtcaggtttcccgctcaattttcagtctgtgtgatgctgtgagggcattcagagttgagggccctgatggagtacatggctcattttctgtggcctctttatcgtcccaggagtgtttgggatcattgacaacactgttgagttccgaaacattgatgggtgctattcgcacttcaattaagtcgatgcctcaaggccagtctagccgatgtatagaggagcttacatcggatctcacagaaacattgaattggatggcagattgcagttttgaagatgatagactcaatgaccttaacaggcagattaaggcatttcaatttttgcttgaagatgatgcttggcaaatagataataaggatataggaaacactcgactgttaaaggaatcttgcagtctggaggctgctaaattgatgagttttgtgatgaattatagatcttccctggacaaggagaataatggcactcaatcttcgggcagagaaatgactttgcatagtgtctctattggagtcctttgtgatacaattatttatgaaaaaaaggtaattttgaagaatctggcatcaagtttttgtcatgctttgaagaaatcgttttcttttgttaccaactctgatggagataatgtctttttggacacttcacctgatttgatggagacaataagtaacctggaaaatgagaagttgattggtacaggttctggtgctacgcatgcgcactgcttagacaaacactggatctgtgaggatttccttaatttttttagtgctgttcctggatttcatgcaaattccaaggcattcatacggcttataaactatattctccatcttgaaagactgctgctgcttaaattgctaggtcttcgttgtgaatcctgcaatcccatgaagttactgcgtttgtttatatgttgtcgtagggctctgataaatctcatcttgaaattcgggaaagagtgcccagaggcaaggcaatacttgtccttttcaaataaaaatggtaactcatattccctggtttggtttttgagatctgttcaggaaattgttggttcatcacataaaatatttgacgagtgtactgatgaggtgaataggttgatgttctccttgttagataagacatcagaattattttctacactagctagtttgaattcatcagtttacttgtttgatttaaagaaacaaattgaatcttcccttgatggtagtcctattaaaaaggagacttcagaacataatgaccaggcatttgatatagtagaagtatcagccttagagtgtgtcagaagtatggctgaattgttgcagaagactgcaactgggatacctgttaccataaaggacagcaagtgtgttatcaaaatagaagactgccgtaacactgtatgttggaaaagattgtcatgcagcatgtcttgcataggaggatttttgcagggacttaattcagcattagaaagcacattcaatgatcacccaatagcaagcccagaggacaggaagatgttgcttcagtattgctcaagatttagcagttatgtcgctaagtttgggacctttgtagatatttgtgttcatgtcttgtttatggataacaaagattctgcctctatagatttagtctctgttcatcttccacaagagctagattgtgcgaatggttttctgaatattgaagcaatcatggatgaattgacaaagtgtggaagtcatggagttgatctgtctaagatacagtacatggaaaatgttcttctggaaaacctgttgaaaggtgaatgcccactcatatcattcactttgagagagatatacagtatatctgctgctatcattaaatttcatggttacctatccttttcaagtgatgtttctaggcagacttgcagccctgtcgaacagctttcattgggtaccatgcttgggatagctttcatcactctacagaaagttgcagacatgtctagctggccacacatgttttgtcttgtatggattgatggggtattaagatatcttgaagtcttaggaagtgcatttacattgtctgagctcaatatttcaatagaactgtatactcagattataaatgctttattgagggctgttggtaaatgcatcttacttcaacagaagaatgctactctccctactcatgagattggctcaagcacgaaaacactgcaattacagaatgcatctggttatgcttttcctaaagatttcattgatacacagaatagattaaattcattgaaatcgaggcttcgactagtacttggaaaatttgtcagtattgcatcaaacacacatctaaatgcagctctacaagtaattgaaagggcattggttggagtgaatcattgcagtcattcaatataccaaatttacactggaaatcctgatggtgggacagtttcttctgatgttgctgctgggatcgactgcctctatatgattcttgattttgtgccaggaaacaagcgcgtttttaagaggactgtccctggcctagttggtgctttattcaacattatactacaccttcagagtccacatattttctatagtcagaacctgccacctcaagtgtctgcttgttcctgtgacactcttcaaagagtttaaacatcttctagcaaagtactgcaaccaaagtgtacaacaccatggagatcatgctgaatatattcttgacagacaattttcagttgatatctatgctgcatgttgcaaattgttatgcactactcttcggcaccaacaacgtgagattgggtggtgtgtggccctcctggaggattcagtaagcatactgctcggttgtttggagtccacagattcgaagatgattaacgtagctggatattttgcttggaatatggaagaggcactaaaatgtgcttcctttttcagaaggatctatgaagagatgcgccagcagagagaaaccctaggaaaacatgccatgcactttcttgctggttatatttccatgttttctggacagggtccttttcagacagggataacacgagaaattgatgaggtcctgagacctggtgtgtattccctgattgatatatgcgaggaaagtgattttcaacagctccacacatacctgggtgagggtccatgccgaaccactcttgctgatctggtgcgtgattataaattacacttccagtatcagggcaagatctaagccagcctgttctttatttttgaacaactggcgtttatcctgtcacgtctggttagaaaatctatgaagtaccatcttctggatgatcttgtgttttgggtggactaattttggcctaatggctgcttaccgacttatcaaggagacatggtggctaataaagatttaaggcttgtgaaatcaacttcataggatctacagctgcctcgtgctgttctgcaagttgacctggacacctggtaatatcaagtagatatcgacatttaattccagggtaatgtagaacatgcatgcttacccttgaataagtgatatttgaagccttatcacttgaatataattccttttccaggttttcctggtacttaacaacagcaaaaataggacggttagtatcaagtggtgtttggctaccttgtaagagatttactgattaaaacattgtaatgctaaagcttgaatagatcataattgaggaaagagaattatctagtgtcctggtgaagttctgccggtgttggtctcgatcgacctgcttctagtgcaatccagatccaggcatatttatcactcagaatcgagcccccctacttctgttttgcccgttttctttttgcagtttcctttcacagtttgacacaaccacaaaagtcttttactctccc

SEQ ID NO: 218067 - DNA, 6435 bp, Zea Mays
atggagacggctgccgcgaccgcgaggcccggcgcagcgaggaagcggcggtggaaccaatcgcagccttgccaaggggagggtccgagcgatctcaagttcgctagacttcgcttcgacggcgacggcggcgccaagggcgcgtgggaacacctcgacctcgtcctctccctccagagcaaggagctgtcgctcgaaagaaagattgagctagcggtcgaatttctaaccacactgccaaataactcaagctgcagcattcagctattgcggctggtgtcatttattggaaactggttgcagtctatcttaaattttcctgagaatagtaaaaagattctacatatttttgatccagcattggatagtagatgctgggcaattttgagagtgtgtgttgaaaagaaaccatccatttcaatatctctgaacttacttaaatcccttagtcgagttgcaagtcatggtttgggcagagttgatagcaacacatcatgtcctgacaatgaatctattgagctctttgaacaagtgtttgactgcatgtcattgcttttctcttccaatacaagagctttcttcaacgctggtgtggatttatgggcctcttgtgccattgaggttgtcaatcttgctcagaaggtgtcagctaaaaaggacaatttttgccctgttcttcagaagcttgcaaattgcctcctcgggcaattcgcatgcttcctgagattttatgcaaatccgaagaatattttccatgcttttgttgataaggttcttgggccattgttggaattgttagttttacttaattcacaagcacattccagtgaacacaagcagacaggaacaatgttgaaaattgttgaagatgttttttcaaatggactgtttcatccccaacatcttagtggatatttcggtctcaggagtttgaataaatcttctgctgctaaggatatcaaaggaagctaccatagacatctatttcagcgattcaaaggaataaaaacagaaaacaaggctgtattgctggctgggtttggctacttgtttcaattgtttgttaggagggctagaaatcaaagaacaactgtagcaccaagtagaacgactttgggtacgctgcacaaaagcaatgatggttctgaagaaccacaacatagggaatcactttttgaagtgtttattatgttcatggaacccatcgtattagagtgtaaatcgtattcccaaaaggacttctctaagttaggggtgacaaggctagtagaggtccattgcatgctgaaatccattaatgtgatgctgataacccttattgaagagaagatctatgttcctacagaggacacattggaaggatctcacttcaattttttgcaagatatttactctgtcttgatcttaatatctgaaaagatgtacaaattctggatgtctgctgtgcatctagaagatgtaaacattaagaagatagtacctttaatgtttgcagagattatttctgcagttggcaattttctagaaatcgagtacaaagttctaggagacgaccttgtgaaattgtggttaatgatttttgctttgtctgctattaatacatcttccaaggacatcgaaccctgttttctgcttgcttcaaagatttcaagcctctcagcccaagtgatttgcacattcagtgaacttcgtcaggtttcccgctcaattttcagtctgtgtgatgctgtgagggcattcagagttgagggccctgatggagtacatggctcattttctgtggcctctttatcgtcccaggagtgtttgggatcattgacaacactgttgagttccgaaacattgatgggtgctattcgcacttcaattaagtcgatgcctcaaggccagtctagccgatgtatagaggagcttacatcggatctcacagaaacattgaattggatggcagattgcagttttgaagatgatgtaagcaaactcagagagccatccattgccaggaagtctattttttgtcagaaagccgaacttcttggcagacacttatctgaagtatatgctagcattcttgattcaataactgtcactgtttcaaatagtacactggtaggaaaatctgttgaaaggttggtcaatgcagtccggcgaaatttcagtcacttggtcagaaacaaatcaaaaaatataaatggatttatttcttcaattatgggaaaaaatgtatctaaaaaactacatgccaaccggcagaagatcccaagtttttcctggattttttgcctattctgtcgcctatatatatcatgtagaagcttgtatcagcaatctattggcctcatgcctccagatgtagccatagatgcaacaaagttagtggggaatccattcattgtatgttcaggaaaggaatggaccaatccgacgaatattcttgggaagggttattttgcattgatcgatgaaaattcaaactcccttttggatgttattgagagtttatcagagtctctctcaacaaactgtgcttcttttgctccacttgtttacatcttccatgtcatggttctgcagagactcaatgaccttaacaggcagattaaggcatttcaatttttgcttgaagatgatgcttggcaaatagataataaggatataggaaacactcgactgttaaaggaatcttgcagtctggaggctgctaaattgatgagttttgtgatgaattatgtgaagctattatcttcaggagaaactggtccttttgggtcttatgatgttagtagttcctgggatttgagtctatgttccttagatgaaggctcttttcctatagccacgtggcagcttctgtgtgaaaacattgacgtttggagctctcatgtttctaagaaggatttaaagaactttttctctaatttgataaggttttcttttactcaaaagagatcttccctggacaaggagaataatggcactcaatcttcgggcagagaaatgactttgcatagtgtctctattggagtcctttgtgatacaattatttatgaaaaaaaggtaattttgaagaatctggcatcaagtttttgtcatgctttgaagaaatcgttttcttttgttaccaactctgatggagataatgtctttttggacacttcacctgatttgatggagacaataagtaacctggaaaatgagaagttgattggtacaggttctggtgctacgcatgcgcactgcttagacaaacactggatctgtgaggatttccttaatttttttagtgctgttcctggatttcatgcaaattccaaggcattcatacggcttataaactatattctccatcttgaaagactgctgctgcttaaattgctaggtcttcgttgtgaatcctgcaatcccatgaagttactgcgtttgtttatatgttgtcgtagggctctgataaatctcatcttgaaattcgggaaagagtgcccagaggcaaggcaatacttgtccttttcaaataaaaatggtaactcatattccctggtttggtttttgagatctgttcaggaaattgttggttcatcacataaaatatttgacgagtgtactgatgaggtgaataggttgatgttctccttgttagataagacatcagaattattttctacactagctagtttgaattcatcagtttacttgtttgatttaaagaaacaaattgaatcttcccttgatggtagtcctattaaaaaggagacttcagaacataatgaccaggcatttgatatagtagaagtatcagccttagagtgtgtcagaagtatggctgaattgttgcagaagactgcaactgggatacctgttaccataaaggacagcaagtgtgttatcaaaatagaagactgccgtaacactgtatgttggaaaagattgtcatgcagcatgtcttgcataggaggatttttgcagggacttaattcagcattagaaagcacattcaatgatcacccaatagcaagcccagaggacaggaagatgttgcttcagtattgctcaagatttagcagttatgtcgctaagtttgggacctttgtagatatttgtgttcatgtcttgtttatggataacaaagattctgcctctatagatttagtctctgttcatcttccacaagagctagattgtgcgaatggttttctgaatattgaagcaatcatggatgaattgacaaagtgtggaagtcatggagttgatctgtctaagatacagtacatggaaaatgttcttctggaaaacctgttgaaaggtgaatgcccactcatatcattcactttgagagagatatacagtatatctgctgctatcattaaatttcatggttacctatccttttcaagtgatgtttctaggcagacttgcagccctgtcgaacagctttcattgggtaccatgcttgggatagctttcatcactctacagaaagttgcagacatgtctagctggccacacatgttttgtcttgtatggattgatggggtattaagatatcttgaagtcttaggaagtgcatttacattgtctgagctcaatatttcaatagaactgtatactcagattataaatgctttattgagggctgttggtaaatgcatcttacttcaacagaagaatgctactctccctactcatgagattggctcaagcacgaaaacactgcaattacagaatgcatctggttatgcttttcctaaagatttcattgatacacagaatagattaaattcattgaaatcgaggcttcgactagtacttggaaaatttgtcagtattgcatcaaacacacatctaaatgcagctctacaagtaattgaaagggcattggttggagtgaatcattgcagtcattcaatataccaaatttacactggaaatcctgatggtgggacagtttcttctgatgttgctgctgggatcgactgcctctatatgattcttgattttgtgccaggaaacaagcgcgtttttaagaggactgtccctggcctagttggtgctttattcaacattatactacaccttcagagtccacatattttctatagtcagaacctgccacctcaaggtagtgtgttccatccagatgctggagccactgttctaatgtgtgttgaggttatcacttcatttgtgggaagacattcttttcaaattgatgcatcccatgtttcccagtgtctgcttgttcctgtgacactcttcaaagagtttaaacatcttctagcaaagtactgcaaccaaagtgtacaacaccatggagatcatgctgaatatattcttgacagacaattttcagttgatatctatgctgcatgttgcaaattgttatgcactactcttcggcaccaacaacgattcgaagatgattaacgtagctggatattttgcttggaatatggaagaggcactaaaatgtgcttcctttttcagaaggatctatgaagagatgcgccagcagagagaaaccctaggaaaacatgccatgcactttcttgctggttatatttccatgttttctggacagggtccttttcagacagggataacacgagaaattgatgaggtcctgagacctggtgtgtattccctgattgatatatgcgaggaaagtgattttcaacagctccacacatacctgggtgagggtccatgccgaaccactcttgctgatctggtgcgtgattataaattacacttccagtatcagggcaagatctaagccagcctgttctttatttttgaacaactggcgtttatcctgtcacgtctggttagaaaatctatgaagtaccatcttctggatgatcttgtgttttgggtggactaattttggcctaatggctgcttaccgacttatcaaggagacatggtggctaataaagatttaaggcttgtgaaatcaacttcataggatctacagctgcctcgtgctgttctgcaagttgacctggacacctggtaatatcaagtagatatcgacatttaattccagggtaatgtagaacatgcatgcttacccttgaataagtgatatttgaagccttatcacttgaatataattccttttccaggttttcctggtacttaacaacagcaaaaataggacggttagtatcaagtggtgtttggctaccttgtaagagatttactgattaaaacattgtaatgctaaagcttgaatagatcataattgaggaaagagaattatctagtgtcctggtgaagttctgccggtgttggtctcgatcgacctgcttctagtgcaatccagatccaggcatatttatcactcagaatcgagcccccctacttctgttttgcccgttttctttttgcagtttcctttcacagtttgacacaaccacaaaagtcttttactctccc

SEQ ID NO: 218068 - DNA, 3465 bp, Zea Mays
aatgacaccagccgcaatagctgaatgctgcagcttgagttatttggcagtgtggttagaaattcgaccgctagctcaatctttctgcacaaataaacatgccgttgtgaagatgtagattacaagtgagaagattagaataaggttgatctaaacaggattccacaaaatactccagcttcagtgcttctgtatgaatcagaaaaattacataaggtactaatcatgaacataatatgtcaaatttgtccatcttactgcttctatcatcctagaaagtaaaaagagaaagtactatttggcatacatcaatgcgattattgtgcaaaatcaacaaatataaagccaagctaaaaatgctaacaacaaaattgtatctcttataaaatcctattcacactgaattaacaaaatcatctcgtgcattgtttatggcagtaaacaagtaatacgcaatcctccattaaaagaggcgactaaaacgatggaagcataatcacataaacggaattcctagccacagggttacatgagctaacgttcaccgaaacagaagcagaagggtgacctttcgagcgacagctccttgctctggagggagaggacgaggtcgaggtgttcccacgcgcccttggcgccgccgtcgccgtcgaagcgaagtctagcgaacttgagatcgctcggaccctccccttggcaaggctgcgattggttccaccgccgcttcctcgctgcgccgggcctcgcggtcgcggcagccgtctccatggcaatggcgtctgtcatgagcggaagtggaggctagggttctgggtttggaggcacgtgctgcctcgcccgtttgatttctccgtgcccgaagacgcgccgtgaaaccttcttccgcgtccgaccaatattaataaagcacgaatcttaaagatgtgctaaccagactgaccgaccgagtcaccgtcacggtcaccgcggccccagcccaacccagagcattcttggtcccgatttcctcagctcaggtgccgggttccccaggcacaagctacaaaccctaacccatccgggagcaccggaaattttggaggctgaaacggaaaggggagaaggcgatgacgacgagggagccgcgcgaggcgtcccggcgcgatgggcgcgactcgcacgggaggcgcccccactcctcgttcaggtcgcggagggacgatcccagcccaaggagaagagatgacaggaggcgtgaatcggacagggcgcaccacagaagtcgagatggagaatttttggaggtggtggaccatgatcagaagcggaatagagatgctgcgcagagcgctgaccctccgaatgctgagtcgaagtcagcgagtgatatgaagaatggcccctccaccaggcatgagagatcacctaggggaaccaaacgattttctgagtcgagtgaggcatggcggcctcggtctttctttcaggttcttatcttttctcagtgtattatatcaaaagggaataccaccaatagcttctgctctctattacaaattgtttcatcatagctacaaatagtgtgctttgactatcacggttacatacatatgtgctcacgatgttacagagctcactattttggatagctaatagtaatatagtattttatggagttgctattttagatagccgaacagcaagtattccacattcggtaacttcaccggtactggaaaatgtacctaacagattagtgttattaggtggatccataggtcattatttgcttgtggtctggattgcaaacatcctggttatgacagctctggtaactaatgcaattgtgccgagtgttgtctaataacaaatattgtgttgatagtagagacatttaatgtgcccaaaacattataagtattccatgtttgtgttattctgaataaatgctatatatttattttaagactcacggttaaaggacttctgagtcgtatgttaagaggctctggagtgcatatgatttttttaggatttgtgttatcctatgtagaatgtagaaaccgatatttgagataatcagctcaaattagtacctataggttcgttttcacccatgtttagctcaaatattcattagctatcctctgtttgtgattatgtgtgaaccactgaacctgtcgttgcatttctgttatttaagttcatgaaatgtagttttagtgtacagattagttagattcatggatatggtttgccagctttggttaacatgaatatacttgtcttaattaatggttgcaagtaacaactctaacattcatatgcatcttttgtagaatcatctgaagtgtggaggttggtctctgcataaagaatgttaggtcattgttaaatcatacaaaaattcttccacttgtcgtacatacataacacattcctcctgatgtagtgggacttcttttatgacacattgattcaaatgcccactgtttgtaacaatgttagactacctgtgcttctatgtacagcacaatgagcgtggaagtgctgggcaaggtggtcggcattatgaccgccaggctagtgactatggaaggcaaagggagcatctctctgatagagataaacagaagacagagagacacagtttgcagggaaagattgagctggaccagcaaaagaaggatggtgattcaacatggaagcatgatggatttttccagttggaggaagcagcaccccttgccaagaagaggccaccatttcaggagatgaagatacaagaatctgctgacactgtaacagaaccagattctagatcaaggaattatcaggcacggggatatggaaatcatcgacccttcctaaggccagatgatcgaggctttagaagggggtttcctgaccacaggagtgatggccagaggaatgggcatgatataaggggaagattttctgttaggggaggaatggacagagacaggtttaacaattcatatggtgggagaagcaacgcagagcaggcttctggtgatcaagaagaaaaatggaagcatgacctctatgatcagacaaacaggagcccgcctccaaagactgaggaagagcagattgccaaagttgaagcgctgttggcactgtagctgtcttatttatgtctggagttgttttttgtgatagattatcatgtacttggtttcagatgtgttgaatactgtcttttttattctatatattctgcatatctatgtggaattgtggattaaaccaccttatgaagctattccatttggactgataatattgtactagataatcatgagtttcataatgtagaaccatcaagcgaagtacaagacaatcatgagtttggtaggtaaacaatttgctcctcgggtgcgtttagagctaaattgcttctttaggtagtgtttggttcttcccgatctgttgtttgtatatgtttcatatagtatatagggg

SEQ ID NO: 218069 - DNA, 1995 bp, Zea Mays
attgatttttttcccaaatgatgaggatgagacagatgacatagttgaggtggctcttgctgaacttgagatgatagaacaatatagtgccttcatgtctcctgtcgcggctgcggacagcatgacacccaaaaagttcatggcgcttgtctctgctaaaatccaaacatacttttgcaggggcgggtcgatccagagggcggtgcggaggatggccggcggcggcggcggccggaggagacccggcgccttggcggacccgaggaccggcgacgcgtcgtcggcgtcggctagctgctccggggatgataccagcattggtagtgccactgccaagagggaaggggcacgaaggtgcatcatgcagcggtacaggtcccagctcgagcaggaagtcaagaaactgcaaaggcaactgcaagaagagattgatttacatctggcgttggcagatgccattacatataatgcggcgctgatacttaagtcgtctataaagcttccagataaggaatgaaaggtttcttgcggaaaataagccaggatacttgctacctacaagatcagattgtcaaccctccacagcttgcaattgtacatgggaagaacctgaacaaatgttaagagaattgatattcagagattatcactcagtccaagaagatttttcaactgaacctgaagatcaacaggatgatgaaaaatacgttaaaggtagagaacgtgtatctctaaatatgctgctagaaaagcaccaagatatttcttcaactgggctgtttgtacaccgagatgaagagatgcaagaggcatgctctatggaaaaagaaggcgaagaagatcagaagatagatatgttaccatttaacctgcccaatttgaagaaaggcaacatgagtgaaaatctgtggaataatccaaatcagctctctgaagagatggtgctctccatgaaagatatattccttaatttatctacatcttccaagatgtcaccagaggagcctttttctaattcatcttcatcagcagagcatctatctggttcaacattgactactttgtcggattcatctgtaatagcctcagtgcagcccagtccttcaatgtacctgaaccacgatgatggtaactttgacccgtacaatgttaatggaaaggaagcacagagagacattggcagctatagttcagtagctgaagtgtcttggatgtatattggcaatgaacaacttgaatatgcatctggagctctgagaaagttcaggtttcttgtggagcaactatcaaaggttgacacttcttgtatgaactgtgatgaacggttagcattttggattaacctttacaatgcattaatcatgcatgcctatttggcatacggtgtccctgaaaacgacattaagcttttcgcgctaatgcaaaaggcctgttacacgatctgtgggcagcctgtcagtgcagctgaaatagagtttgtgattctgaaggtgaagactccagtgcaccggccacaactctccttgatgctggcccttcacaaatttaaaacatcagagaatctcaagaaatattcaatcgatggtactgagcctcgtgtgctctttgcactctgttgtgggatgttctcttcgcctgcggtaaggattttctctgctgaaaatgttcgagccgagctacaagaatcaatgagagactacatccgagcatctgttggtgtcaatgacaagggggagcttatggtccccaagttactgcagagctatgccaagggcattgtggaggactctctgcttgccgactggatctgccgtcatctaacactagaccaactcgctgcagtccaagatacatcgtcgtcacatacacagcgccttcttggagtgcgcagtttcagcgtcatcccattcgattcaagattccggtacctgttcttgttcgacaacagtagatgacagaactgcattgctcaatgtgcacaaagccaagagtggg

SEQ ID NO: 218070 - DNA, 2429 bp, Zea Mays
attgatttttttcccaaatgatgaggatgagacagatgacatagttgaggtggctcttgctgaacttgagatgatagaacaatatagtgccttcatgtctcctgtcgcggctgcggacagcatgacacccaaaaagttcatggcgcttgtctctgctaaaatccaaacatacttttgcaggggcgggtcgatccagagggcggtgcggaggatggccggcggcggcggcggccggaggagacccggcgccttggcggacccgaggaccggcgacgcgtcgtcggcgtcggctagctgctccggggatgataccagcattggtagtgccactgccaagagggaaggggcacgaaggtgcatcatgcagcggtacaggtcccagctcgagcaggaagtcaagaaactgcaaaggcaactgcaagaagagattgatttacatctggcgttggcagatgccattacatataatgcggcgctgatacttaagtcgtctataaagcttccagataaggcgcatgagctattaattagcatatcctctttggaaatcgctatcacaaagcttgaagaggatctaaatcacctgcattaccaattataccatgcaaggaatgaaaggtttcttgcggaaaataagccaggatacttgctacctacaagatcagattgtcaaccctccacagcttgcaattgtacatgggaagaacctgaacaaatgttaagagaattgatattcagagattatcactcagtccaagaagatttttcaactgaacctgaagatcaacaggatgatgaaaaatacgttaaagatgcaagaggcatgctctatggaaaaagaaggcgaagaagatcagaagatagatatgttaccatttaacctgcccaatttgaagaaaggcaacatgagtgaaaatctgtggaataatccaaatcagctctctgaagagatggtgctctccatgaaagatatattccttaatttatctacatcttccaagatgtcaccagaggagcctttttctaattcatcttcatcagcagagcatctatctggttcaacattgactactttgtcggattcatctgtaatagcctcagtgcagcccagtccttcaatgtacctgaaccacgatgatggtaactttgacccgtacaatgttaatggaaaggaagcacagagagacattggcagctatagttcagtagctgaagtgtcttggatgtatattggcaatgaacaacttgaatatgcatctggagctctgagaaagttcaggtttcttgtggagcaactatcaaaggttgacacttcttgtatgaactgtgatgaacggttagcattttggattaacctttacaatgcattaatcatgcatgtaagtacgatctatcacctttttttaagaatgtcactaagtacttgtttagagatagaacttgatgctttctttcaatcattgttgtcaacataatatgcaccctgaacaccatgcgtgtttactggaactttattaggcctatttggcatacggtgtccctgaaaacgacattaagcttttcgcgctaatgcaaaaggcctgttacacgatctgtgggcagcctgtcagtgcagctgaaatagagtttgtgattctgaaggtgaagactccagtgcaccggccacaactctccttgatgctggcccttcacaaatttaaaacatcagagaatctcaagaaatattcaatcgatggtactgagcctcgtgtgctctttgcactctgttgtgggatgttctcttcgcctgcggtaagtgattgagtaaaaaatggaactctgttacagaaactaaagctatggcctataggtagataattcttggggtgctttcatgtagttgctggagatagaaaaattctcagcagctagtactacatggtttagaataactgagcgtggatctaaagacctttttttcataaagtttgtgaaacaataaaatttgtttccagtgtgcacagtaaagctgccataatacttaaaccatgtttttttattaatatttgggaaatgatgacttcctaccacccaggtaaggattttctctgctgaaaatgttcgagccgagctacaagaatcaatgagagactacatccgagcatctgttggtgtcaatgacaagggggagcttatggtccccaagttactgcagagctatgccaagggcattgtggaggactctctgcttgccgactggatctgccgtcatctaacactagaccaactcgctgcagtccaagatacatcgtcgtcacatacacagcgccttcttggagtgcgcagtttcagcgtcatcccattcgattcaagattccggtacctgttcttgttcgacaacagtagatgacagaactgcattgctcaatgtgcacaaagccaagagtggg

SEQ ID NO: 218071 - DNA, 2007 bp, Zea Mays
attgatttttttcccaaatgatgaggatgagacagatgacatagttgaggtggctcttgctgaacttgagatgatagaacaatatagtgccttcatgtctcctgtcgcggctgcggacagcatgacacccaaaaagttcatggcgcttgtctctgctaaaatccaaacatacttttgcaggggcgggtcgatccagagggcggtgcggaggatggccggcggcggcggcggccggaggagacccggcgccttggcggacccgaggaccggcgacgcgtcgtcggcgtcggctagctgctccggggatgataccagcattggtagtgccactgccaagagggaaggggcacgaaggtgcatcatgcagcggtacaggtcccagctcgagcaggaagtcaagaaactgcaaaggcaactgcaagaagagattgatttacatctggcgttggcagatgccattacatataatgcggcgctgatacttaagtcgtctataaagcttccagataaggcgcatgagctattaattagcatatcctctttggaaatcgctatcacaaagcttgaagaggatctaaatcacctgcattaccaattataccatgcaaggaatgaaaggtttcttgcggaaaataagccaggatacttgctacctacaagatcagattgtcaaccctccacagcttgcaattgtacatgggaagaacctgaacaaatgttaagagaattgatattcagagattatcactcagtccaagaagatttttcaactgaacctgaagatcaacaggatgatgaaaaatacgttaaagatgcaagaggcatgctctatggaaaaagaaggcgaagaagatcagaagatagatatgttaccatttaacctgcccaatttgaagaaaggcaacatgagtgaaaatctgtggaataatccaaatcagctctctgaagagatggtgctctccatgaaagatatattccttaatttatctacatcttccaagatgtcaccagaggagcctttttctaattcatcttcatcagcagagcatctatctggttcaacattgactactttgtcggattcatctgtaatagcctcagtgcagcccagtccttcaatgtacctgaaccacgatgatggtaactttgacccgtacaatgttaatggaaaggaagcacagagagacattggcagctatagttcagtagctgaagtgtcttggatgtatattggcaatgaacaacttgaatatgcatctggagctctgagaaagttcaggtttcttgtggagcaactatcaaaggttgacacttcttgtatgaactgtgatgaacggttagcattttggattaacctttacaatgcattaatcatgcatgcctatttggcatacggtgtccctgaaaacgacattaagcttttcgcgctaatgcaaaaggcctgttacacgatctgtgggcagcctgtcagtgcagctgaaatagagtttgtgattctgaaggtgaagactccagtgcaccggccacaactctccttgatgctggcccttcacaaatttaaaacatcagagaatctcaagaaatattcaatcgatggtactgagcctcgtgtgctctttgcactctgttgtgggatgttctcttcgcctgcggtaaggattttctctgctgaaaatgttcgagccgagctacaagaatcaatgagagactacatccgagcatctgttggtgtcaatgacaagggggagcttatggtccccaagttactgcagagctatgccaagggcattgtggaggactctctgcttgccgactggatctgccgtcatctaacactagaccaactcgctgcagtccaagatacatcgtcgtcacatacacagcgccttcttggagtgcgcagtttcagcgtcatcccattcgattcaagattccggtacctgttcttgttcgacaacagtagatgacagaactgcattgctcaatgtgcacaaagccaagagtggg

SEQ ID NO: 218072 - DNA, 2063 bp, Zea Mays
attgatttttttcccaaatgatgaggatgagacagatgacatagttgaggtggctcttgctgaacttgagatgatagaacaatatagtgccttcatgtctcctgtcgcggctgcggacagcatgacacccaaaaagttcatggcgcttgtctctgctaaaatccaaacatacttttgcaggggcgggtcgatccagagggcggtgcggaggatggccggcggcggcggcggccggaggagacccggcgccttggcggacccgaggaccggcgacgcgtcgtcggcgtcggctagctgctccggggatgataccagcattggtagtgccactgccaagagggaaggggcacgaaggtgcatcatgcagcggtacaggtcccagctcgagcaggaagtcaagaaactgcaaaggcaactgcaagaagagattgatttacatctggcgttggcagatgccattacatataatgcggcgctgatacttaagtcgtctataaagcttccagataaggcgcatgagctattaattagcatatcctctttggaaatcgctatcacaaagcttgaagaggatctaaatcacctgcattaccaattataccatgcaaggaatgaaaggtttcttgcggaaaataagccaggatacttgctacctacaagatcagattgtcaaccctccacagcttgcaattgtacatgggaagaacctgaacaaatgttaagagaattgatattcagagattatcactcagtccaagaagatttttcaactgaacctgaagatcaacaggatgatgaaaaatacgttaaaggtagagaacgtgtatctctaaatatgctgctagaaaagcaccaagatatttcttcaactgggctgtttgtacaccgagatgaagagatgcaagaggcatgctctatggaaaaagaaggcgaagaagatcagaagatagatatgttaccatttaacctgcccaatttgaagaaaggcaacatgagtgaaaatctgtggaataatccaaatcagctctctgaagagatggtgctctccatgaaagatatattccttaatttatctacatcttccaagatgtcaccagaggagcctttttctaattcatcttcatcagcagagcatctatctggttcaacattgactactttgtcggattcatctgtaatagcctcagtgcagcccagtccttcaatgtacctgaaccacgatgatggtaactttgacccgtacaatgttaatggaaaggaagcacagagagacattggcagctatagttcagtagctgaagtgtcttggatgtatattggcaatgaacaacttgaatatgcatctggagctctgagaaagttcaggtttcttgtggagcaactatcaaaggttgacacttcttgtatgaactgtgatgaacggttagcattttggattaacctttacaatgcattaatcatgcatgcctatttggcatacggtgtccctgaaaacgacattaagcttttcgcgctaatgcaaaaggcctgttacacgatctgtgggcagcctgtcagtgcagctgaaatagagtttgtgattctgaagtccttgatgctggcccttcacaaatttaaaacatcagagaatctcaagaaatattcaatcgatggtactgagcctcgtgtgctctttgcactctgttgtgggatgttctcttcgcctgcggtaaggattttctctgctgaaaatgttcgagccgagctacaagaatcaatgagagactacatccgagcatctgttggtgtcaatgacaagggggagcttatggtccccaagttactgcagagctatgccaagggcattgtggaggactctctgcttgccgactggatctgccgtcatctaacactagaccaactcgctgcagtccaagatacatcgtcgtcacatacacagcgccttcttggagtgcgcagtttcagcgtcatcccattcgattcaagattccggtacctgttcttgttcgacaacagtagatgacagaactgcattgctcaatgtgcacaaagccaagagtggg

SEQ ID NO: 218073 - DNA, 2100 bp, Zea Mays
attgatttttttcccaaatgatgaggatgagacagatgacatagttgaggtggctcttgctgaacttgagatgatagaacaatatagtgccttcatgtctcctgtcgcggctgcggacagcatgacacccaaaaagttcatggcgcttgtctctgctaaaatccaaacatacttttgcaggggcgggtcgatccagagggcggtgcggaggatggccggcggcggcggcggccggaggagacccggcgccttggcggacccgaggaccggcgacgcgtcgtcggcgtcggctagctgctccggggatgataccagcattggtagtgccactgccaagagggaaggggcacgaaggtgcatcatgcagcggtacaggtcccagctcgagcaggaagtcaagaaactgcaaaggcaactgcaagaagagattgatttacatctggcgttggcagatgccattacatataatgcggcgctgatacttaagtcgtctataaagcttccagataaggcgcatgagctattaattagcatatcctctttggaaatcgctatcacaaagcttgaagaggatctaaatcacctgcattaccaattataccatgcaaggaatgaaaggtttcttgcggaaaataagccaggatacttgctacctacaagatcagattgtcaaccctccacagcttgcaattgtacatgggaagaacctgaacaaatgttaagagaattgatattcagagattatcactcagtccaagaagatttttcaactgaacctgaagatcaacaggatgatgaaaaatacgttaaaggtagagaacgtgtatctctaaatatgctgctagaaaagcaccaagatatttcttcaactgggctgtttgtacaccgagatgaagagatgcaagaggcatgctctatggaaaaagaaggcgaagaagatcagaagatagatatgttaccatttaacctgcccaatttgaagaaaggcaacatgagtgaaaatctgtggaataatccaaatcagctctctgaagagatggtgctctccatgaaagatatattccttaatttatctacatcttccaagatgtcaccagaggagcctttttctaattcatcttcatcagcagagcatctatctggttcaacattgactactttgtcggattcatctgtaatagcctcagtgcagcccagtccttcaatgtacctgaaccacgatgatggtaactttgacccgtacaatgttaatggaaaggaagcacagagagacattggcagctatagttcagtagctgaagtgtcttggatgtatattggcaatgaacaacttgaatatgcatctggagctctgagaaagttcaggtttcgagtttcttgtggagcaactatcaaaggttgacacttcttgtatgaactgtgatgaacggttagcattttggattaacctttacaatgcattaatcatgcatgcctatttggcatacggtgtccctgaaaacgacattaagcttttcgcgctaatgcaaaaggcctgttacacgatctgtgggcagcctgtcagtgcagctgaaatagagtttgtgattctgaaggtgaagactccagtgcaccggccacaactctccttgatgctggcccttcacaaatttaaaacatcagagaatctcaagaaatattcaatcgatggtactgagcctcgtgtgctctttgcactctgttgtgggatgttctcttcgcctgcggtaaggattttctctgctgaaaatgttcgagccgagctacaagaatcaatgagagactacatccgagcatctgttggtgtcaatgacaagggggagcttatggtccccaagttactgcagagctatgccaagggcattgtggaggactctctgcttgccgactggatctgccgtcatctaacactagaccaactcgctgcagtccaagatacatcgtcgtcacatacacagcgccttcttggagtgcgcagtttcagcgtcatcccattcgattcaagattccggtacctgttcttgttcgacaacagtagatgacagaactgcattgctcaatgtgcacaaagccaagagtggg

SEQ ID NO: 218074 - DNA, 2050 bp, Zea Mays
attgatttttttcccaaatgatgaggatgagacagatgacatagttgaggtggctcttgctgaacttgagatgatagaacaatatagtgccttcatgtctcctgtcgcggctgcggacagcatgacacccaaaaagttcatggcgcttgtctctgctaaaatccaaacatacttttgcaggggcgggtcgatccagagggcggtgcggaggatggccggcggcggcggcggccggaggagacccggcgccttggcggacccgaggaccggcgacgcgtcgtcggcgtcggctagctgctccggggatgataccagcattggtagtgccactgccaagagggaaggggcacgaaggtgcatcatgcagcggtacaggtcccagctcgagcaggaagtcaagaaactgcaaaggcaactgcaagaagagattgatttacatctggcgttggcagatgccattacatataatgcggcgctgatacttaagtcgtctataaagcttccagataaggcgcatgagctattaattagcatatcctctttggaaatcgctatcacaaagcttgaagaggatctaaatcacctgcattaccaattataccatgcaaggaatgaaaggtttcttgcggaaaataagccaggatacttgctacctacaagatcagattgtcaaccctccacagcttgcaattgtacatgggaagaacctgaacaaatgttaagagaattgatattcagagattatcactcagtccaagaagatttttcaactgaacctgaagatcaacaggatgatgaaaaatacgttaaaggtagagaacgtgtatctctaaatatgctgctagaaaagcaccaagatatttcttcaactgggctgtttgtacaccgagatgaagagatgcaagaggcatgctctatggaaaaagaaggcgaagaagatcagaagatagatatgttaccatttaacctgcccaatttgaagaaaggcaacatgagtgaaaatctgtggaataatccaaatcagctctctgaagagatggtgctctccatgaaagatatattccttaatttatctacatcttccaagatgtcaccagaggagcctttttctaattcatcttcatcagcagagcatctatctggttcaacattgactactttgtcggattcatctgtaatagcctcagtgcagcccagtccttcaatgtacctgaaccacgatgatggtaactttgacccgtacaatgttaatggaaaggaagcacagagagacattggcagctatagttcagtagctgaagtgtcttggatgtatattggcaatgaacaacttgaatatgcatctggagctctgagaaagttcaggtttcttgtggagcaactatcaaaggttgacacttcttgtatgaactgtgatgaacggcctatttggcatacggtgtccctgaaaacgacattaagcttttcgcgctaatgcaaaaggcctgttacacgatctgtgggcagcctgtcagtgcagctgaaatagagtttgtgattctgaaggtgaagactccagtgcaccggccacaactctccttgatgctggcccttcacaaatttaaaacatcagagaatctcaagaaatattcaatcgatggtactgagcctcgtgtgctctttgcactctgttgtgggatgttctcttcgcctgcggtaaggattttctctgctgaaaatgttcgagccgagctacaagaatcaatgagagactacatccgagcatctgttggtgtcaatgacaagggggagcttatggtccccaagttactgcagagctatgccaagggcattgtggaggactctctgcttgccgactggatctgccgtcatctaacactagaccaactcgctgcagtccaagatacatcgtcgtcacatacacagcgccttcttggagtgcgcagtttcagcgtcatcccattcgattcaagattccggtacctgttcttgttcgacaacagtagatgacagaactgcattgctcaatgtgcacaaagccaagagtggg

SEQ ID NO: 218075 - DNA, 2308 bp, Zea Mays
catcacgcagatgcatgccgcgcgcggcatctcttttccagcgcgaaaaaggatgataccagcattggtagtgccactgccaagagggaaggggcacgaaggtgcatcatgcagcggtacaggtcccagctcgagcaggaagtcaagaaactgcaaaggcaactgcaagaagagattgatttacatctggcgttggcagatgccattacatataatgcggcgctgatacttaagtcgtctataaagcttccagataaggcgcatgagctattaattagcatatcctctttggaaatcgctatcacaaagcttgaagaggatctaaatcacctgcattaccaattataccatgcaaggaatgaaaggtttcttgcggaaaataagccaggatacttgctacctacaagatcagattgtcaaccctccacagcttgcaattgtacatgggaagaacctgaacaaatgttaagagaattgatattcagagattatcactcagtccaagaagatttttcaactgaacctgaagatcaacaggatgatgaaaaatacgttaaagatgcaagaggcatgctctatggaaaaagaaggcgaagaagatcagaagatagatatgttaccatttaacctgcccaatttgaagaaaggcaacatgagtgaaaatctgtggaataatccaaatcagctctctgaagagatggtgctctccatgaaagatatattccttaatttatctacatcttccaagatgtcaccagaggagcctttttctaattcatcttcatcagcagagcatctatctggttcaacattgactactttgtcggattcatctgtaatagcctcagtgcagcccagtccttcaatgtacctgaaccacgatgatggtaactttgacccgtacaatgttaatggaaaggaagcacagagagacattggcagctatagttcagtagctgaagtgtcttggatgtatattggcaatgaacaacttgaatatgcatctggagctctgagaaagttcaggtttcgagttaaacacttgccttcagctattgattacaattaacatattgcatgctgaaaattttacaactaaaaagcactacagtttacttgtaagcggtaataactatttctccccttttctttttgcaggtttcttgtggagcaactatcaaaggttgacacttcttgtatgaactgtgatgaacggttagcattttggattaacctttacaatgcattaatcatgcatgtaagtacgatctatcacctttttttaagaatgtcactaagtacttgtttagagatagaacttgatgctttctttcaatcattgttgtcaacataatatgcaccctgaacaccatgcgtgtttactggaactttattaggcctatttggcatacggtgtccctgaaaacgacattaagcttttcgcgctaatgcaaaaggcctgttacacgatctgtgggcagcctgtcagtgcagctgaaatagagtttgtgattctgaaggtgaagactccagtgcaccggccacaactctccttgatgctggcccttcacaaatttaaaacatcagagaatctcaagaaatattcaatcgatggtactgagcctcgtgtgctctttgcactctgttgtgggatgttctcttcgcctgcggtaagtgattgagtaaaaaatggaactctgttacagaaactaaagctatggcctataggtagataattcttggggtgctttcatgtagttgctggagatagaaaaattctcagcagctagtactacatggtttagaataactgagcgtggatctaaagacctttttttcataaagtttgtgaaacaataaaatttgtttccagtgtgcacagtaaagctgccataatacttaaaccatgtttttttattaatatttgggaaatgatgacttcctaccacccaggtaaggattttctctgctgaaaatgttcgagccgagctacaagaatcaatgagagactacatccgagcatctgttggtgtcaatgacaagggggagcttatggtccccaagttactgcagagctatgccaagggcattgtggaggactctctgcttgccgactggatctgccgtcatctaacactagaccaactcgctgcagtccaagatacatcgtcgtcacatacacagcgccttcttggagtgcgcagtttcagcgtcatcccattcgattcaagattccggtacctgttcttgttcgacaacagtagatgacagaactgcattgctcaatgtgcacaaagccaagagtggg

SEQ ID NO: 218076 - DNA, 3858 bp, Zea Mays
gttatttccgaaagccaattttgtgtcacacctcctccgctaccaccattccacaccaccgcgggtcctcccgccagcctcgagagaaccgcgcgccgcgcccccatcttttcccccaaaccctccgcgcgagcccgaggccccgagcgtcaggcaaggccgcacaccgccgccgcttcccctcatcatccgtctcctccccatccctttcccctcatccgcattcggtaggctgtggcgccagtgtccgcttcaggactggattggtcgtgggaagcaagaaccgcccgcccgcgcattagaaccctagcccccgccaatctaacagcgcaaagaatccggaaaacccccggcttttcggtctcccgagcccgggagatccatccttcgctgcgtcggagatgtcgtccgacatccgtaaatggttcatgaagccgcaggacaagagcgcggcggcatctggagccgccgggaagccctcggggtcggcggctgagaagaagcccgtgctcagcattccggagaagaagtcggcgccccccgcattggcgtcctgtgaccatgatacttccgctagaaggaagacaagcaaatattttgggtcaaaagcagaaaaggactcagatgtccaaatggcagacgcctctggggggaagagtgcggctaaaagaaaacttcagaaatgcaacgatgaagtcaaggaggacagcaagccttttccagcaaagaaaatgtttgatgatgaagaagatgacgattttgtggcacctgcaaagaagaaaactccagtgaagccaccaccttcaaaaaagcttaaagttgaatctaatgttgaagcccctgcaaagactactggtgttgatgatgctgaggatgaggacaggatggatgaagatgccaagaccccctctaaaggagctggaaggggaaggggaagaggaggaagaggaggagcaggagctgcccctgggggcagaggtagaggaggtgggagaggttttatgaattttggtgagaggaaagatcctcctcacaaaggagaaaagtcttgaacgtgaggaagcaactgatctaattaagcgttatggtggccgtgtgactggctctattagtaaaaagacgagctacttattggccgacgaagacattggtggagtcaaatctaacaaagcaaaagatctgggtgttccattcttgactgaagatggtttatttgatttgatccgaaaatcaaagcctgcaaaggctcctgtagacaaacgtcaaaacaacaacagttctgaaaagcttcagaaatcacagacaaagagctctccagctaaagttgaaaaacgagccgaagcaagtgctgtaggcaaaagtattgcttcaaacagtaatgctgcaagtgcctccgctgacaaacaaaagcccaagattgttgaccgtggttctatgcaatggacagaaaaatatcggccaaaagttccaaatgacatagttggcaatcaatcaatggtcaaacaacttcatgattggttaaaaagttgggatgcactattccttcattctggccaaaagggtaagggaaagaaacaaactgacagtgcagccaaaaaggctgtgttgctgagtggacctcctggtatcggtaagactacaactgctaaagttgttagtcagatgcttggtttgcaggccattgaggtaaatgcgagtgatagccgtggtaaggcagactccaagatcgagaagggtgttggggggagtacatcaaattctatcaaagagcttatcaacaacgcgactctgaattatagtgacaatcggttaaaacatcccaaagctgtactagttatggatgaagttgatggtatgtctgctggagatagaggtggtgttgctgatcttattgctagcatcaagatatccaagatccctattatctgcatttgtaatgaccgttatagtcagaaattgaagaatcttgtgaattactgccttatgctcaacttcagaaagccaacaaaacaacagatgggtaaaagattgatggaaattgccaaaaaggaaggtattcaagctcaagagaatgcaatggaagagcttgctgaaagagtgcacggagatattcgcatggcactcaaccatttgcagtatatgagcctctcccagtctgtggtcaaatatgatgatataaaggagcgacttaatagcagttcaaaggatgaagatatttctccttttactgctgttgacaaactttttggtttcaatggcgggaggttaaggatggatgagagaatggattttggcatgagcgatcctgatttagttcccttgatcatccaggaaaattatatcaattatcggcctaacaccatcggcaaggatgaaagtggagttaaaagaatgaatgctttagcccgggctgctgaatctatagcggacggtgatcttgttaatgtacagataagaagatatcgacagtggcagctgtcacaagctgcttgttttgcttcatctatagtacctgccgctttgatgcatgggaacagagaaatccttgaagcaggtgagcgaaactttaataggtttggtggatggttgggtaagtactcgactactaacaaaaacagaaggctactggaagatgtccacagtcatattcttgcctcccagcaagcaaacttggacagggatgcattgaggttggattatcttactcttatcttgagagagctgactgacccactgaaaaaaatgtcaaaggatgaagctgttcaaaaggtggtagagtttatggatacatactctttaagccaggaagacttcgatacaattgttgaagtatccaaatttaagggtcatccaagtcctatggatgggattcaacctgctgttaaaagtgccttgacaaaggcatacaaacaaggaagtagttcccgtgttgttcgagcagcagatctaataaacattccaggcatgaaaaagcctttaaagaaacgagtggcggcgatcttggagccggtagaagagagcctacctgaagaaaatggactagcatcagctgaagatgatgaagatggttcttctgatgctgaaaataatgatgagcttgtgcctgctgactctacgccgaagctggacctgcaaagcgacaagaagaaaggaatccaagtgcagcttgacctgaagagcaatggggatggcccgcgcgggaagaaggcgcctgctgccaggtcaagagcaaccgggtcaggtgggaaggccgcggcgggaggaggttcggctgggaagaggaagaggtaaatgagacatttggcgcctgcccacagttggccggtggttagtttggacgcacagatcccttggtaaataaggagcaggggtggtaagcttcagagttttgctcatctaatggcacatgtaggcactaggctactgtgcctgctcccatattttctcccagggcacccatgtcttgctaccagaatttgtttgcacttaggctacttccaggttgtggcaatcgagagtttggtgttgtctgtttcatttagcgaatttgtcagtactctataccacgggtcgttgcctcgttggctttgtcttcgtattctcttgtgcattttcgcgttggtagacagggttttatgtgtaaagaaaatgcagtagcgaggcatttaggcaggtaaggagaaacaaaaagattgcttggttgtggtttactattactattaggccaaccccatcgctccatgctggcttgtaatcccagcttgcatagttcacgttttttgatcctccagatttgctggtgtaagtgtttggataacgtctttgtaactttaaaaagccgtaggcgatggattgttc

SEQ ID NO: 218077 - DNA, 4378 bp, Zea Mays
cgaaagccaattttgtgtcacacctcctccgctaccaccattccacaccaccgcgggtcctcccgccagcctcgagagaaccgcgcgccgcgcccccatcttttcccccaaaccctccgcgcgagcccgaggccccgagcgtcaggcaaggccgcacaccgccgccgcttcccctcatcatccgtctcctccccatccctttcccctcatccgcattcggtaggctgtggcgccagtgtccgcttcaggactggattggtcgtgggaagcaagaaccgcccgcccgcgcattagaaccctagcccccgccaatctaacagcgcaaagaatccggaaaacccccggcttttcggtctcccgagcccgggagatccatccttcgctgcgtcggagatgtcgtccgacatccgtaaatggttcatgaagccgcaggacaagagcgcggcggcatctggagccgccgggaagccctcggggtcggcggctgagaagaagcccgtgctcagcattccggagaagaagtcggcgccccccgcattggcgtcctgtgaccatgatacttccgctagaaggaagacaagcaaatattttgggtcaaaagcagaaaaggactcagatgtccaaatggcagacgcctctggggggaagagtgcggctaaaagaaaacttcagaaatgcaacgatgaagtcaaggaggacagcaagccttttccagcaaagaaaatgtttgatgatgaagaagatgacgattttgtggcacctgcaaagaagaaaactccagtgaagccaccaccttcaaaaaagcttaaagttgaatctaatgttgaagcccctgcaaagactactggtgttgatgatgctgaggatgaggacaggatggatgaagatgccaagaccccctctaaaggagctggaaggggaaggggaagaggaggaagaggaggagcaggagctgcccctgggggcagaggtagaggaggtgggagaggttttatgaattttggtgagaggaaagatcctcctcacaaaggagaaaaggaggtcccagagggtgcccctgactgtttatctggtctgacatttgtcataagtggtaccctcgacagtcttgaacgtgaggaagcaactgatctaattaagcgttatggtggccgtgtgactggctctattagtaaaaagacgagctacttattggccgacgaagacattggtggagtcaaatctaacaaagcaaaagatctgggtgttccattcttgactgaagatggtttatttgatttgatccgaaaatcaaagcctgcaaaggctcctgtagacaaacgtcaaaacaacaacagttctgaaaagcttcagaaatcacagacaaagagctctccagctaaagttgaaaaacgagccgaagcaagtgctgtaggcaaaagtattgcttcaaacagtaatgctgcaagtgcctccgctgacaaacaaaagcccaagattgttgaccgtggttctatgcaatggacagaaaaatatcggccaaaagttccaaatgacatagttggcaatcaatcaatggtcaaacaacttcatgattggttaaaaagttgggatgcactattccttcattctggccaaaagggtaagggaaagaaacaaactgacagtgcagccaaaaaggctgtgttgctgagtggacctcctggtatcggtaagactacaactgctaaagttgttagtcagatgcttggtttgcaggccattgaggtaaatgcgagtgatagccgtggtaaggcagactccaagatcgagaagggtgttggggggagtacatcaaattctatcaaagagcttatcaacaacgcgactctgaattatagtgacaatcggttaaaacatcccaaagctgtactagttatggatgaagttgatggtatgtctgctggagatagaggtggtgttgctgatcttattgctagcatcaagatatccaagatccctattatctgcatttgtaatgaccgttatagtcagaaattgaagaatcttgtgaattactgccttatgctcaacttcagaaagccaacaaaacaacagatgggtaaaagattgatggaaattgccaaaaaggaaggtattcaagctcaagagaatgcaatggaagagcttgctgaaagagtgcacggagatattcgcatggcactcaaccatttgcagtatatgagcctctcccagtctgtggtcaaatatgatgatataaaggagcgacttaatagcagttcaaaggatgaagatatttctccttttactgctgttgacaaactttttggtttcaatggcgggaggttaaggatggatgagagaatggattttggcatgagcgatcctgatttagttcccttgatcatccaggaaaattatatcaattatcggcctaacaccatcggcaaggatgaaagtggagttaaaagaatgaatgctttagcccgggctgctgaatctatagcggacggtgatcttgttaatgtacagataagaagatatcgacagtggcagctgtcacaagctgcttgttttgcttcatctatagtacctgccgctttgatgcatgggaacagagaaatccttgaagcaggtgagcgaaactttaataggtttggtggatggttgggtaagtactcgactactaacaaaaacagaaggctactggaagatgtccacagtcatattcttgcctcccagcaagcaaacttggacagggatgcattgaggttggattatcttactcttatcttgagagagctgactgacccactgaaaaaaatgtcaaaggatgaagctgttcaaaaggtggtagagtttatggatacatactctttaagccaggaagacttcgatacaattgttgaagtatccaaatttaagggtcatccaagtcctatggatgggattcaacctgctgttaaaagtgccttgacaaaggcatacaaacaaggaagtagttcccgtgttgttcgagcagcagatctaataaacattccaggcatgaaaaagcctttaaagaaacgagtggcggcgatcttggagccggtagaagagagcctacctgaagaaaatggactagcatcagctgaagatgatgaagatggttcttctgatgctgaaaataatggtgcatgttctcctttcccacgtaacaaacataaaaaatctggtagatgcctgtttgtttggctaatgtgtcaggcattaggataaaatggatctgttttgaggcaactttgtggtgccacactgactgacttcatttaacgcaattgtgaaagtacccatttttatggagatttgtagcatcattcaggcaaatgcaaatcgagatcatatagacatgaacttgtgaaatagctacacctaactatagacaggtttacataattacatgtacttcaagacacaccatactaatatatggtagagccagttctatcgcaagtttttagtcagttggatgctaatggaagctgcatccattagcacagttggtaaagcgtttttagtcagttgggatgctttgggagttgcatccagaaaggttcatatggcttgctgtctaatcacttttttcccttcagatgagcttgtgcctgctgactctacgccgaagctggacctgcaaagcgacaagaagaaaggaatccaagtgcagcttgacctgaagagcaatggggatggcccgcgcgggaagaaggcgcctgctgccaggtcaagagcaaccgggtcaggtgggaaggccgcggcgggaggaggttcggctgggaagaggaagaggtaaatgagacatttggcgcctgcccacagttggccggtggttagtttggacgcacagatcccttggtaaataaggagcaggggtggtaagcttcagagttttgctcatctaatggcacatgtaggcactaggctactgtgcctgctcccatattttctcccagggcacccatgtcttgctaccagaatttgtttgcacttaggctacttccaggttgtggcaatcgagagtttggtgttgtctgtttcatttagcgaatttgtcagtactctataccacgggtcgttgcctcgttggctttgtcttcgtattctcttgtgcattttcgcgttggtagacagggttttatgtgtaaagaaaatgcagtagcgaggcatttaggcaggtaaggagaaacaaaaagattgcttggttgtggtttactattactattaggccaaccccatcgctccatgctggcttgtaatcccagcttgcatagttcacgttttttgatcctccagatttgctggtgtaagtgtttggataacgtctttgtaactttaaaaagccgtaggcgatggattgttc

SEQ ID NO: 218078 - DNA, 3925 bp, Zea Mays
caattttgtgtcacacctcctccgctaccaccattccacaccaccgcgggtcctcccgccagcctcgagagaaccgcgcgccgcgcccccatcttttcccccaaaccctccgcgcgagcccgaggccccgagcgtcaggcaaggccgcacaccgccgccgcttcccctcatcatccgtctcctccccatccctttcccctcatccgcattcggtaggctgtggcgccagtgtccgcttcaggactggattggtcgtgggaagcaagaaccgcccgcccgcgcattagaaccctagcccccgccaatctaacagcgcaaagaatccggaaaacccccggcttttcggtctcccgagcccgggagatccatccttcgctgcgtcggagatgtcgtccgacatccgtaaatggttcatgaagccgcaggacaagagcgcggcggcatctggagccgccgggaagccctcggggtcggcggctgagaagaagcccgtgctcagcattccggagaagaagtcggcgccccccgcattggcgtcctgtgaccatgatacttccgctagaaggaagacaagcaaatattttgggtcaaaagcagaaaaggactcagatgtccaaatggcagacgcctctggggggaagagtgcggctaaaagaaaacttcagaaatgcaacgatgaagtcaaggaggacagcaagccttttccagcaaagaaaatgtttgatgatgaagaagatgacgattttgtggcacctgcaaagaagaaaactccagtgaagccaccaccttcaaaaaagcttaaagttgaatctaatgttgaagcccctgcaaagactactggtgttgatgatgctgaggatgaggacaggatggatgaagatgccaagaccccctctaaaggagctggaaggggaaggggaagaggaggaagaggaggagcaggagctgcccctgggggcagaggtagaggaggtgggagaggttttatgaattttggtgagaggaaagatcctcctcacaaaggagaaaaggaggtcccagagggtgcccctgactgtttatctggtctgacatttgtcataagtggtaccctcgacaggtgccaatttctattcttgaacgtgaggaagcaactgatctaattaagcgttatggtggccgtgtgactggctctattagtaaaaagacgagctacttattggccgacgaagacattggtggagtcaaatctaacaaagcaaaagatctgggtgttccattcttgactgaagatggtttatttgatttgatccgaaaatcaaagcctgcaaaggctcctgtagacaaacgtcaaaacaacaacagttctgaaaagcttcagaaatcacagacaaagagctctccagctaaagttgaaaaacgagccgaagcaagtgctgtaggcaaaagtattgcttcaaacagtaatgctgcaagtgcctccgctgacaaacaaaagcccaagattgttgaccgtggttctatgcaatggacagaaaaatatcggccaaaagttccaaatgacatagttggcaatcaatcaatggtcaaacaacttcatgattggttaaaaagttgggatgcactattccttcattctggccaaaagggtaagggaaagaaacaaactgacagtgcagccaaaaaggctgtgttgctgagtggacctcctggtatcggtaagactacaactgctaaagttgttagtcagatgcttggtttgcaggccattgaggtaaatgcgagtgatagccgtggtaaggcagactccaagatcgagaagggtgttggggggagtacatcaaattctatcaaagagcttatcaacaacgcgactctgaattatagtgacaatcggttaaaacatcccaaagctgtactagttatggatgaagttgatggtatgtctgctggagatagaggtggtgttgctgatcttattgctagcatcaagatatccaagatccctattatctgcatttgtaatgaccgttatagtcagaaattgaagaatcttgtgaattactgccttatgctcaacttcagaaagccaacaaaacaacagatgggtaaaagattgatggaaattgccaaaaaggaaggtattcaagctcaagagaatgcaatggaagagcttgctgaaagagtgcacggagatattcgcatggcactcaaccatttgcagtatatgagcctctcccagtctgtggtcaaatatgatgatataaaggagcgacttaatagcagttcaaaggatgaagatatttctccttttactgctgttgacaaactttttggtttcaatggcgggaggttaaggatggatgagagaatggattttggcatgagcgatcctgatttagttcccttgatcatccaggaaaattatatcaattatcggcctaacaccatcggcaaggatgaaagtggagttaaaagaatgaatgctttagcccgggctgctgaatctatagcggacggtgatcttgttaatgtacagataagaagatatcgacagtggcagctgtcacaagctgcttgttttgcttcatctatagtacctgccgctttgatgcatgggaacagagaaatccttgaagcaggtgagcgaaactttaataggtttggtggatggttgggtaagtactcgactactaacaaaaacagaaggctactggaagatgtccacagtcatattcttgcctcccagcaagcaaacttggacagggatgcattgaggttggattatcttactcttatcttgagagagctgactgacccactgaaaaaaatgtcaaaggatgaagctgttcaaaaggtggtagagtttatggatacatactctttaagccaggaagacttcgatacaattgttgaagtatccaaatttaagggtcatccaagtcctatggatgggattcaacctgctgttaaaagtgccttgacaaaggcatacaaacaaggaagtagttcccgtgttgttcgagcagcagatctaataaacattccaggcatgaaaaagcctttaaagaaacgagtggcggcgatcttggagccggtagaagagagcctacctgaagaaaatggactagcatcagctgaagatgatgaagatggttcttctgatgctgaaaataatgatgagcttgtgcctgctgactctacgccgaagctggacctgcaaagcgacaagaagaaaggaatccaagtgcagcttgacctgaagagcaatggggatggcccgcgcgggaagaaggcgcctgctgccaggtcaagagcaaccgggtcaggtgggaaggccgcggcgggaggaggttcggctgggaagaggaagaggtaaatgagacatttggcgcctgcccacagttggccggtggttagtttggacgcacagatcccttggtaaataaggagcaggggtggtaagcttcagagttttgctcatctaatggcacatgtaggcactaggctactgtgcctgctcccatattttctcccagggcacccatgtcttgctaccagaatttgtttgcacttaggctacttccaggttgtggcaatcgagagtttggtgttgtctgtttcatttagcgaatttgtcagtactctataccacgggtcgttgcctcgttggctttgtcttcgtattctcttgtgcattttcgcgttggtagacagggttttatgtgtaaagaaaatgcagtagcgaggcatttaggcaggtaaggagaaacaaaaagattgcttggttgtggtttactattactattaggccaaccccatcgctccatgctggcttgtaatcccagcttgcatagttcacgttttttgatcctccagatttgctggtgtaagtgtttggataacgtctttgtaactttaaaaagccgtaggcgatggattgttc

SEQ ID NO: 218079 - DNA, 3831 bp, Zea Mays
caccattccacaccaccgcgggtcctcccgccagcctcgagagaaccgcgcgccgcgcccccatcttttcccccaaaccctccgcgcgagcccgaggccccgagcgtcaggcaaggccgcacaccgccgccgcttcccctcatcatccgtctcctccccatccctttcccctcatccgcattcggtaggctgtggcgccagtgtccgcttcaggactggattggtcgtgggaagcaagaaccgcccgcccgcgcattagaaccctagcccccgccaatctaacagcgcaaagaatccggaaaacccccggcttttcggtctcccgagcccgggagatccatccttcgctgcgtcggagatgtcgtccgacatccgtaaatggttcatgaagccgcaggacaagagcgcggcggcatctggagccgccgggaagccctcggggtcggcggctgagaagaagcccgtgctcagcattccggagaagaagtcggcgccccccgcattggcgtcctgtgaccatgatacttccgctagaaggaagacaagcaaatattttgggtcaaaagcagaaaaggactcagatgtccaaatggcagacgcctctggggggaagagtgcggctaaaagaaaacttcagaaatgcaacgatgaagtcaaggaggacagcaagccttttccagcaaagaaaatgtttgatgatgaagaagatgacgattttgtggcacctgcaaagaagaaaactccagtgaagccaccaccttcaaaaaagcttaaagttgaatctaatgttgaagcccctgcaaagactactggtgttgatgatgctgaggatgaggacaggatggatgaagatgccaagaccccctctaaaggagctggaaggggaaggggaagaggaggaagaggaggagcaggagctgcccctgggggcagaggtagaggaggtgggagaggttttatgaattttggtgagaggaaagatcctcctcacaaaggagaaaaggaggtcccagagggtgcccctgactgtttatctggtctgacatttgtcataagtggtaccctcgacagtcttgaacgtgaggaagcaactgatctaattaagcgttatggtggccgtgtgactggctctattagtaaaaagacgagctacttattggccgacgaagacattggtggagtcaaatctaacaaagcaaaagatctgggcctgcaaaggctcctgtagacaaacgtcaaaacaacaacagttctgaaaagcttcagaaatcacagacaaagagctctccagctaaagttgaaaaacgagccgaagcaagtgctgtaggcaaaagtattgcttcaaacagtaatgctgcaagtgcctccgctgacaaacaaaagcccaagattgttgaccgtggttctatgcaatggacagaaaaatatcggccaaaagttccaaatgacatagttggcaatcaatcaatggtcaaacaacttcatgattggttaaaaagttgggatgcactattccttcattctggccaaaagggtaagggaaagaaacaaactgacagtgcagccaaaaaggctgtgttgctgagtggacctcctggtatcggtaagactacaactgctaaagttgttagtcagatgcttggtttgcaggccattgaggtaaatgcgagtgatagccgtggtaaggcagactccaagatcgagaagggtgttggggggagtacatcaaattctatcaaagagcttatcaacaacgcgactctgaattatagtgacaatcggttaaaacatcccaaagctgtactagttatggatgaagttgatggtatgtctgctggagatagaggtggtgttgctgatcttattgctagcatcaagatatccaagatccctattatctgcatttgtaatgaccgttatagtcagaaattgaagaatcttgtgaattactgccttatgctcaacttcagaaagccaacaaaacaacagatgggtaaaagattgatggaaattgccaaaaaggaaggtattcaagctcaagagaatgcaatggaagagcttgctgaaagagtgcacggagatattcgcatggcactcaaccatttgcagtatatgagcctctcccagtctgtggtcaaatatgatgatataaaggagcgacttaatagcagttcaaaggatgaagatatttctccttttactgctgttgacaaactttttggtttcaatggcgggaggttaaggatggatgagagaatggattttggcatgagcgatcctgatttagttcccttgatcatccaggaaaattatatcaattatcggcctaacaccatcggcaaggatgaaagtggagttaaaagaatgaatgctttagcccgggctgctgaatctatagcggacggtgatcttgttaatgtacagataagaagatatcgacagtggcagctgtcacaagctgcttgttttgcttcatctatagtacctgccgctttgatgcatgggaacagagaaatccttgaagcaggtgagcgaaactttaataggtttggtggatggttgggtaagtactcgactactaacaaaaacagaaggctactggaagatgtccacagtcatattcttgcctcccagcaagcaaacttggacagggatgcattgaggttggattatcttactcttatcttgagagagctgactgacccactgaaaaaaatgtcaaaggatgaagctgttcaaaaggtggtagagtttatggatacatactctttaagccaggaagacttcgatacaattgttgaagtatccaaatttaagggtcatccaagtcctatggatgggattcaacctgctgttaaaagtgccttgacaaaggcatacaaacaaggaagtagttcccgtgttgttcgagcagcagatctaataaacattccaggcatgaaaaagcctttaaagaaacgagtggcggcgatcttggagccggtagaagagagcctacctgaagaaaatggactagcatcagctgaagatgatgaagatggttcttctgatgctgaaaataatgatgagcttgtgcctgctgactctacgccgaagctggacctgcaaagcgacaagaagaaaggaatccaagtgcagcttgacctgaagagcaatggggatggcccgcgcgggaagaaggcgcctgctgccaggtcaagagcaaccgggtcaggtgggaaggccgcggcgggaggaggttcggctgggaagaggaagaggtaaatgagacatttggcgcctgcccacagttggccggtggttagtttggacgcacagatcccttggtaaataaggagcaggggtggtaagcttcagagttttgctcatctaatggcacatgtaggcactaggctactgtgcctgctcccatattttctcccagggcacccatgtcttgctaccagaatttgtttgcacttaggctacttccaggttgtggcaatcgagagtttggtgttgtctgtttcatttagcgaatttgtcagtactctataccacgggtcgttgcctcgttggctttgtcttcgtattctcttgtgcattttcgcgttggtagacagggttttatgtgtaaagaaaatgcagtagcgaggcatttaggcaggtaaggagaaacaaaaagattgcttggttgtggtttactattactattaggccaaccccatcgctccatgctggcttgtaatcccagcttgcatagttcacgttttttgatcctccagatttgctggtgtaagtgtttggataacgtctttgtaactttaaaaagccgtaggcgatggattgttc

SEQ ID NO: 218080 - DNA, 3919 bp, Zea Mays
tccacaccaccgcgggtcctcccgccagcctcgagagaaccgcgcgccgcgcccccatcttttcccccaaaccctccgcgcgagcccgaggccccgagcgtcaggcaaggccgcacaccgccgccgcttcccctcatcatccgtctcctccccatccctttcccctcatccgcattcggtaggctgtggcgccagtgtccgcttcaggactggattggtcgtgggaagcaagaaccgcccgcccgcgcattagaaccctagcccccgccaatctaacagcgcaaagaatccggaaaacccccggcttttcggtctcccgagcccgggagatccatccttcgctgcgtcggagatgtcgtccgacatccgtaaatggttcatgaagccgcaggacaagagcgcggcggcatctggagccgccgggaagccctcggggtcggcggctgagaagaagcccgtgctcagcattccggagaagaagtcggcgccccccgcattggcgtcctgtgaccatgatacttccgctagaaggaagacaagcaaatattttgggtcaaaagcagaaaaggactcagatgtccaaatggcagacgcctctggggggaagagtgcggctaaaagaaaacttcagaaatgcaacgatgaagtcaaggaggacagcaagccttttccagcaaagaaaatgtttgatgatgaagaagatgacgattttgtggcacctgcaaagaagaaaactccagtgaagccaccaccttcaaaaaagcttaaagttgaatctaatgttgaagcccctgcaaagactactggtgttgatgatgctgaggatgaggacaggatggatgaagatgccaagaccccctctaaaggagctggaaggggaaggggaagaggaggaagaggaggagcaggagctgcccctgggggcagaggtagaggaggtgggagaggttttatgaattttggtgagaggaaagatcctcctcacaaaggagaaaaggaggtcccagagggtgcccctgactgtttatctggtctgacatttgtcataagtggtaccctcgacagtcttgaacgtgaggaagcaactgatctaattaagcgttatggtggccgtgtgactggctctattagtaaaaagacgagctacttattggccgacgaagacattggtggagtcaaatctaacaaagcaaaagatctgggtgttccattcttgactgaagatggtttatttgatttgatccgaaaatcaaagcctgcaaaggctcctgtagacaaacgtcaaaacaacaacagttctgaaaagcttcagaaatcacagacaaagagctctccagctaaagttgaaaaacgagccgaagcaagtgctgtaggcaaaagtattgcttcaaacagtaatgctgcaagtgcctccgctgacaaacaaaagcccaagattgttgaccgtggttctatgcaatggacagaaaaatatcggccaaaagttccaaatgacatagttggcaatcaatcaatggtcaaacaacttcatgattggttaaaaagttgggatgcactattccttcattctggccaaaagggtaagggaaagaaacaaactgacagtgcagccaaaaaggctgtgttgctgagtggacctcctggtatcggtaagactacaactgctaaagttgttagtcagatgcttggtttgcaggccattgaggtaaatgcgagtgatagccgtggtaaggcagactccaagatcgagaagggtgttggggggagtacatcaaattctatcaaagagcttatcaacaacgcgactctgaattatagtgacaatcggttaaaacatcccaaagctgtactagttatggatgaagttgatggtatgtctgctggagatagaggtggtgttgctgatcttattgctagcatcaagatatccaagatccctattatctgcatttgtaatgaccgttatagtcagaaattgaagaatcttgtgaattactgccttatgctcaacttcagaaagccaacaaaacaacagatgggtaaaagattgatggaaattgccaaaaaggaaggtattcaagctcaagagaatgcaatggaagagcttgctgaaagagtgcacggagatattcgcatggcactcaaccatttgcagtatatgagcctctcccagtctgtggtcaaatatgatgatataaaggagcgacttaatagcagttcaaaggatgaagatatttctccttttactgctgttgacaaactttttggtttcaatggcgggaggttaaggatggatgagagaatggattttggcatgagcgatcctgatttagttcccttgatcatccaggaaaattatatcaattatcggcctaacaccatcggcaaggatgaaagtggagttaaaagaatgaatgctttagcccgggctgctgaatctatagcggacggtgatcttgttaatgtacagataagaagatatcgacagtggcagctgtcacaagctgcttgttttgcttcatctatagtacctgccgctttgatgcatgggaacagagaaatccttgaagcaggtgagcgaaactttaataggtttggtggatggttgggtaagtactcgactactaacaaaaacagaaggctactggaagatgtccacagtcatattcttgcctcccagcaagcaaacttggacagggatgcattgaggttggattatcttactcttatcttgagagagctgactgacccactgaaaaaaatgtcaaaggatgaagctgttcaaaaggtggtagagtttatggatacatactctttaagccaggaagacttcgatacaattgttgaagtatccaaatttaagggtcatccaagtcctatggatgggattcaacctgctgttaaaagtgccttgacaaaggcatacaaacaaggaagtagttcccgtgttgttcgagcagcagatctaataaacattccaggcatgaaaaagcctttaaagaaacgagtggcggcgatcttggagccggtagaagagagcctacctgaagaaaatggactagcatcagctgaagatgatgaagatggttcttctgatgctgaaaataatggtgcatgttctcctttcccacgtaacaaacataaaaaatctgatgagcttgtgcctgctgactctacgccgaagctggacctgcaaagcgacaagaagaaaggaatccaagtgcagcttgacctgaagagcaatggggatggcccgcgcgggaagaaggcgcctgctgccaggtcaagagcaaccgggtcaggtgggaaggccgcggcgggaggaggttcggctgggaagaggaagaggtaaatgagacatttggcgcctgcccacagttggccggtggttagtttggacgcacagatcccttggtaaataaggagcaggggtggtaagcttcagagttttgctcatctaatggcacatgtaggcactaggctactgtgcctgctcccatattttctcccagggcacccatgtcttgctaccagaatttgtttgcacttaggctacttccaggttgtggcaatcgagagtttggtgttgtctgtttcatttagcgaatttgtcagtactctataccacgggtcgttgcctcgttggctttgtcttcgtattctcttgtgcattttcgcgttggtagacagggttttatgtgtaaagaaaatgcagtagcgaggcatttaggcaggtaaggagaaacaaaaagattgcttggttgtggtttactattactattaggccaaccccatcgctccatgctggcttgtaatcccagcttgcatagttcacgttttttgatcctccagatttgctggtgtaagtgtttggataacgtctttgtaactttaaaaagccgtaggcgatggattgttc

SEQ ID NO: 218081 - DNA, 3397 bp, Zea Mays
tccacaccaccgcgggtcctcccgccagcctcgagagaaccgcgcgccgcgcccccatcttttcccccaaaccctccgcgcgagcccgaggccccgagcgtcaggcaaggccgcacaccgccgccgcttcccctcatcatccgtctcctccccatccctttcccctcatccgcattcggtaggctgtggcgccagtgtccgcttcaggactggattggtcgtgggaagcaagaaccgcccgcccgcgcattagaaccctagcccccgccaatctaacagcgcaaagaatccggaaaacccccggcttttcggtctcccgagcccgggagatccatccttcgctgcgtcggagatgtcgtccgacatccgtaaatggttcatgaagccgcaggacaagagcgcggcggcatctggagccgccgggaagccctcggggtcggcggctgagaagaagcccgtgctcagcattccggagaagaagtcggcgccccccgcattgtcttgaacgtgaggaagcaactgatctaattaagcgttatggtggccgtgtgactggctctattagtaaaaagacgagctacttattggccgacgaagacattggtggagtcaaatctaacaaagcaaaagatctgggtgttccattcttgactgaagatggtttatttgatttgatccgaaaatcaaagcctgcaaaggctcctgtagacaaacgtcaaaacaacaacagttctgaaaagcttcagaaatcacagacaaagagctctccagctaaagttgaaaaacgagccgaagcaagtgctgtaggcaaaagtattgcttcaaacagtaatgctgcaagtgcctccgctgacaaacaaaagcccaagattgttgaccgtggttctatgcaatggacagaaaaatatcggccaaaagttccaaatgacatagttggcaatcaatcaatggtcaaacaacttcatgattggttaaaaagttgggatgcactattccttcattctggccaaaagggtaagggaaagaaacaaactgacagtgcagccaaaaaggctgtgttgctgagtggacctcctggtatcggtaagactacaactgctaaagttgttagtcagatgcttggtttgcaggccattgaggtaaatgcgagtgatagccgtggtaaggcagactccaagatcgagaagggtgttggggggagtacatcaaattctatcaaagagcttatcaacaacgcgactctgaattatagtgacaatcggttaaaacatcccaaagctgtactagttatggatgaagttgatggtatgtctgctggagatagaggtggtgttgctgatcttattgctagcatcaagatatccaagatccctattatctgcatttgtaatgaccgttatagtcagaaattgaagaatcttgtgaattactgccttatgctcaacttcagaaagccaacaaaacaacagatgggtaaaagattgatggaaattgccaaaaaggaaggtattcaagctcaagagaatgcaatggaagagcttgctgaaagagtgcacggagatattcgcatggcactcaaccatttgcagtatatgagcctctcccagtctgtggtcaaatatgatgatataaaggagcgacttaatagcagttcaaaggatgaagatatttctccttttactgctgttgacaaactttttggtttcaatggcgggaggttaaggatggatgagagaatggattttggcatgagcgatcctgatttagttcccttgatcatccaggaaaattatatcaattatcggcctaacaccatcggcaaggatgaaagtggagttaaaagaatgaatgctttagcccgggctgctgaatctatagcggacggtgatcttgttaatgtacagataagaagatatcgacagtggcagctgtcacaagctgcttgttttgcttcatctatagtacctgccgctttgatgcatgggaacagagaaatccttgaagcaggtgagcgaaactttaataggtttggtggatggttgggtaagtactcgactactaacaaaaacagaaggctactggaagatgtccacagtcatattcttgcctcccagcaagcaaacttggacagggatgcattgaggttggattatcttactcttatcttgagagagctgactgacccactgaaaaaaatgtcaaaggatgaagctgttcaaaaggtggtagagtttatggatacatactctttaagccaggaagacttcgatacaattgttgaagtatccaaatttaagggtcatccaagtcctatggatgggattcaacctgctgttaaaagtgccttgacaaaggcatacaaacaaggaagtagttcccgtgttgttcgagcagcagatctaataaacattccaggcatgaaaaagcctttaaagaaacgagtggcggcgatcttggagccggtagaagagagcctacctgaagaaaatggactagcatcagctgaagatgatgaagatggttcttctgatgctgaaaataatgatgagcttgtgcctgctgactctacgccgaagctggacctgcaaagcgacaagaagaaaggttcccatacttgctgggcatatggtgcctatccatccctctgaattcactgcacctaacttcccggtaacctcatctgcttccaggaatccaagtgcagcttgacctgaagagcaatggggatggcccgcgcgggaagaaggcgcctgctgccaggtcaagagcaaccgggtcaggtgggaaggccgcggcgggaggaggttcggctgggaagaggaagaggtaaatgagacatttggcgcctgcccacagttggccggtggttagtttggacgcacagatcccttggtaaataaggagcaggggtggtaagcttcagagttttgctcatctaatggcacatgtaggcactaggctactgtgcctgctcccatattttctcccagggcacccatgtcttgctaccagaatttgtttgcacttaggctacttccaggttgtggcaatcgagagtttggtgttgtctgtttcatttagcgaatttgtcagtactctataccacgggtcgttgcctcgttggctttgtcttcgtattctcttgtgcattttcgcgttggtagacagggttttatgtgtaaagaaaatgcagtagcgaggcatttaggcaggtaaggagaaacaaaaagattgcttggttgtggtttactattactattaggccaaccccatcgctccatgctggcttgtaatcccagcttgcatagttcacgttttttgatcctccagatttgctggtgtaagtgtttggataacgtctttgtaactttaaaaagccgtaggcgatggattgttc

SEQ ID NO: 218082 - DNA, 3733 bp, Zea Mays
tccacaccaccgcgggtcctcccgccagcctcgagagaaccgcgcgccgcgcccccatcttttcccccaaaccctccgcgcgagcccgaggccccgagcgtcaggcaaggccgcacaccgccgccgcttcccctcatcatccgtctcctccccatccctttcccctcatccgcattcggtaggctgtggcgccagtgtccgcttcaggactggattggtcgtgggaagcaagaaccgcccgcccgcgcattagaaccctagcccccgccaatctaacagcgcaaagaatccggaaaacccccggcttttcggtctcccgagcccgggagatccatccttcgctgcgtcggagatggcgtcctgtgaccatgatacttccgctagaaggaagacaagcaaatattttgggtcaaaagcagaaaaggactcagatgtccaaatggcagacgcctctggggggaagagtgcggctaaaagaaaacttcagaaatgcaacgatgaagtcaaggaggacagcaagccttttccagcaaagaaaatgtttgatgatgaagaagatgacgattttgtggcacctgcaaagaagaaaactccagtgaagccaccaccttcaaaaaagcttaaagttgaatctaatgttgaagcccctgcaaagactactggtgttgatgatgctgaggatgaggacaggatggatgaagatgccaagaccccctctaaaggagctggaaggggaaggggaagaggaggaagaggaggagcaggagctgcccctgggggcagaggtagaggaggtgggagaggttttatgaattttggtgagaggaaagatcctcctcacaaaggagaaaaggaggtcccagagggtgcccctgactgtttatctggtctgacatttgtcataagtggtaccctcgacagtcttgaacgtgaggaagcaactgatctaattaagcgttatggtggccgtgtgactggctctattagtaaaaagacgagctacttattggccgacgaagacattggtggagtcaaatctaacaaagcaaaagatctgggtgttccattcttgactgaagatggtttatttgatttgatccgaaaatcaaagcctgcaaaggctcctgtagacaaacgtcaaaacaacaacagttctgaaaagcttcagaaatcacagacaaagagctctccagctaaagttgaaaaacgagccgaagcaagtgctgtaggcaaaagtattgcttcaaacagtaatgctgcaagtgcctccgctgacaaacaaaagcccaagattgttgaccgtggttctatgcaatggacagaaaaatatcggccaaaagttccaaatgacatagttggcaatcaatcaatggtcaaacaacttcatgattggttaaaaagttgggatgcactattccttcattctggccaaaagggtaagggaaagaaacaaactgacagtgcagccaaaaaggctgtgttgctgagtggacctcctggtatcggtaagactacaactgctaaagttgttagtcagatgcttggtttgcaggccattgaggtaaatgcgagtgatagccgtggtaaggcagactccaagatcgagaagggtgttggggggagtacatcaaattctatcaaagagcttatcaacaacgcgactctgaattatagtgacaatcggttaaaacatcccaaagctgtactagttatggatgaagttgatggtatgtctgctggagatagaggtggtgttgctgatcttattgctagcatcaagatatccaagatccctattatctgcatttgtaatgaccgttatagtcagaaattgaagaatcttgtgaattactgccttatgctcaacttcagaaagccaacaaaacaacagatgggtaaaagattgatggaaattgccaaaaaggaaggtattcaagctcaagagaatgcaatggaagagcttgctgaaagagtgcacggagatattcgcatggcactcaaccatttgcagtatatgagcctctcccagtctgtggtcaaatatgatgatataaaggagcgacttaatagcagttcaaaggatgaagatatttctccttttactgctgttgacaaactttttggtttcaatggcgggaggttaaggatggatgagagaatggattttggcatgagcgatcctgatttagttcccttgatcatccaggaaaattatatcaattatcggcctaacaccatcggcaaggatgaaagtggagttaaaagaatgaatgctttagcccgggctgctgaatctatagcggacggtgatcttgttaatgtacagataagaagatatcgacagtggcagctgtcacaagctgcttgttttgcttcatctatagtacctgccgctttgatgcatgggaacagagaaatccttgaagcaggtgagcgaaactttaataggtttggtggatggttgggtaagtactcgactactaacaaaaacagaaggctactggaagatgtccacagtcatattcttgcctcccagcaagcaaacttggacagggatgcattgaggttggattatcttactcttatcttgagagagctgactgacccactgaaaaaaatgtcaaaggatgaagctgttcaaaaggtggtagagtttatggatacatactctttaagccaggaagacttcgatacaattgttgaagtatccaaatttaagggtcatccaagtcctatggatgggattcaacctgctgttaaaagtgccttgacaaaggcatacaaacaaggaagtagttcccgtgttgttcgagcagcagatctaataaacattccaggcatgaaaaagcctttaaagaaacgagtggcggcgatcttggagccggtagaagagagcctacctgaagaaaatggactagcatcagctgaagatgatgaagatggttcttctgatgctgaaaataatgatgagcttgtgcctgctgactctacgccgaagctggacctgcaaagcgacaagaagaaaggaatccaagtgcagcttgacctgaagagcaatggggatggcccgcgcgggaagaaggcgcctgctgccaggtcaagagcaaccgggtcaggtgggaaggccgcggcgggaggaggttcggctgggaagaggaagaggtaaatgagacatttggcgcctgcccacagttggccggtggttagtttggacgcacagatcccttggtaaataaggagcaggggtggtaagcttcagagttttgctcatctaatggcacatgtaggcactaggctactgtgcctgctcccatattttctcccagggcacccatgtcttgctaccagaatttgtttgcacttaggctacttccaggttgtggcaatcgagagtttggtgttgtctgtttcatttagcgaatttgtcagtactctataccacgggtcgttgcctcgttggctttgtcttcgtattctcttgtgcattttcgcgttggtagacagggttttatgtgtaaagaaaatgcagtagcgaggcatttaggcaggtaaggagaaacaaaaagattgcttggttgtggtttactattactattaggccaaccccatcgctccatgctggcttgtaatcccagcttgcatagttcacgttttttgatcctccagatttgctggtgtaagtgtttggataacgtctttgtaactttaaaaagccgtaggcgatggattgttc

SEQ ID NO: 218083 - DNA, 3860 bp, Zea Mays
tccacaccaccgcgggtcctcccgccagcctcgagagaaccgcgcgccgcgcccccatcttttcccccaaaccctccgcgcgagcccgaggccccgagcgtcaggcaaggccgcacaccgccgccgcttcccctcatcatccgtctcctccccatccctttcccctcatccgcattcggtaggctgtggcgccagtgtccgcttcaggactggattggtcgtgggaagcaagaaccgcccgcccgcgcattagaaccctagcccccgccaatctaacagcgcaaagaatccggaaaacccccggcttttcggtctcccgagcccgggagatccatccttcgctgcgtcggagatgtcgtccgacatccgtaaatggttcatgaagccgcaggacaagagcgcggcggcatctggagccgccgggaagccctcggggtcggcggctgagaagaagcccgtgctcagcattccggagaagaagtcggcgccccccgcattgtcttgaacgtgaggaagcaactgatctaattaagcgttatggtggccgtgtgactggctctattagtaaaaagacgagctacttattggccgacgaagacattggtggagtcaaatctaacaaagcaaaagatctgggtgttccattcttgactgaagatggtttatttgatttgatccgaaaatcaaagcctgcaaaggctcctgtagacaaacgtcaaaacaacaacagttctgaaaagcttcagaaatcacagacaaagagctctccagctaaagttgaaaaacgagccgaagcaagtgctgtaggcaaaagtattgcttcaaacagtaatgctgcaagtgcctccgctgacaaacaaaagcccaagattgttgaccgtggttctatgcaatggacagaaaaatatcggccaaaagttccaaatgacatagttggcaatcaatcaatggtcaaacaacttcatgattggttaaaaagttgggatgcactattccttcattctggccaaaagggtaagggaaagaaacaaactgacagtgcagccaaaaaggctgtgttgctgagtggacctcctggtatcggtaagactacaactgctaaagttgttagtcagatgcttggtttgcaggccattgaggtaaatgcgagtgatagccgtggtaaggcagactccaagatcgagaagggtgttggggggagtacatcaaattctatcaaagagcttatcaacaacgcgactctgaattatagtgacaatcggttaaaacatcccaaagctgtactagttatggatgaagttgatggtatgtctgctggagatagaggtggtgttgctgatcttattgctagcatcaagatatccaagatccctattatctgcatttgtaatgaccgttatagtcagaaattgaagaatcttgtgaattactgccttatgctcaacttcagaaagccaacaaaacaacagatgggtaaaagattgatggaaattgccaaaaaggaaggtattcaagctcaagagaatgcaatggaagagcttgctgaaagagtgcacggagatattcgcatggcactcaaccatttgcagtatatgagcctctcccagtctgtggtcaaatatgatgatataaaggagcgacttaatagcagttcaaaggatgaagatatttctccttttactgctgttgacaaactttttggtttcaatggcgggaggttaaggatggatgagagaatggattttggcatgagcgatcctgatttagttcccttgatcatccaggaaaattatatcaattatcggcctaacaccatcggcaaggatgaaagtggagttaaaagaatgaatgctttagcccgggctgctgaatctatagcggacggtgatcttgttaatgtacagataagaagatatcgacagtggcagctgtcacaagctgcttgttttgcttcatctatagtacctgccgctttgatgcatgggaacagagaaatccttgaagcagtaatgttcaaacacctaactgacactatatttaatatattacttcagcttattgggctaaattaagttgggtaacaaatacatttcagggtgagcgaaactttaataggtttggtggatggttgggtaagtactcgactactaacaaaaacagaaggctactggaagatgtccacagtcatattcttgcctcccagcaagcaaacttggacagggatgcattgaggttggattatcttactcttatcttgagagagctgactgacccactgaaaaaaatgtcaaaggatgaagctgttcaaaaggtggtagagtttatggatacatactctttaagccaggaagacttcgatacaattgttgaagtatccaaatttaagggtcatccaagtcctatggatgggattcaacctgctgttaaaagtgccttgacaaaggcatacaaacaaggaagtagttcccgtgttgttcgagcagcagatctaataaacattccaggcatgaaaaagcctttaaagaaacgagtggcggcgatcttggagccggtagaagagagcctacctgaagaaaatggactagcatcagctgaagatgatgaagatggttcttctgatgctgaaaataatggtgcatgttctcctttcccacgtaacaaacataaaaaatctggtagatgcctgtttgtttggctaatgtgtcaggcattaggataaaatggatctgttttgaggcaactttgtggtgccacactgactgacttcatttaacgcaattgtgaaagtacccatttttatggagatttgtagcatcattcaggcaaatgcaaatcgagatcatatagacatgaacttgtgaaatagctacacctaactatagacaggtttacataattacatgtacttcaagacacaccatactaatatatggtagagccagttctatcgcaagtttttagtcagttggatgctaatggaagctgcatccattagcacagttggtaaagcgtttttagtcagttgggatgctttgggagttgcatccagaaaggttcatatggcttgctgtctaatcacttttttcccttcagatgagcttgtgcctgctgactctacgccgaagctggacctgcaaagcgacaagaagaaaggaatccaagtgcagcttgacctgaagagcaatggggatggcccgcgcgggaagaaggcgcctgctgccaggtcaagagcaaccgggtcaggtgggaaggccgcggcgggaggaggttcggctgggaagaggaagaggtaaatgagacatttggcgcctgcccacagttggccggtggttagtttggacgcacagatcccttggtaaataaggagcaggggtggtaagcttcagagttttgctcatctaatggcacatgtaggcactaggctactgtgcctgctcccatattttctcccagggcacccatgtcttgctaccagaatttgtttgcacttaggctacttccaggttgtggcaatcgagagtttggtgttgtctgtttcatttagcgaatttgtcagtactctataccacgggtcgttgcctcgttggctttgtcttcgtattctcttgtgcattttcgcgttggtagacagggttttatgtgtaaagaaaatgcagtagcgaggcatttaggcaggtaaggagaaacaaaaagattgcttggttgtggtttactattactattaggccaaccccatcgctccatgctggcttgtaatcccagcttgcatagttcacgttttttgatcctccagatttgctggtgtaagtgtttggataacgtctttgtaactttaaaaagccgtaggcgatggattgttc

SEQ ID NO: 218084 - DNA, 3857 bp, Zea Mays
tccacaccaccgcgggtcctcccgccagcctcgagagaaccgcgcgccgcgcccccatcttttcccccaaaccctccgcgcgagcccgaggccccgagcgtcaggcaaggccgcacaccgccgccgcttcccctcatcatccgtctcctccccatccctttcccctcatccgcattcggtaggctgtggcgccagtgtccgcttcaggactggattggtcgtgggaagcaagaaccgcccgcccgcgcattagaaccctagcccccgccaatctaacagcgcaaagaatccggaaaacccccggcttttcggtctcccgagcccgggagatccatccttcgctgcgtcggagatgtcgtccgacatccgtaaatggttcatgaagccgcaggacaagagcgcggcggcatctggagccgccgggaagccctcggggtcggcggctgagaagaagcccgtgctcagcattccggagaagaagtcggcgccccccgcattggcgtcctgtgaccatgatacttccgctagaaggaagacaagcaaatattttgggtcaaaagcagaaaaggactcagatgtccaaatggcagacgcctctggggggaagagtgcggctaaaagaaaacttcagaaatgcaacgatgaagtcaaggaggacagcaagccttttccagcaaagaaaatgtttgatgatgaagaagatgacgattttgtggcacctgcaaagaagaaaactccagtgaagccaccaccttcaaaaaagcttaaagttgaatctaatgttgaagcccctgcaaagactactggtgttgatgatgctgaggatgaggacaggatggatgaagatgccaagaccccctctaaaggagctggaaggggaaggggaagaggaggaagaggaggagcaggagctgcccctgggggcagaggtagaggaggtgggagaggttttatgaattttggtgagaggaaagatcctcctcacaaaggagaaaaggaggtcccagagggtgcccctgactgtttatctggtctgacatttgtcataagtggtaccctcgacagtcttgaacgtgaggaagcaactgatctaattaagcgttatggtggccgtgtgactggctctattagtaaaaagacgagctacttattggccgacgaagacattggtggagtcaaatctaacaaagcaaaagatctgggatggtttatttgatttgatccgaaaatcaaagcctgcaaaggctcctgtagacaaacgtcaaaacaacaacagttctgaaaagcttcagaaatcacagacaaagagctctccagctaaagttgaaaaacgagccgaagcaagtgctgtaggcaaaagtattgcttcaaacagtaatgctgcaagtgcctccgctgacaaacaaaagcccaagattgttgaccgtggttctatgcaatggacagaaaaatatcggccaaaagttccaaatgacatagttggcaatcaatcaatggtcaaacaacttcatgattggttaaaaagttgggatgcactattccttcattctggccaaaagggtaagggaaagaaacaaactgacagtgcagccaaaaaggctgtgttgctgagtggacctcctggtatcggtaagactacaactgctaaagttgttagtcagatgcttggtttgcaggccattgaggtaaatgcgagtgatagccgtggtaaggcagactccaagatcgagaagggtgttggggggagtacatcaaattctatcaaagagcttatcaacaacgcgactctgaattatagtgacaatcggttaaaacatcccaaagctgtactagttatggatgaagttgatggtatgtctgctggagatagaggtggtgttgctgatcttattgctagcatcaagatatccaagatccctattatctgcatttgtaatgaccgttatagtcagaaattgaagaatcttgtgaattactgccttatgctcaacttcagaaagccaacaaaacaacagatgggtaaaagattgatggaaattgccaaaaaggaaggtattcaagctcaagagaatgcaatggaagagcttgctgaaagagtgcacggagatattcgcatggcactcaaccatttgcagtatatgagcctctcccagtctgtggtcaaatatgatgatataaaggagcgacttaatagcagttcaaaggatgaagatatttctccttttactgctgttgacaaactttttggtttcaatggcgggaggttaaggatggatgagagaatggattttggcatgagcgatcctgatttagttcccttgatcatccaggaaaattatatcaattatcggcctaacaccatcggcaaggatgaaagtggagttaaaagaatgaatgctttagcccgggctgctgaatctatagcggacggtgatcttgttaatgtacagataagaagatatcgacagtggcagctgtcacaagctgcttgttttgcttcatctatagtacctgccgctttgatgcatgggaacagagaaatccttgaagcaggtgagcgaaactttaataggtttggtggatggttgggtaagtactcgactactaacaaaaacagaaggctactggaagatgtccacagtcatattcttgcctcccagcaagcaaacttggacagggatgcattgaggttggattatcttactcttatcttgagagagctgactgacccactgaaaaaaatgtcaaaggatgaagctgttcaaaaggtggtagagtttatggatacatactctttaagccaggaagacttcgatacaattgttgaagtatccaaatttaagggtcatccaagtcctatggatgggattcaacctgctgttaaaagtgccttgacaaaggcatacaaacaaggaagtagttcccgtgttgttcgagcagcagatctaataaacattccaggcatgaaaaagcctttaaagaaacgagtggcggcgatcttggagccggtagaagagagcctacctgaagaaaatggactagcatcagctgaagatgatgaagatggttcttctgatgctgaaaataatgatgagcttgtgcctgctgactctacgccgaagctggacctgcaaagcgacaagaagaaaggaatccaagtgcagcttgacctgaagagcaatggggatggcccgcgcgggaagaaggcgcctgctgccaggtcaagagcaaccgggtcaggtgggaaggccgcggcgggaggaggttcggctgggaagaggaagaggtaaatgagacatttggcgcctgcccacagttggccggtggttagtttggacgcacagatcccttggtaaataaggagcaggggtggtaagcttcagagttttgctcatctaatggcacatgtaggcactaggctactgtgcctgctcccatattttctcccagggcacccatgtcttgctaccagaatttgtttgcacttaggctacttccaggttgtggcaatcgagagtttggtgttgtctgtttcatttagcgaatttgtcagtactctataccacgggtcgttgcctcgttggctttgtcttcgtattctcttgtgcattttcgcgttggtagacagggttttatgtgtaaagaaaatgcagtagcgaggcatttaggcaggtaaggagaaacaaaaagattgcttggttgtggtttactattactattaggccaaccccatcgctccatgctggcttgtaatcccagcttgcatagttcacgttttttgatcctccagatttgctggtgtaagtgtttggataacgtctttgtaactttaaaaagccgtaggcgatggattgttc

SEQ ID NO: 218085 - DNA, 3893 bp, Zea Mays
tccacaccaccgcgggtcctcccgccagcctcgagagaaccgcgcgccgcgcccccatcttttcccccaaaccctccgcgcgagcccgaggccccgagcgtcaggcaaggccgcacaccgccgccgcttcccctcatcatccgtctcctccccatccctttcccctcatccgcattcggtaggctgtggcgccagtgtccgcttcaggactggattggtcgtgggaagcaagaaccgcccgcccgcgcattagaaccctagcccccgccaatctaacagcgcaaagaatccggaaaacccccggcttttcggtctcccgagcccgggagatccatccttcgctgcgtcggagatgtcgtccgacatccgtaaatggttcatgaagccgcaggacaagagcgcggcggcatctggagccgccgggaagccctcggggtcggcggctgagaagaagcccgtgctcagcattccggagaagaagtcggcgccccccgcattggcgtcctgtgaccatgatacttccgctagaaggaagacaagcaaatattttgggtcaaaagcagaaaaggactcagatgtccaaatggcagacgcctctggggggaagagtgcggctaaaagaaaacttcagaaatgcaacgatgaagtcaaggaggacagcaagccttttccagcaaagaaaatgtttgatgatgaagaagatgacgattttgtggcacctgcaaagaagaaaactccagtgaagccaccaccttcaaaaaagcttaaagttgaatctaatgttgaagcccctgcaaagactactggtgttgatgatgctgaggatgaggacaggatggatgaagatgccaagaccccctctaaaggagctggaaggggaaggggaagaggaggaagaggaggagcaggagctgcccctgggggcagaggtagaggaggtgggagaggttttatgaattttggtgagaggaaagatcctcctcacaaaggagaaaaggaggtcccagagggtgcccctgactgtttatctggtctgacatttgtcataagtggtaccctcgacagtcttgaacgtgaggaagcaactgatctaattaagcgttatggtggccgtgtgactggctctattagtaaaaagacgagctacttattggccgacgaagacattggtggagtcaaatctaacaaagcaaaagatctgggtgttccattcttgactgaagatggtttatttgatttgatccgaaaatcaaagcctgcaaaggctcctgtagacaaacgtcaaaacaacaacagttctgaaaagcttcagaaatcacagacaaagagctctccagctaaagttgaaaaacgagccgaagcaagtgctgtaggcaaaagtattgcttcaaacagtaatgctgcaagtgcctccgctgacaaacaaaagcccaagattgttgaccgtggttctatgcaatggacagaaaaatatcggccaaaagttccaaatgacatagttggcaatcaatcaatggtcaaacaacttcatgattggttaaaaagttgggatgcactattccttcattctggccaaaagggtaagggaaagaaacaaactgacagtgcagccaaaaaggctgtgttgctgagtggacctcctggtatcggtaagactacaactgctaaagttgttagtcagatgcttggtttgcaggccattgaggtaaatgcgagtgatagccgtggtaaggcagactccaagatcgagaagggtgttggggggagtacatcaaattctatcaaagagcttatcaacaacgcgactctgaattatagtgacaatcggttaaaacatcccaaagctgtactagttatggatgaagttgatggtatgtctgctggagatagaggtggtgttgctgatcttattgctagcatcaagatatccaagatccctattatctgcatttgtaatgaccgttatagtcagaaattgaagaatcttgtgaattactgccttatgctcaacttcagaaagccaacaaaacaacagatgggtaaaagattgatggaaattgccaaaaaggaaggtattcaagctcaagagaatgcaatggaagagcttgctgaaagagtgcacggagatattcgcatggcactcaaccatttgcagtatatgagcctctcccagtctgtggtcaaatatgatgatataaaggagcgacttaatagcagttcaaaggatgaagatatttctccttttactgctgttgacaaactttttggtttcaatggcgggaggttaaggatggatgagagaatggattttggcatgagcgatcctgatttagttcccttgatcatccaggaaaattatatcaattatcggcctaacaccatcggcaaggatgaaagtggagttaaaagaatgaatgctttagcccgggctgctgaatctatagcggacggtgatcttgttaatgtacagataagaagatatcgacagtggcagctgtcacaagctgcttgttttgcttcatctatagtacctgccgctttgatgcatgggaacagagaaatccttgaagcaggtgagcgaaactttaataggtttggtggatggttgggtaagtactcgactactaacaaaaacagaaggctactggaagatgtccacagtcatattcttgcctcccagcaagcaaacttggacagttcttgagaactgcagggatgcattgaggttggattatcttactcttatcttgagagagctgactgacccactgaaaaaaatgtcaaaggatgaagctgttcaaaaggtggtagagtttatggatacatactctttaagccaggaagacttcgatacaattgttgaagtatccaaatttaagggtcatccaagtcctatggatgggattcaacctgctgttaaaagtgccttgacaaaggcatacaaacaaggaagtagttcccgtgttgttcgagcagcagatctaataaacattccaggcatgaaaaagcctttaaagaaacgagtggcggcgatcttggagccggtagaagagagcctacctgaagaaaatggactagcatcagctgaagatgatgaagatggttcttctgatgctgaaaataatgatgagcttgtgcctgctgactctacgccgaagctggacctgcaaagcgacaagaagaaaggaatccaagtgcagcttgacctgaagagcaatggggatggcccgcgcgggaagaaggcgcctgctgccaggtcaagagcaaccgggtcaggtgggaaggccgcggcgggaggaggttcggctgggaagaggaagaggtaaatgagacatttggcgcctgcccacagttggccggtggttagtttggacgcacagatcccttggtaaataaggagcaggggtggtaagcttcagagttttgctcatctaatggcacatgtaggcactaggctactgtgcctgctcccatattttctcccagggcacccatgtcttgctaccagaatttgtttgcacttaggctacttccaggttgtggcaatcgagagtttggtgttgtctgtttcatttagcgaatttgtcagtactctataccacgggtcgttgcctcgttggctttgtcttcgtattctcttgtgcattttcgcgttggtagacagggttttatgtgtaaagaaaatgcagtagcgaggcatttaggcaggtaaggagaaacaaaaagattgcttggttgtggtttactattactattaggccaaccccatcgctccatgctggcttgtaatcccagcttgcatagttcacgttttttgatcctccagatttgctggtgtaagtgtttggataacgtctttgtaactttaaaaagccgtaggcgatggattgttc

SEQ ID NO: 218086 - DNA, 2856 bp, Zea Mays
caatttctattcttgaacgtgaggaagcaactgatctaattaagcgttatggtggccgtgtgactggctctattagtaaaaagacgagctacttattggccgacgaagacattggtggagtcaaatctaacaaagcaaaagatctgggcctgcaaaggctcctgtagacaaacgtcaaaacaacaacagttctgaaaagcttcagaaatcacagacaaagagctctccagctaaagttgaaaaacgagccgaagcaagtgctgtaggcaaaagtattgcttcaaacagtaatgctgcaagtgcctccgctgacaaacaaaagcccaagattgttgaccgtggttctatgcaatggacagaaaaatatcggccaaaagttccaaatgacatagttggcaatcaatcaatggtcaaacaacttcatgattggttaaaaagttgggatgcactattccttcattctggccaaaagggtaagggaaagaaacaaactgacagtgcagccaaaaaggctgtgttgctgagtggacctcctggtatcggtaagactacaactgctaaagttgttagtcagatgcttggtttgcaggccattgaggtaaatgcgagtgatagccgtggtaaggcagactccaagatcgagaagggtgttggggggagtacatcaaattctatcaaagagcttatcaacaacgcgactctgaattatagtgacaatcggttaaaacatcccaaagctgtactagttatggatgaagttgatggtatgtctgctggagatagaggtggtgttgctgatcttattgctagcatcaagatatccaagatccctattatctgcatttgtaatgaccgttatagtcagaaattgaagaatcttgtgaattactgccttatgctcaacttcagaaagccaacaaaacaacagatgggtaaaagattgatggaaattgccaaaaaggaaggtattcaagctcaagagaatgcaatggaagagcttgctgaaagagtgcacggagatattcgcatggcactcaaccatttgcagtatatgagcctctcccagtctgtggtcaaatatgatgatataaaggagcgacttaatagcagttcaaaggatgaagatatttctccttttactgctgttgacaaactttttggtttcaatggcgggaggttaaggatggatgagagaatggattttggcatgagcgatcctgatttagttcccttgatcatccaggaaaattatatcaattatcggcctaacaccatcggcaaggatgaaagtggagttaaaagaatgaatgctttagcccgggctgctgaatctatagcggacggtgatcttgttaatgtacagataagaagatatcgacagtggcagctgtcacaagctgcttgttttgcttcatctatagtacctgccgctttgatgcatgggaacagagaaatccttgaagcaggtgagcgaaactttaataggtttggtggatggttgggtaagtactcgactactaacaaaaacagaaggctactggaagatgtccacagtcatattcttgcctcccagcaagcaaacttggacagggatgcattgaggttggattatcttactcttatcttgagagagctgactgacccactgaaaaaaatgtcaaaggatgaagctgttcaaaaggtggtagagtttatggatacatactctttaagccaggaagacttcgatacaattgttgaagtatccaaatttaagggtcatccaagtcctatggatgggattcaacctgctgttaaaagtgccttgacaaaggcatacaaacaaggaagtagttcccgtgttgttcgagcagcagatctaataaacattccaggcatgaaaaagcctttaaagaaacgagtggcggcgatcttggagccggtagaagagagcctacctgaagaaaatggactagcatcagctgaagatgatgaagatggttcttctgatgctgaaaataatgatgagcttgtgcctgctgactctacgccgaagctggacctgcaaagcgacaagaagaaaggttcccatacttgctgggcatatggtgcctatccatccctctgaattcactgcacctaacttcccggtaacctcatctgcttccaggaatccaagtgcagcttgacctgaagagcaatggggatggcccgcgcgggaagaaggcgcctgctgccaggtcaagagcaaccgggtcaggtgggaaggccgcggcgggaggaggttcggctgggaagaggaagaggtaaatgagacatttggcgcctgcccacagttggccggtggttagtttggacgcacagatcccttggtaaataaggagcaggggtggtaagcttcagagttttgctcatctaatggcacatgtaggcactaggctactgtgcctgctcccatattttctcccagggcacccatgtcttgctaccagaatttgtttgcacttaggctacttccaggttgtggcaatcgagagtttggtgttgtctgtttcatttagcgaatttgtcagtactctataccacgggtcgttgcctcgttggctttgtcttcgtattctcttgtgcattttcgcgttggtagacagggttttatgtgtaaagaaaatgcagtagcgaggcatttaggcaggtaaggagaaacaaaaagattgcttggttgtggtttactattactattaggccaaccccatcgctccatgctggcttgtaatcccagcttgcatagttcacgttttttgatcctccagatttgctggtgtaagtgtttggataacgtctttgtaactttaaaaagccgtaggcgatggattgttc

SEQ ID NO: 218087 - DNA, 3910 bp, Zea Mays
ctcgtctcttcttccgtctcctccgcctccccacgcttcgttatataaaccctagactaaagcccccgagtccctccgcccccgctcgccacaaccactgcgcgtgatcccatttcgaaacaaaaaaggaggagcgcgctcgcactcaactccgcggagccccaatcccagcgtcgcctgcggtttagatggaggcgcacggcgaccagcggtggctggtggattgcctgacggctacgctcgacaccgcgcgcgatgtccgcgccttcgccgaggagtcgctccgccaggcctcgcttctccctggatatggagctgcccttacaaaagttacaatcaacaaagagatctcgtttggtttacgacagcttgctgctgtcttactaaagcagtttatcaagcagcattggcaggaagacgaagagaattttgtgccccctgttgtttctgcttcagaaaaggtggtcatacgacagctcctgcttacctcattggatgattctaatgggaaaattcgcactgctattagcatggctgtagcagctattggacagcaagattggcctgaagactggcctgagttacttccggttctcttaaagttaattggcgatcaaagcaatgggaatgaagttcgtggagcattaagatgcctagcccttctatcggatgatctagatgatatgtgtgttccaaagctagtgccagagctattcccatcactgtatagaataatatcatctcctcatctgtatgaaaattctcttcgtgcaaaggcttttgcaatagtccattcatgtatttctatgcttggatcaatgagtggtgtctataagagagatacagctagtctgatgacttcagtgcttgatccactaatagagcaattctccatagttctaaattatccggtgcagtcccaaaatcctgatgactggagcatgcagatggaggtgctcaaatgtttacttcagcttgtccagaactttcctagattacctgaagctaaaatttctggcaaaatttgtgcagccattcttccagcactgtggcagacatttgtttcgtcattcaagacctatcacctgtcatacattcaaggtgcagaaactttggattctattagttatgattctgatggcagtgaaaaaagtcttgagtcattcgagattcagttatttgagctatggacaacaattgtggggaattctagattagcaaaggttattgggggaaacattaaggagctagcatactatactatagccttgcaacagataactgaagaacaggtgcaaaactggtcacgcgatgctaaccagtatgttgctgatgaggatgacctaacctatagctgtcgtgtgtctggatctcttttgctggaagagctagtaacagcttatgaagattatggaattgactcaattgtggaagcttcacaaatgcgttttcatgaatcacgagaattgaaggaagcgggttctgctgactggtggagactgcatgaagcatcactttttgctttaggttcactgtcagaacagttgtgtgaagcacaggattctggtttgacaaaatacaatgtgcgggatttacttgagcaaatgctaattgacattatgggaacaggggtgcatcagtacccatttctccatgcgcgtgcattttctagtgtggctaaattttcttcactgataagtaaaggggtcagtgaacagtatctatgcaatgcggcccatgcgattgcctcagatgtgccacccccggttaaagttggtgcttgtagggcactggcccaacttttaccagaatctaatcagaatctgattcagccaaacattatgggcatactttcatctcttgttgaccttctgcggcaggcatctgatgaaaccctgcatcttgttctagaaaccctgcaatcagcaatcaaatctggtggagaacaatcaactttaattgagcctgtcatttcccccatcatactggatgtttgggcacagcacattgctgacccgttcatcagcattgatgctgtcgaagtgttagaggctatcaagaatgctcctggatgcttacagccacttgtgtctcgaatccttccaacaattggatccattttagtgaaacccaaggtccagccggatggactggttgcaggttcactggaccttttgacgatggtactcaaaaatgctccagttgctgtggttaaagcagtcttcgacacatgctttgtttctactgttcaaattgttcttgaaagtgatgaccatggagagatgcagaatgcgacagaatgcttggcagcattcatatcaggtggccggcaggagttgcttgtctggggtggtgaacaaggacaaacactcaagatgctacttgatgcagcttcaaggcttttagatccagcgttagaaagttcagtatcactatttgttggaagctttgttttgcaactcattttacaaatacctctacacctgtctcctcacataccggaccttattgctgctattatgagacgtatgcaaacgagcagcattgcaggattgaaaagctcccttattgttataatagccagattagtacatatgagtgcaccaaatgttgatgggttcatcaatctattgctttctatccctgcacaggggtatgacaattcacttgtttatattatgtcagaatggtcacaactacaaggtgaaattcagggagcctaccagataaaggttacaacgactgcattagctcttctcatatcaactcgtcatcctgagctatccaaggttgaagttcaagggcatcttattaagactagtgcaggtataacgacacgttcaaaagctcgagtgactcctgatcaatggaccaagattcctctcccagttaagatcttctcattgctggcagatactttaactgaaattcaggaacaaattggtgctggtgatgacgatgactccgaagaggataatgactgggaagaagttcagaatggtgatgctagtatatcagatgatatcatacactcagcatcggttccttcaatgactaatccatcagttgaacatttaaatgcaatggccaaggtttttgatgaggatgatgatgatagttatgacgatgatctgacaaaaaacgaccctcttaatgaggtgaagttagcggacttcctaacaaacatctttgctaacttgtgggagaataatcgaccaatatttgagtatctttgccagggcctgtcggattcacagagatcagctgttgaaaaggttttgaggaggtgaagcgttaacttgggatcctgtcttccacctttcgggatataatatatcttcatattagttatcgagtcctgtttgcattgctgtggactggttttcttgctcattatatgttcattggtgtaaactgatacatctctgaagccggtgttatgaggttttgttagtgtaggtttctttatgttctttgtatttaaaatctacaagatgtgagtatttgttgtaccgggtgtggtgatgttgggtattcatgtctgaagaattcccggcttgacttgttcttacgttgaattcctccggagggaccttgattccttggctttattcatcaatttcatgcatgcctatttggaggaacgccacctttggtgtttggcaggagcggttaagctcagggagttgggtcccggggttggagttccttagggctctactagtgtgtgcggtggtcaagtgttttctccttccttggtcaagtgtttgcctcggttcaacccctcactcttggtttggagtacgggtgtagtttttcttttgtaagaaccttcctttttattctatcttaatttaaagatgcagttcttctgtgtatccaagatttttttcatttatggactagttga

SEQ ID NO: 218088 - DNA, 3921 bp, Zea Mays
ctcgtctcttcttccgtctcctccgcctccccacgcttcgttatataaaccctagactaaagcccccgagtccctccgcccccgctcgccacaaccactgcgcgtgatcccatttcgaaacaaaaaaggaggagcgcgctcgcactcaactccgcggagccccaatcccagcgtcgcctgcggtttagatggaggcgcacggcgaccagcggtggctggtggattgcctgacggctacgctcgacaccgcgcgcgatgtccgcgccttcgccgaggagtcgctccgccaggcctcgcttctccctggatatggagctgcccttacaaaagttacaatcaacaaagagatctcgtttggtttacgacagcttgctgctgtcttactaaagcagtttatcaagcagcattggcaggaagacgaagagaattttgtgccccctgttgtttctgcttcagaaaaggtggtcatacgacagctcctgcttacctcattggatgattctaatgggaaaattcgcactgctattagcatggctgtagcagctattggacagcaagattggcctgaagactggcctgagttacttccggttctcttaaagttaattggcgatcaaagcaatgggaatgaagttcgtggagcattaagatgcctagcccttctatcggatgatctagatgatatgtgtgttccaaagctagtgccagagctattcccatcactgtatagaataatatcatctcctcatctgtatgaaaattctcttcgtgcaaaggcttttgcaatagtccattcatgtatttctatgcttggatcaatgagtggtgtctataagagagatacagctagtctgatgacttcagtgcttgatccactaatagagcaattctccatagttctaaattatccggtgcagtcccaaaatcctgatgactggagcatgcagatggaggtgctcaaatgtttacttcagcttgtccagaactttcctagattacctgaagctaaaatttctgccattcttccagcactgtggcagacatttgtttcgtcattcaagacctatcacctgtcatacattcaaggtgcagaaactttggattctattagttatgattctgatggcagtgaaaaaagtcttgagtcattcgagattcagttatttgagctatggacaacaattgtggggaattctagattagcaaaggttattgggggaaacattaaggagctagcatactatactatagccttgcaacagataactgaagaacaggtgcaaaactggtcacgcgatgctaaccagtatgttgctgatgaggatgacctaacctatagctgtcgtgtgtctggatctcttttgctggaagagctagtaacagcttatgaagattatggaattgactcaattgtggaagcttcacaaatgcgttttcatgaatcacgagaattgaaggaagcgggttctgctgactggtggagactgcatgaagcatcactttttgctttaggttcactgtcagaacagttgtgtgaagcacaggattctggtttgacaaaatacaatgtgcgggatttacttgagcaaatgctaattgacattatgggaacaggggtgcatcagtacccatttctccatgcgcgtgcattttctagtgtggctaaattttcttcactgataagtaaaggggtcagtgaacagtatctatgcaatgcggcccatgcgattgcctcagatgtgccacccccggttaaagttggtgcttgtagggcactggcccaacttttaccagaatctaatcagaatctgattcagccaaacattatgggcatactttcatctcttgttgaccttctgcggcaggcatctgatgaaaccctgcatcttgttctagaaaccctgcaatcagcaatcaaatctggtggagaacaatcaactttaattgagcctgtcatttcccccatcatactggatgtttgggcacagcacattgctgacccgttcatcagcattgatgctgtcgaagtgttagaggctatcaagaatgctcctggatgcttacagccacttgtgtctcgaatccttccaacaattggatccattttagtgaaacccaaggtccagccggatggactggttgcaggttcactggaccttttgacgatggtactcaaaaatgctccagttgctgtggttaaagcagtcttcgacacatgctttgtttctactgttcaaattgttcttgaaagtgatgaccatggagagatgcagaatgcgacagaatgcttggcagcattcatatcaggtggccggcaggagttgcttgtctggggtggtgaacaaggacaaacactcaagatgctacttgatgcagcttcaaggcttttagatccagcgttagaaagttcagtatcactatttgttggaagctttgttttgcaactcattttacaaatacctctacacctgtctcctcacataccggaccttattgctgctattatgagacgtatgcaaacgagcagcattgcaggattgaaaagctcccttattgttataatagccagattagtaagtctatctctctcttacctaaggtacatatgagtgcaccaaatgttgatgggttcatcaatctattgctttctatccctgcacaggggtatgacaattcacttgtttatattatgtcagaatggtcacaactacaaggtgaaattcagggagcctaccagataaaggttacaacgactgcattagctcttctcatatcaactcgtcatcctgagctatccaaggttgaagttcaagggcatcttattaagactagtgcaggtataacgacacgttcaaaagctcgagtgactcctgatcaatggaccaagattcctctcccagttaagatcttctcattgctggcagatactttaactgaaattcaggaacaaattggtgctggtgatgacgatgactccgaagaggataatgactgggaagaagttcagaatggtgatgctagtatatcagatgatatcatacactcagcatcggttccttcaatgactaatccatcagttgaacatttaaatgcaatggccaaggtttttgatgaggatgatgatgatagttatgacgatgatctgacaaaaaacgaccctcttaatgaggtgaagttagcggacttcctaacaaacatctttgctaacttgtgggagaataatcgaccaatatttgagtatctttgccagggcctgtcggattcacagagatcagctgttgaaaaggttttgaggaggtgaagcgttaacttgggatcctgtcttccacctttcgggatataatatatcttcatattagttatcgagtcctgtttgcattgctgtggactggttttcttgctcattatatgttcattggtgtaaactgatacatctctgaagccggtgttatgaggttttgttagtgtaggtttctttatgttctttgtatttaaaatctacaagatgtgagtatttgttgtaccgggtgtggtgatgttgggtattcatgtctgaagaattcccggcttgacttgttcttacgttgaattcctccggagggaccttgattccttggctttattcatcaatttcatgcatgcctatttggaggaacgccacctttggtgtttggcaggagcggttaagctcagggagttgggtcccggggttggagttccttagggctctactagtgtgtgcggtggtcaagtgttttctccttccttggtcaagtgtttgcctcggttcaacccctcactcttggtttggagtacgggtgtagtttttcttttgtaagaaccttcctttttattctatcttaatttaaagatgcagttcttctgtgtatccaagatttttttcatttatggactagttga

SEQ ID NO: 218089 - DNA, 3913 bp, Zea Mays
ctttctcggccgccacctctcgtctcttcttccgtctcctccgcctccccacgcttcgttatataaaccctagactaaagcccccgagtccctccgcccccgctcgccacaaccactgcgcgtgatcccatttcgaaacaaaaaaggaggagcgcgctcgcactcaactccgcggagccccaatcccagcgtcgcctgcggtttagatggaggcgcacggcgaccagcggtggctggtggattgcctgacggctacgctcgacaccgcgcgcgatgtccgcgccttcgccgaggagtcgctccgccaggcctcgcttctccctggatatggagctgcccttacaaaagttacaatcaacaaagagatctcgtttggtttacgacagcttgctgctgtcttactaaagcagtttatcaagcagcattggcaggaagacgaagagaattttgtgccccctgttgtttctgcttcagaaaaggtggtcatacgacagctcctgcttacctcattggatgattctaatgggaaaattcgcactgctattagcatggctgtagcagctattggacagcaagattggcctgaagactggcctgagttacttccggttctcttaaagttaattggcgatcaaagcaatgggaatgaagttcgtggagcattaagatgcctagcccttctatcggatgatctagatgatatgtgtgttccaaagctagtgccagagctattcccatcactgtatagaataatatcatctcctcatctgtatgaaaattctcttcgtgcaaaggcttttgcaatagtccattcatgtatttctatgcttggatcaatgagtggtgtctataagagagatacagctagtctgatgacttcagtgcttgatccactaatagagcaattctccatagttctaaattatccggtgcagtcccaaaatcctgatgactggagcatgcagatggaggtgctcaaatgtttacttcagcttgtccagaactttcctagattacctgaagctaaaatttctgccattcttccagcactgtggcagacatttgtttcgtcattcaagacctatcacctgtcatacattcaaggtgcagaaactttggattctattagttatgattctgatggcagtgaaaaaagtcttgagtcattcgagattcagttatttgagctatggacaacaattgtggggaattctagattagcaaaggttattgggggaaacattaaggagctagcatactatactatagccttgcaacagataactgaagaacaggtgcaaaactggtcacgcgatgctaaccagtatgttgctgatgaggatgacctaacctatagctgtcgtgtgtctggatctcttttgctggaagagctagtaacagcttatgaagattatggaattgactcaattgtggaagcttcacaaatgcgttttcatgaatcacgagaattgaaggaagcgggttctgctgactggtggagactgcatgaagcatcactttttgctttaggttcactgtcagaacagttgtgtgaagcacaggattctggtttgacaaaatacaatgtgcgggatttacttgagcaaatgctaattgacattatgggaacaggggtgcatcagtacccatttctccatgcgcgtgcattttctagtgtggctaaattttcttcactgataagtaaaggggtcagtgaacagtatctatgcaatgcggcccatgcgattgcctcagatgtgccacccccggttaaagttggtgcttgtagggcactggcccaacttttaccagaatctaatcagaatctgattcagccaaacattatgggcatactttcatctcttgttgaccttctgcggcaggcatctgatgaaaccctgcatcttgttctagaaaccctgcaatcagcaatcaaatctggtggagaacaatcaactttaattgagcctgtcatttcccccatcatactggatgtttgggcacagcacattgctgacccgttcatcagcattgatgctgtcgaagtgttagaggctatcaagaatgctcctggatgcttacagccacttgtgtctcgaatccttccaacaattggatccattttagtgaaacccaaggtccagccggatggactggttgcaggttcactggaccttttgacgatggtactcaaaaatgctccagttgctgtggttaaagcagtcttcgacacatgctttgtttctactgttcaaattgttcttgaaagtgatgaccatggagagatgcagaatgcgacagaatgcttggcagcattcatatcaggtggccggcaggagttgcttgtctggggtggtgaacaaggacaaacactcaagatgctacttgatgcagcttcaaggcttttagatccagcgttagaaagttcagtatcactatttgttggaagctttgttttgcaactcattttacaaatacctctacacctgtctcctcacataccggaccttattgctgctattatgagacgtatgcaaacgagcagcattgcaggattgaaaagctcccttattgttataatagccagattagtacatatgagtgcaccaaatgttgatgggttcatcaatctattgctttctatccctgcacaggggtatgacaattcacttgtttatattatgtcagaatggtcacaactacaaggtgaaattcagggagcctaccagataaaggttacaacgactgcattagctcttctcatatcaactcgtcatcctgagctatccaaggttgaagttcaagggcatcttattaagactagtgcaggtataacgacacgttcaaaagctcgagtgactcctgatcaatggaccaagattcctctcccagttaagatcttctcattgctggcagatactttaactgaaattcaggaacaaattggtgctggtgatgacgatgactccgaagaggataatgactgggaagaagttcagaatggtgatgctagtatatcagatgatatcatacactcagcatcggttccttcaatgactaatccatcagttgaacatttaaatgcaatggccaaggtttttgatgaggatgatgatgatagttatgacgatgatctgacaaaaaacgaccctcttaatgaggtgaagttagcggacttcctaacaaacatctttgctaacttgtgggagaataatcgaccaatatttgagtatctttgccagggcctgtcggattcacagagatcagctgttgaaaaggttttgaggaggtgaagcgttaacttgggatcctgtcttccacctttcgggatataatatatcttcatattagttatcgagtcctgtttgcattgctgtggactggttttcttgctcattatatgttcattggtgtaaactgatacatctctgaagccggtgttatgaggttttgttagtgtaggtttctttatgttctttgtatttaaaatctacaagatgtgagtatttgttgtaccgggtgtggtgatgttgggtattcatgtctgaagaattcccggcttgacttgttcttacgttgaattcctccggagggaccttgattccttggctttattcatcaatttcatgcatgcctatttggaggaacgccacctttggtgtttggcaggagcggttaagctcagggagttgggtcccggggttggagttccttagggctctactagtgtgtgcggtggtcaagtgttttctccttccttggtcaagtgtttgcctcggttcaacccctcactcttggtttggagtacgggtgtagtttttcttttgtaagaaccttcctttttattctatcttaatttaaagatgcagttcttctgtgtatccaagatttttttcatttatggactagttga

SEQ ID NO: 218090 - DNA, 2467 bp, Zea Mays
ctcatttgacttctctggtgtcctggacagagaaaactaaagcgatcaagagttgatggttttatttatgacgtcaatgaagttgatttagatgcatcaaaggatgcagacttctcgatcgaaccatgttctaaatcaaagaagaaatatttgaaaaagactgtaaaacccaggcatgaagtagttgctgtaaatgaacgaaacaacacaggaaatattaaaggatcattgtcctccaatggagaaaacaaatcccttcctcttatcacggcaaaacagtatgcttgtcgtgctgcacatttgtcttcccttgtagtttcatggtctccagttgtgtcatcaagtgataaaacatcttgtttattgaggcattggtgcattattgctgttggctctaaatccggaaatctttctttttggaaactacctaagccagaatattacacaatagatgctggcgtggttaccagtgatccaatgctcatcggggttttgcaagctcacaaatcatgtgtcagtgtcatagcttggcaagttctttctgcgggctcttcaaaatcctcgttgcttttagctactggatgctcagatggaagtgttaagatatggttagggaatattgaagggttaaatcaatgtgcaagtggagaagtgccatttgcgttagttgctgtggtcgccactgatttatcatctccagtgtcatcaatctcattagccatacctgcccagtctcaacacgaggtcagtttggcaattggaagagtatctgggtcactagaaatatggatatggaatgcatctagcaacaaaattgagattttcagtgcatggcatgcacatgatcaagtggtaacaggtttacaatgggctatggatggctattgtttattcagctgcagtcaggacaattctgcacgttgttggatctctcacgaaaaccaccttgaagaaatttttatgcattcaaattttccagagctaagggagtcagcagacctatcagaactctctgatcgatgctatggtcttacactagcacctggagaacagatgattgctgtggtccgcagtttggatctgaaccttctgaaccagatgtatcaagtcaggacacaaaaggcggtggttgagttcatttggattggtggccaatttgttggtattccactagacaggagcattgatatttgcagttcacagtccacagacttatcctcaagtaatctcatgtggtggggatccaacattttgtggtcgctgaagaaatacgaaaatgtagaaaagaggcttgtgatatgggatgttgtagctgtgctgcaggagttgaagaaatccgcacctgcctttctggagactctagtgcatagttgggtctcagtgttactttcgggcgacccccagtgtgtttctatcgatgctccatcacgttcaatgcatgacatgatgccctatgtcagcacgcggaagctacacttactgaacataatgtgcagaaaagtaatggtcagcattcacacacatcatggtcctggtgctgaaaacggcaatgaggaaacaactgatttctggagcactcttttggtgaggagcgaaacagagctgcgagagaggctggttggcttcacctttgctgcagtcctgaaacggacagcgtatttgttcaatggtacctctactgaaaattgctggtttcctgttggggttgcccagatggattcttgggtaaccatgaattacgacggacaagtgcatgaccagctgcagtctatcagatcaaagatcaaagatttaggaagcaggatcgacggatactctgacgtagaaagctgcccctactgctcttcgccggtccatttcgagtcgcctgacgtagccatctgtggggaaaggcacacactgccgcggtgcagggcgtccatgatcctgtgctccgttgtgcagcctttgtggcactgcgtgtgctgcggaggcacggtcaacaagctgttgccggagtcgttcttcaccatgcaggcgtccaccatgcatgatgaaggatcgctcgatctgtcagcagcctccgtcccactttgccccttctgtggcatcctcctgcagaggtcgatgccggcgttcctgctctccacctcgccggcatagaggctctctgtggatgctagtaggcatccaccaggtgtagcatgcagtagcaatgtagtactagtaaagtttgttctagtcgatgctgcttacactcagttactcttaccaagtatggctggcagagtgtcggttactggtcattttttaggtcccttttgaatgaatacgatgagttcttttgtttggtttcttttggaccctgacggtggcagattaccaggccaagttcagctatctcgaattgtctcattcgattgttgcggacatgcagttctggcagttccaattggttgttgcggacatgcagtcctgtcagttgact

SEQ ID NO: 218091 - DNA, 3059 bp, Zea Mays
ggcgcctacaccgcttggccaggccgctgtccgccacctgcttgcccaggcacggcggcacggccgcatagacgcccgactcctgagtaaaagcagtcgagcagggcagctcccatctgacggagttctatcttaattgtactgctagatatgcttggacattagtgccatggctcctcaataccaagctgcgaccttgattgcctctccatcttatccaagtgccattgcttggtcaagcgacaatcttgtggctgttgcatctggtcatattgtaactattctgaatccatctgcgcttgatggaccccgtggattggttggactttgtcgcagtgacccttttcctataggactggttaatagagaagatctcttggagccatgtttattgtccacttccttagcgcgtgagactgaaccatgtgcccgatcgatttcatggtctcaacaaggatttgcacctaactctgggtgtttgctggctgtttgcactatggatggtcatgtgaagctttacaggtcaccaatttgggagctatgtgatgaatgggttgaggtcgcagatatatcacagttgctgtttaactactataaacttataaactttggagaggataatggttctcatttgacttctctggtgtcctggacagagaaaactaaagcgatcaagagttgatggttttatttatgacgtcaatgaagttgatttagatgcatcaaaggatgcagacttctcgatcgaaccatgttctaaatcaaagaagaaatatttgaaaaagactgtaaaacccaggcatgaagtagttgctgtaaatgaacgaaacaacacaggaaatattaaaggatcattgtcctccaatggagaaaacaaatcccttcctcttatcacggcaaaacagtatgcttgtcgtgctgcacatttgtcttcccttgtagtttcatggtctccagttgtgtcatcaagtgataaaacatcttgtttattgaggcattggtgcattattgctgttggctctaaatccggaaatctttctttttggaaactacctaagccagaatattacacaatagatgctggcgtggttaccagtgatccaatgctcatcggggttttgcaagctcacaaatcatgtgtcagtgtcatagcttggcaagttctttctgcgggctcttcaaaatcctcgttgcttttagctactggatgctcagatggaagtgttaagatatggttagggaatattgaagggttaaatcaatgtgcaagtggagaagtgccatttgcgttagttgctgtggtcgccactgatttatcatctccagtgtcatcaatctcattagccatacctgcccagtctcaacacgaggtcagtttggcaattggaagagtatctgggtcactagaaatatggatatggaatgcatctagcaacaaaattgagattttcagtgcatggcatgcacatgatcaagtggtttacaatgggctatggatggctattgtttattcagctgcagtcaggacaattctgcacgttgttggatctctcacgaaaaccaccttgaagaaatttttatgcattcaaattttccagagctaagggagtcagcagacctatcagaactctctgatcgatgctatggtcttacactagcacctggagaacagatgattgctgtggtccgcagtttggatctgaaccttctgaaccagatgtatcaagtcaggacacaaaaggcggtggttgagttcatttggattggtggccaatttgttggtattccactagacaggagcattgatatttgcagttcacagtccacagacttatcctcaagtaatctcatgtggtggggatccaacattttgtggtcgctgaagaaatacgaaaatgtagaaaagaggcttgtgatatgggatgttgtagctgtgctgcaggagttgaagaaatccgcacctgcctttctggagactctagtgcatagttgggtctcagtgttactttcgggcgacccccagtgtgtttctatcgatgctccatcacgttcaatgcatgacatgatgccctatgtcagcacgcggaagctacacttactgaacataatgtgcagaaaagtaatggtcagcattcacacacatcatggtcctggtgctgaaaacggcaatgaggaaacaactgatttctggagcactcttttggtgaggagcgaaacagagctgcgagagaggctggttggcttcacctttgctgcagtcctgaaacggacagcgtatttgttcaatggtacctctactgaaaattgctggtttcctgttggggttgcccagatggattcttgggtaaccatgaattacgacggacaagtgcatgaccagctgcagtctatcagatcaaagatcaaagatttaggaagcagctgcccctactgctcttcgccggtccatttcgagtcgcctgacgtagccatctgtggggaaaggcacacactgccgcggtgcagggcgtccatgatcctgtgctccgttgtgcagcctttgtggcactgcgtgtgctgcggaggcacggtcaacaagctgttgccggagtcgttcttcaccatgcaggcgtccaccatgcatgatgaaggatcgctcgatctgtcagcagcctccgtcccactttgccccttctgtggcatcctcctgcagaggtcgatgccggcgttcctgctctccacctcgccggcatagaggctctctgtggatgctagtaggcatccaccaggtgtagcatgcagtagcaatgtagtactagtaaagtttgttctagtcgatgctgcttacactcagttactcttaccaagtatggctggcagagtgtcggttactggtcattttttaggtcccttttgaatgaatacgatgagttcttttgtttggtttcttttggaccctgacggtggcagattaccaggccaagttcagctatctcgaattgtctcattcgattgttgcggacatgcagttctggcagttccaattggttgttgcggacatgcagtcctgtcagttgact

SEQ ID NO: 218092 - DNA, 3139 bp, Zea Mays
gcgaaggcgcctacaccgcttggccaggccgctgtccgccacctgcttgcccaggcacggcggcacggccgcatagacgcccgactcctgagtaaaagcagtcgagcagggcagctcccatctgacggagttctatcttaattgtactgctagatatgcttggacattagtgccatggctcctcaataccaagctgcgaccttgattgcctctccatcttatccaagtgccattgcttggtcaagcgacaatcttgtggctgttgcatctggtcatattgtaactattctgaatccatctgcgcttgatggaccccgtggattggttggactttgtcgcagtgacccttttcctataggactggttaatagagaagatctcttggagccatgtttattgtccacttccttagcgcgtgagactgaaccatgtgcccgatcgatttcatggtctcaacaaggatttgcacctaactctgggtgtttgctggctgtttgcactatggatggtcatgtgaagctttacaggtcaccaatttgggagctatgtgatgaatgggttgaggtcgcagatatatcacagttgctgtttaactactataaacttataaactttggagaggataatggttctcatttgacttctctgaatacaaatactggggagacagaggttttaggatctgcttatgaattgcaagaatctctttatttcaggtgtcctggacagagaaaactaaagcgatcaagagttgatggttttatttatgacgtcaatgaagttgatttagatgcatcaaaggatgcagacttctcgatcgaaccatgttctaaatcaaagaagaaatatttgaaaaagactgtaaaacccaggcatgaagtagttgctgtaaatgaacgaaacaacacaggaaatattaaaggatcattgtcctccaatggagaaaacaaatcccttcctcttatcacggcaaaacagtatgcttgtcgtgctgcacatttgtcttcccttgtagtttcatggtctccagttgtgtcatcaagtgataaaacatcttgtttattgaggcattggtgcattattgctgttggctctaaatccggaaatctttctttttggaaactacctaagccagaatattacacaatagatgctggcgtggttaccagtgatccaatgctcatcggggttttgcaagctcacaaatcatgtgtcagtgtcatagcttggcaagttctttctgcgggctcttcaaaatcctcgttgcttttagctactggatgctcagatggaagtgttaagatatggttagggaatattgaagggttaaatcaatgtgcaagtggagaagtgccatttgcgttagttgctgtggtcgccactgatttatcatctccagtgtcatcaatctcattagccatacctgcccagtctcaacacgaggtcagtttggcaattggaagagtatctgggtcactagaaatatggatatggaatgcatctagcaacaaaattgagattttcagtgcatggcatgcacatgatcaagtggtaacaggtttacaatgggctatggatggctattgtttattcagctgcagtcaggacaattctgcacgttgttggatctctcacgaaaaccaccttgaagaaatttttatgcattcaaattttccagagctaagggagtcagcagacctatcagaactctctgatcgatgctatggtcttacactagcacctggagaacagatgattgctgtggtccgcagtttggatctgaaccttctgaaccagatgtatcaagtcaggacacaaaaggcggtggttgagttcatttggattggtggccaatttgttggtattccactagacaggagcattgatatttgcagttcacagtccacagacttatcctcaagtaatctcatgtggtggggatccaacattttgtggtcgctgaagaaatacgaaaatgtagaaaagaggcttgtgatatgggatgttgtagctgtgctgcaggagttgaagaaatccgcacctgcctttctggagactctagtgcatagttgggtctcagtgttactttcgggcgacccccagtgtgtttctatcgatgctccatcacgttcaatgcatgacatgatgccctatgtcagcacgcggaagctacacttactgaacataatgtgcagaaaagtaatggtcagcattcacacacatcatggtcctggtgctgaaaacggcaatgaggaaacaactgatttctggagcactcttttggtgaggagcgaaacagagctgcgagagaggctggttggcttcacctttgctgcagtcctgaaacggacagcgtatttgttcaatggtacctctactgaaaattgctggtttcctgttggggttgcccagatggattcttgggtaaccatgaattacgacggacaagtgcatgaccagctgcagtctatcagatcaaagatcaaagatttaggaagcagctgcccctactgctcttcgccggtccatttcgagtcgcctgacgtagccatctgtggggaaaggcacacactgccgcggtgcagggcgtccatgatcctgtgctccgttgtgcagcctttgtggcactgcgtgtgctgcggaggcacggtcaacaagctgttgccggagtcgttcttcaccatgcaggcgtccaccatgcatgatgaaggatcgctcgatctgtcagcagcctccgtcccactttgccccttctgtggcatcctcctgcagaggtcgatgccggcgttcctgctctccacctcgccggcatagaggctctctgtggatgctagtaggcatccaccaggtgtagcatgcagtagcaatgtagtactagtaaagtttgttctagtcgatgctgcttacactcagttactcttaccaagtatggctggcagagtgtcggttactggtcattttttaggtcccttttgaatgaatacgatgagttcttttgtttggtttcttttggaccctgacggtggcagattaccaggccaagttcagctatctcgaattgtctcattcgattgttgcggacatgcagttctggcagttccaattggttgttgcggacatgcagtcctgtcagttgact

SEQ ID NO: 218093 - DNA, 3078 bp, Zea Mays
gcgaaggcgcctacaccgcttggccaggccgctgtccgccacctgcttgcccaggcacggcggcacggccgcatagacgcccgactcctgagtaaaagcagtcgagcagggcagctcccatctgacggagttctatcttaattgtactgctagatatgcttggacattagtgccatggctcctcaataccaagctgcgaccttgattgcctctccatcttatccaagtgccattgcttggtcaagcgacaatcttgtggctgttgcatctggtcatattgtaactattctgaatccatctgcgcttgatggaccccgtggattggttggactttgtcgcagtgacccttttcctataggactggttaatagagaagatctcttggagccatgtttattgtccacttccttagcgcgtgagactgaaccatgtgcccgatcgatttcatggtctcaacaaggatttgcacctaactctgggtgtttgctggctgtttgcactatggatggtcatgtgaagctttacaggtcaccaatttgggagctatgtgatgaatgggttgagaagaatacaaatactggggagacagaggttttaggatctgcttatgaattgcaagaatctctttatttcaggtgtcctggacagagaaaactaaagcgatcaagagttgatggttttatttatgacgtcaatgaagttgatttagatgcatcaaaggatgcagacttctcgatcgaaccatgttctaaatcaaagaagaaatatttgaaaaagactgtaaaacccaggcatgaagtagttgctgtaaatgaacgaaacaacacaggaaatattaaaggatcattgtcctccaatggagaaaacaaatcccttcctcttatcacggcaaaacagtatgcttgtcgtgctgcacatttgtcttcccttgtagtttcatggtctccagttgtgtcatcaagtgataaaacatcttgtttattgaggcattggtgcattattgctgttggctctaaatccggaaatctttctttttggaaactacctaagccagaatattacacaatagatgctggcgtggttaccagtgatccaatgctcatcggggttttgcaagctcacaaatcatgtgtcagtgtcatagcttggcaagttctttctgcgggctcttcaaaatcctcgttgcttttagctactggatgctcagatggaagtgttaagatatggttagggaatattgaagggttaaatcaatgtgcaagtggagaagtgccatttgcgttagttgctgtggtcgccactgatttatcatctccagtgtcatcaatctcattagccatacctgcccagtctcaacacgaggtcagtttggcaattggaagagtatctgggtcactagaaatatggatatggaatgcatctagcaacaaaattgagattttcagtgcatggcatgcacatgatcaagtggtttacaatgggctatggatggctattgtttattcagctgcagtcaggacaattctgcacgttgttggatctctcacgaaaaccaccttgaagaaatttttatgcattcaaattttccagagctaagggagtcagcagacctatcagaactctctgatcgatgctatggtcttacactagcacctggagaacagatgattgctgtggtccgcagtttggatctgaaccttctgaaccagatgtatcaagtcaggacacaaaaggcggtggttgagttcatttggattggtggccaatttgttggtattccactagacaggagcattgatatttgcagttcacagtccacagacttatcctcaagtaatctcatgtggtggggatccaacattttgtggtcgctgaagaaatacgaaaatgtagaaaagaggcttgtgatatgggatgttgtagctgtgctgcaggagttgaagaaatccgcacctgcctttctggagactctagtgcatagttgggtctcagtgttactttcgggcgacccccagtgtgtttctatcgatgctccatcacgttcaatgcatgacatgatgccctatgtcagcacgcggaagctacacttactgaacataatgtgcagaaaagtaatggtcagcattcacacacatcatggtcctggtgctgaaaacggcaatgaggaaacaactgatttctggagcactcttttggtgaggagcgaaacagagctgcgagagaggctggttggcttcacctttgctgcagtcctgaaacggacagcgtatttgttcaatggtacctctactgaaaattgctggtttcctgttggggttgcccagatggattcttgggtaaccatgaattacgacggacaagtgcatgaccagctgcagtctatcagatcaaagatcaaagatttaggaagcaggatcgacggatactctgacgtagaaagctgcccctactgctcttcgccggtccatttcgagtcgcctgacgtagccatctgtggggaaaggcacacactgccgcggtgcagggcgtccatgatcctgtgctccgttgtgcagcctttgtggcactgcgtgtgctgcggaggcacggtcaacaagctgttgccggagtcgttcttcaccatgcaggcgtccaccatgcatgatgaaggatcgctcgatctgtcagcagcctccgtcccactttgccccttctgtggcatcctcctgcagaggtcgatgccggcgttcctgctctccacctcgccggcatagaggctctctgtggatgctagtaggcatccaccaggtgtagcatgcagtagcaatgtagtactagtaaagtttgttctagtcgatgctgcttacactcagttactcttaccaagtatggctggcagagtgtcggttactggtcattttttaggtcccttttgaatgaatacgatgagttcttttgtttggtttcttttggaccctgacggtggcagattaccaggccaagttcagctatctcgaattgtctcattcgattgttgcggacatgcagttctggcagttccaattggttgttgcggacatgcagtcctgtcagttgact

SEQ ID NO: 218094 - DNA, 3163 bp, Zea Mays
cgcgaaggcgcctacaccgcttggccaggccgctgtccgccacctgcttgcccaggcacggcggcacggccgcatagacgcccgactcctgagtaaaagcagtcgagcagggcagctcccatctgacggagttctatcttaattgtactgctagatatgcttggacattagtgccatggctcctcaataccaagctgcgaccttgattgcctctccatcttatccaagtgccattgcttggtcaagcgacaatcttgtggctgttgcatctggtcatattgtaactattctgaatccatctgcgcttgatggaccccgtggattggttggactttgtcgcagtgacccttttcctataggactggttaatagagaagatctcttggagccatgtttattgtccacttccttagcgcgtgagactgaaccatgtgcccgatcgatttcatggtctcaacaaggatttgcacctaactctgggtgtttgctggctgtttgcactatggatggtcatgtgaagctttacaggtcaccaatttgggagctatgtgatgaatgggttgaggtcgcagatatatcacagttgctgtttaactactataaacttataaactttggagaggataatggttctcatttgacttctctgaagaatacaaatactggggagacagaggttttaggatctgcttatgaattgcaagaatctctttatttcaggtgtcctggacagagaaaactaaagcgatcaagagttgatggttttatttatgacgtcaatgaagttgatttagatgcatcaaaggatgcagacttctcgatcgaaccatgttctaaatcaaagaagaaatatttgaaaaagactgtaaaacccaggcatgaagtagttgctgtaaatgaacgaaacaacacaggaaatattaaaggatcattgtcctccaatggagaaaacaaatcccttcctcttatcacggcaaaacagtatgcttgtcgtgctgcacatttgtcttcccttgtagtttcatggtctccagttgtgtcatcaagtgataaaacatcttgtttattgaggcattggtgcattattgctgttggctctaaatccggaaatctttctttttggaaactacctaagccagaatattacacaatagatgctggcgtggttaccagtgatccaatgctcatcggggttttgcaagctcacaaatcatgtgtcagtgtcatagcttggcaagttctttctgcgggctcttcaaaatcctcgttgcttttagctactggatgctcagatggaagtgttaagatatggttagggaatattgaagggttaaatcaatgtgcaagtggagaagtgccatttgcgttagttgctgtggtcgccactgatttatcatctccagtgtcatcaatctcattagccatacctgcccagtctcaacacgaggtcagtttggcaattggaagagtatctgggtcactagaaatatggatatggaatgcatctagcaacaaaattgagattttcagtgcatggcatgcacatgatcaagtggtttacaatgggctatggatggctattgtttattcagctgcagtcaggacaattctgcacgttgttggatctctcacgaaaaccaccttgaagaaatttttatgcattcaaattttccagagctaagggagtcagcagacctatcagaactctctgatcgatgctatggtcttacactagcacctggagaacagatgattgctgtggtccgcagtttggatctgaaccttctgaaccagatgtatcaagtcaggacacaaaaggcggtggttgagttcatttggattggtggccaatttgttggtattccactagacaggagcattgatatttgcagttcacagtccacagacttatcctcaagtaatctcatgtggtggggatccaacattttgtggtcgctgaagaaatacgaaaatgtagaaaagaggcttgtgatatgggatgttgtagctgtgctgcaggagttgaagaaatccgcacctgcctttctggagactctagtgcatagttgggtctcagtgttactttcgggcgacccccagtgtgtttctatcgatgctccatcacgttcaatgcatgacatgatgccctatgtcagcacgcggaagctacacttactgaacataatgtgcagaaaagtaatggtcagcattcacacacatcatggtcctggtgctgaaaacggcaatgaggaaacaactgatttctggagcactcttttggtgaggagcgaaacagagctgcgagagaggctggttggcttcacctttgctgcagtcctgaaacggacagcgtatttgttcaatggtacctctactgaaaattgctggtttcctgttggggttgcccagatggattcttgggtaaccatgaattacgacggacaagtgcatgaccagctgcagtctatcagatcaaagatcaaagatttaggaagcaggatcgacggatactctgacgtagaaagctgcccctactgctcttcgccggtccatttcgagtcgcctgacgtagccatctgtggggaaaggcacacactgccgcggtgcagggcgtccatgatcctgtgctccgttgtgcagcctttgtggcactgcgtgtgctgcggaggcacggtcaacaagctgttgccggagtcgttcttcaccatgcaggcgtccaccatgcatgatgaaggatcgctcgatctgtcagcagcctccgtcccactttgccccttctgtggcatcctcctgcagaggtcgatgccggcgttcctgctctccacctcgccggcatagaggctctctgtggatgctagtaggcatccaccaggtgtagcatgcagtagcaatgtagtactagtaaagtttgttctagtcgatgctgcttacactcagttactcttaccaagtatggctggcagagtgtcggttactggtcattttttaggtcccttttgaatgaatacgatgagttcttttgtttggtttcttttggaccctgacggtggcagattaccaggccaagttcagctatctcgaattgtctcattcgattgttgcggacatgcagttctggcagttccaattggttgttgcggacatgcagtcctgtcagttgact

SEQ ID NO: 218095 - DNA, 2033 bp, Zea Mays
gtaaaagcagtcgagcagggcagctcccatctgacggagttctatcttaattgtactgctagatatgcttggacattagtgccatggctcctcaataccaagctgcgaccttgattgcctctccatcttatccaagtgccattgcttggtcaagcgacaatcttgtggctgttgcatctggtcatattgtaactattctgaatccatctgcgcttgatggaccccgtggattggttggactttgtcgcagtgacccttttcctataggactggttaatagagaagatctcttggagccatgtttattgtccacttccttagcgcgtgagactgaaccatgtgcccgatcgatttcatggtctcaacaaggatttgcacctaactctgggtgtttgctggctgtttgcactatggatggtcatgtgaagctttacaggtcaccaatttgggagctatgtgatgaatgggttgaggtcgcagatatatcacagttgctgtttaactactataaacttataaactttggagaggataatggttctcatttgacttctctgaagaatacaaatactggggagacagaggttttaggatctgcttatgaattgcaagaatctctttatttcaggtgtcctggacagagaaaactaaagcgatcaaggtgaatttcgtttctacttcacatttgccaccgagaaaagtttccacatttgaaataataagatgatctaagggagcaccatttagccatcatgtaggatgtcaagtgctgatatgcaaacactttgtacgaattcatccatgaatgtcacgaatttttcattttaatttattttgttgcaagaaggcaacattcttagcaatctttctgacatccatatactgtacctgaatttgttttcattgattttttattgaatatagagttgatggttttatttatgacgtcaatgaagttgatttagatgcatcaaaggatgcagacttctcgatcgaaccatgttctaaatcaaagaagaaatatttgaaaaagactgtaaaacccaggcatgaagtagttgctgtaaatgaacgaaacaacacaggaaatattaaaggatcattgtcctccaatggagaaaacaaatcccttcctcttatcacggcaaaacagtatgcttgtcgtgctgcacatttgtcttcccttgtagtttcatggtctccagttgtgtcatcaagtgataaaacatcttgtttattgaggcattggtgcattattgctgttggctctaaatccggaaatctttctttttggaaactacctaagccagaatattacacaatagatgctggcgtggttaccagtgatccaatgctcatcggggttttgcaagctcacaaatcatgtgtcagtgtcatagcttggcaagttctttctgcgggctcttcaaaatcctcgttgcttttagctactggatgctcagatggaagtgttaagatatggttagggaatattgaagggttaaatcaatgtgcaagtggagaagtgccatttgcgttagttgctgtggtcgccactgatttatcatctccagtgtcatcaatctcattagccatacctgcccagtctcaacacgagcatcaaaacttgttcccgaacattgggttgattgaagccattggattgttgaaagttggagagtctaagtaaaacatcaaatagagatgcgggatgtgtggtgaaaaccactctgagatgaagtaagagttgaccactttaggcagctatgctcagccacggatcactaccttcctttctttcatattctttccattatctttttcttgttagacaaccttgtttttttatcgagcacagaagagaactgtgcatcatttctttaagagagaaaaagaacagtaaaaaggaggtagaagacccccccccccccccccacccccaaacaaaaaacacacacacacaagggaaacaaaagagcagagcagatagccttcgcaggtagcatgacctgcaattaagcgacaaagtgcac

SEQ ID NO: 218096 - DNA, 2300 bp, Zea Mays
ccgccctcccaaatcattagcctccctccccttcgtttgtttgtttgattgattggcgagtaacaactaccactacctgcaaccgcagcaatctcccctcgccaactccgtctcgggttaaccattcgtcattgccgaggaggaggcccggtcgtcgtgtgaggtgttctggatctcggatggcgtcggccaagtcgtcgcggcggcggcgatggcggagtgcagctcgccgacaagcttaagattttcaagaccgacaacttcgatcccgacgcctacgtgcagtccaagtgccagaccatgaacgagaaggaaataagacatctgtgttcctatctccaagacctaaagaaggcttcagctgaagagatgcgtagaagtgtttacgcaaattatgctgcatttatcagaacatctaaggagatatcagaccttgaaggggaactactgtcaattagaaatctgcttaatacacaggcagctttaattcatggtctatctgaaggagttcagatagattcattgacttcaggccctgaaggttctgcagaagacgacatatccaatgttgaagatcaggagccttcagaaatacagaaatggtctgcagatttccctgatatgcttgatgttttgctagctgagcgaagagtggatgaagcactggatgcactggatgaagcagaacgggttgctgttgatgcaaaacgaaaacagactctaactgcagctgaagttttggctttgaaaagatcaatctctgataatcgtcagaggctggcagatcagcttgctgaagctgcttgtcagtcttccactcgtggtattgagcttcgagctgcggcttctgccctcaaaagacttggtgatggcccccgagctcacagcctcttactcagtgcacataatcaaaggcttcaatgcaatatgcaaactatacatccatctagcacttcatacggtggggcatacactgcagcacttgctcaacaagttttttcagtcatagctcaggcactaagtgactctgtggatgtgtttggtgacgagtcatgctacgcgtctgaactagtaacgtgggctaccaagcaggttatgtcctttgcactcctggtaaagaggcatgtgttgtcctcttgtgcagctgctggaggcttgagggcagctgcagaatgtgttcagatatcacttggccattgttctttgctggaagctcgtggtctgtctgtttcatctgtcctcctcaaacaattcaagcccagtctagagcaagcgttagatgctaacttgaggagaattgaggagagtactgctgcactagcagcagctgataactggatactcacatatcccccaactggtattcgtccattaactagattgtctgctgctaatttggcacttcagcctaagctctctagcagcggacaccgtttcaattcaatggttcaggatttctttgaggacgttgcaccactacttagcttgcaattaggtggttcaacaatggatgggatcacacaaattttcaattcatatgtaaacttgcttataaatgctttacctggttccatggatgatgaagctaacttagatggtttaggtaataagattgttagaatggcagagactgaagagcagcagttagctttattagctaatgcatctttactagctgaggagttgctacctagagcagctatgaagttatcatcaataaaccagtctatggatgatttgtgtaaaagaggaacagataaacaaagccgtgtacctgagcaacgtgaatggaaaagaaaactacatcgaatggtggacaggttgagagatagtttttgcaggcagcatgctcttgaacttatatttacagatgaaggtgatactcatctcagcgcagaaatgtatatcagcatggacaatactgttgaagaaccagagtgggttccatctccaattttccaggaactgtatgcaaagttaaacaggatggcaagcattgctgcagaaatgtttgttggtagagaaagatttgctactttactaatgatgcgcctcactgagacagtcatactgtggctctcagaggaccaggccttttgggaagagattgaacagggggctaagcctttaggccccctaggtctacaacaggtcgttttctctctagacatgtacatcaagtcattttggacgtcattgatagagcaatggctgcattttctgctactggaatgaaccctgatagcctgctgccctctgtagcctacagtaattgcaactggcagccagtagtaacctaa

SEQ ID NO: 218097 - DNA, 2049 bp, Zea Mays
caacatttgggttttggccaagaaataagacatctgtgttcctatctccaagacctaaagaaggcttcagctgaagagatgcgtagaagtgtttacgcaaattatgctgcatttatcagaacatctaaggagatatcagaccttgaaggggaactactgtcaattagaaatctgcttaatacacaggcagctttaattcatggtctatctgaaggagttcagatagattcattgacttcaggccctgaaggttctgcagaagacgacatatccaatgttgaagatcaggagccttcagaaatacagaaatggtctgcagatttccctgatatgcttgatgttttgctagctgagcgaagagtggatgaagcactggatgcactggatgaagcagaacgggttgctgttgatgcaaaacgaaaacagactctaactgcagctgaagttttggctttgaaaagatcaatctctgataatcgtcagaggctggcagatcagcttgctgaagctgcttgtcagtcttccactcgtggtattgagcttcgagctgcggcttctgccctcaaaagacttggtgatggcccccgagctcacagcctcttactcagtgcacataatcaaaggcttcaatgcaatatgcaaactatacatccatctagcacttcatacggtggggcatacactgcagcacttgctcaacaagttttttcagtcatagctcaggcactaagtgactctgtggatgtgtttggtgacgagtcatgctacgcgtctgaactagtaacgtgggctaccaagcaggttatgtcctttgcactcctggtaaagaggcatgtgttgtcctcttgtgcagctgctggaggcttgagggcagctgcagaatgtgttcagatatcacttggccattgttctttgctggaagctcgtggtctgtctgtttcatctgtcctcctcaaacaattcaagcccagtctagagcaagcgttagatgctaacttgaggagaattgaggagagtactgctgcactagcagcagctgataactggatactcacatatcccccaactggtattcgtccattaactagattgtctgctgctaatttggcacttcagcctaagctctctagcagcggacaccgtttcaattcaatggttcaggatttctttgaggacgttgcaccactacttagcttgcaattaggtggttcaacaatggatgggatcacacaaattttcaattcatatgtaaacttgcttataaatgctttacctggttccatggatgatgaagctaacttagatggtttaggtaataagattgttagaatggcagagactgaagagcagcagttagctttattagctaatgcatctttactagctgaggagttgctacctagagcagctatgaagttatcatcaataaaccagtctatggatgatttgtgtaaaagaggaacagataaacaaagccgtgtacctgagcaacgtgaatggaaaagaaaactacatcgaatggtggacaggttgagagatagtttttgcaggcagcatgctcttgaacttatatttacagatgaaggtgatactcatctcagcgcagaaatgtatatcagcatggacaatactgttgaagaaccagagtgggttccatctccaattttccaggaactgtatgcaaagttaaacaggatggcaagcattgctgcagaaatgtttgttggtagagaaagatttgctactttactaatgatgcgcctcactgagacagtcatactgtggctctcagaggaccaggccttttgggaagagattgaacagggggctaagcctttaggccccctaggtctacaacagttctacctggacatgcaatttgtcatcatatttgggcaaggtcgttttctctctagacatgtacatcaagtcattttggacgtcattgatagagcaatggctgcattttctgctactggaatgaaccctgatagcctgctgccctctgtagcctacagtaattgcaactggcagccagtagtaacctaa

SEQ ID NO: 218098 - DNA, 1592 bp, Zea Mays
acgcgctcgtcccgtctccttccctcccttggtcagcctcagccaccgaccgttgcaccagctcgcatggcgctccacgccgtctcccccgcggcggtctcctccccgctacgcgccctctcgcgcagcctcccccagcgctcaggctgtggttgtttaccaaagcagtccgtcacgatttgctcctctacgaactttgcgagaaaacttcaggatggaccagtggactttgctgctaggcgactggttcttggacactcggacaagagttctgacgcatgccactattgaagaaattgaagcggagaaatccctcatcgaagaccaagctaaagaaaagatggagaaggcgatcgaaacagtccaaactaacttcaacactgtgaggacagggcgtgcaagcccggccatgcttgaccggatcgaggtcgagtactacggaactccagtgaacttgaagagcattgcacagataagcactccagatgcaacttctcttcttattcaaccatatgacaagtcaagcctcaagcttatcgagaaaactatagttgccgcaaatcttggtgtgacaccaagcaatgacggagaagtgatacgagtgactgtcccaccattgacatctgatcgcagaaaggaattagcaaagacagtagctaaattggctgaagatggcaaggttgctataaggaacataagaagagatgcaatcaaagcttacgataaactacagaaggaaaagaagctttctgaagacaatgtgaaagatttgtcagctgacctacaaaaagtcacggacgagtacatgaaaaatatcgattccatccagaagcagaaggaacaggaactgatgaaaatctagatcttcaacaagctgagctgactgtgtatgactggtgagtaataaccgcctctgtaaagcatgaacccctgcatatatgttgggggaatgtatctggtgctcatcagggatacggtactcacgtgtacatttaacagcagcatcaattttataaagaactgttccacccccttcccatggagggaggggttctttgtaaaattagtttctaccattggatacaaggtagatgtcacaaatttaaatatgcactcctttgaacaccggatacgttctcatatgtcggtgagtccagaacgcagcgatgggaatgctttctgaagcagtgttctctgttcatggttggcagcttggcgccgcgccgccggggactgcgcacgttttgaggtcaggtcaggtgctttgctgcaaccttctggatgcacacatgctgaggcaatgctgttgtgggtcgtttctctttttttttttcgtatttcttttgtaatgctcgtaaataggctctcgctcgtcgccgtgttgtctgactgttgttacgttgtcaatacttgtcgccatctgaatcgaatgtctgaaatgttcctgcccgactctcgtacgcttgtttgtcagaactcagaactctgctgaggttgtcaaagctatttcgcaccagctagcttagctccacgtgctgggctcaagctcaagcagagagtacgtgggctttgatgggcctctcctttggttc

SEQ ID NO: 218099 - DNA, 1273 bp, Zea Mays
acgcgctcgtcccgtctccttccctcccttggtcagcctcagccaccgaccgttgcaccagctcgcatggcgctccacgccgtctcccccgcggcggtctcctccccgctacgcgccctctcgcgcagcctcccccagcgctcaggctgtggttgtttaccaaagcagtccgtcacgatttgctcctctacgaactttgcgagaaaacttcaggatggaccagtggactttgctgctaggcgactggttcttggacactcggacaagaggcgagtggttacagatatagaaattgaagcggagaaatccctcatcgaagaccaagctaaagaaaagatggagaaggcgatcgaaacagtccaaactaacttcaacactgtgaggacagggcgtgcaagcccggccatgcttgaccggatcgaggtcgagtactacggaactccagtgaacttgaagagcattgcacagataagcactccagatgcaacttctcttcttattcaaccatatgacaagtcaagcctcaagcttatcgagaaaactatagttgccgcaaatcttggtgtgacaccaagcaatgacggagaagtgatacgagtgactgtcccaccattgacatctgatcgcagaaaggaattagcaaagacagtagctaaattggctgaagatggcaaggttgctataaggaacataagaagagatgcaatcaaagcttacgataaactacagaaggaaaagaagctttctgaagacaatgtgaaagatttgtcagctgacctacaaaaagtcacggacgagtacatgaaaaatatcgattccatccagaagcagaaggaacaggaactgatgaaaatctagatcttcaacaagctgagctgactgtgtatgactgcttggcgccgcgccgccggggactgcgcacgttttgaggtcaggtcaggtgctttgctgcaaccttctggatgcacacatgctgaggcaatgctgttgtgggtcgtttctctttttttttttcgtatttcttttgtaatgctcgtaaataggctctcgctcgtcgccgtgttgtctgactgttgttacgttgtcaatacttgtcgccatctgaatcgaatgtctgaaatgttcctgcccgactctcgtacgcttgtttgtcagaactcagaactctgctgaggttgtcaaagctatttcgcaccagctagcttagctccacgtgctgggctcaagctcaagcagagagtacgtgggctttgatgggcctctcctttggttc

SEQ ID NO: 218100 - DNA, 1650 bp, Zea Mays
gtaaccttgttgcttttcgttctgaaaaaccttcttgaacgtcgcggcgcgggaggaagaatggcgtcgtggttggagcagctgcagcgcgagctcgccgcccgcggcctcacagtcgcctccatccccggcaagggaaggggtctcatcgctacttgcaccttcttcccaggggatgtcattctcaatcaggaaccttacgcttctacacctaacaagattttagttggatcgagctgtgaccattgtttcacctctggcaacctgaggaagtgctctatgtgtcgagttacttggtactgcagcagcaactgtcagaaagaagaatggaaactacatcagctggagtgtagagcaatggcagcacttacagaggatagaaagaagatgcttactcctacaattcggttgatggttcggctggcactcaaaaggaaattacaaaatgagaagatggccaatcttgtgagcctgattcttccttttattgagcttgaccttaaggaaattgcacaaactttttctaagtttgcctgcaatgcgcataccatatgtgaccctgaacttaggcctcttgggactggactgtaccctgtcatatccattattaaccacagttgtgtaccaaatgcagttttgatatttgatggtaggacagcatatgttcgtgcattgcaaccgataaataaagatgaagaggtatctataagctacattgagactgcgacagtcaccaagaagagaaacaatgatctgaaacagtacttcttcacctgcacatgtccacgctgtgtaaagggttttgatgaggatgcactacttgaggggttcaggtgcaagaaccaagcatgtgatggctttttgctgcccaactcaggtaaaaaggcttatacatgccaaaaatgtggtgcttctagagatgtggaagagataaaaaatatgagaagcgaaatactacagttatcggataaagcatcttcatttctttcatcaggaaataaggctgaagcaggttctatctacaagataatcgaacagttagagagaaatctgtaccatgctttctcaactactttgctgcacacgtgcgaaacactattgaagatatatctggaattacaagattggtggactgcgttgacatactgtagattgacaattcctgtttatgaaagagtttatccaccttttcatccgatgattggattacaattctatacttgtggaaagcttgaatggttgcttgagttcacagaggatgcactaaaatctttaaccagagcagcagatatacttaaagtaacacatggcgtaaaatcccagttcatgaaagagctctttggcaagttagaggaagcaagagctgaagtttcgtttagactatcctcgagacatggacatgatgagtaattttcataactgcaggccagttatgatggaaaataatatattgaaattatgtttctactgttgagatcatatttcaaggtacaataaaaaatgtggagactttgtaggcaaagaattagcactgttgtaaaacgattatgtgccgacacaaaataggccctaatttgttgtataaaaaatacaattttgaatttaattgtatatcatgtggtaggttgaactccataaactctcttatac

SEQ ID NO: 218101 - DNA, 1629 bp, Zea Mays
gtaaccttgttgcttttcgttctgaaaaaccttcttgaacgtcgcggcgcgggaggaagaatggcgtcgtggttggagcagctgcagcgcgagctcgccgcccgcggcctcacagtcgcctccatccccggcaagggaaggggtctcatcgctacttgcaccttcttcccaggggatgtcattctcaatcaggaaccttacgcttctacacctaacaagattttagttggatcgagctgtgaccattgtttcacctctggcaacctgaggaagtgctctatgtgtcgagttacttggtactgcagcagcaactgtcagaaagaagaatggaaactacatcagctggagtgtagagcaatggcagcacttacagaggatagaaagaagatgcttactcctacaattcggttgatggttcggctggcactcaaaaggaaattacaaaatgagaaggtcattccatcctcaagtatagataactacaatctggttgatggcttggagtctcatatatcgaaggttgatgaaaatcaacttgtgctctatgctcagatggccaatcttgtgagcctgattcttccttttattgagcttgaccttaaggaaattgcacaaactttttctaagtttgcctgcaatgcgcataccatatgtgaccctgaacttaggcctcttgggactggactgtaccctgtcatatccattattaaccacagttgtgtaccaaatgcagttttgatatttgatggtaggacagcatatgttcgtgcattgcaaccgataaataaagatgaagaggtatctataagctacattgagactgcgacagtcaccaagaagagaaacaatgatctgaaacagtacttcttcacctgcacatgtccacgctgtgtaaagggttttgatgaggatgcactacttgaggggttcaggtgcaagaaccaagcatgtgatggctttttgctgcccaactcagataaggctgaagcaggttctatctacaagataatcgaacagttagagagaaatctgtaccatgctttctcaactactttgctgcacacgtgcgaaacactattgaagatatatctggaattacaagattggtggactgcgttgacatactgtagattgacaattcctgtttatgaaagagtttatccaccttttcatccgatgattggattacaattctatacttgtggaaagcttgaatggttgcttgagttcacagaggatgcactaaaatctttaaccagagcagcagatatacttaaagtaacacatggcgtaaaatcccagttcatgaaagagctctttggcaagttagaggaagcaagagctgaagtttcgtttagactatcctcgagacatggacatgatgagtaattttcataactgcaggccagttatgatggaaaataatatattgaaattatgtttctactgttgagatcatatttcaaggtacaataaaaaatgtggagactttgtaggcaaagaattagcactgttgtaaaacgattatgtgccgacacaaaataggccctaatttgttgtataaaaaatacaattttgaatttaattgtatatcatgtggtaggttgaactccataaactctcttatac

SEQ ID NO: 218102 - DNA, 1743 bp, Zea Mays
gtaaccttgttgcttttcgttctgaaaaaccttcttgaacgtcgcggcgcgggaggaagaatggcgtcgtggttggagcagctgcagcgcgagctcgccgcccgcggcctcacagtcgcctccatccccggcaagggaaggggtctcatcgctacttgcaccttcttcccaggggatgtcattctcaatcaggaaccttacgcttctacacctaacaagattttagttggatcgagctgtgaccattgtttcacctctggcaacctgaggaagtgctctatgtgtcgagttacttggtactgcagcagcaactgtcagaaagaagaatggaaactacatcagctggagtgtagagcaatggcagcacttacagaggatagaaagaagatgcttactcctacaattcggttgatggttcggctggcactcaaaaggaaattacaaaatgagaaggtcattccatcctcaagtatagataactacaatctggttgatggcttggagtctcatatatcgaaggttgatgaaaatcaacttgtgctctatgctcagatggccaatcttgtgagcctgattcttccttttattgagcttgaccttaaggaaattgcacaaactttttctaagtttgcctgcaatgcgcataccatatgtgaccctgaacttaggcctcttgggactggactgtaccctgtcatatccattattaaccacagttgtgtaccaaatgcagttttgatatttgatggtaggacagcatatgttcgtgcattgcaaccgataaataaagatgaagaggtatctataagctacattgagactgcgacagtcaccaagaagagaaacaatgatctgaaacagtacttcttcacctgcacatgtccacgctgtggttttgatgaggatgcactacttgaggggttcaggtgcaagaaccaagcatgtgatggctttttgctgcccaactcaggtaaaaaggcttatacatgccaaaaatgtggtgcttctagagatgtggaagagataaaaaatatgagaagcgaaatactacagttatcggataaagcatcttcatttctttcatcaggaaataaggctgaagcaggttctatctacaagataatcgaacagttagagagaaatctgtaccatgctttctcaactactttgctgcacacgtgcgaaacactattgaagatatatctggaattacaagattggtggactgcgttgacatactgtagattgacaattcctgtttatgaaagagtttatccaccttttcatccgatgattggattacaattctatacttgtggaaagcttgaatggttgcttgagttcacagaggatgcactaaaatctttaaccagagcagcagatatacttaaagtaacacatggcgtaaaatcccagttcatgaaagagctctttggcaagttagaggaagcaagagctgaagtttcgtttagactatcctcgagacatggacatgatgagtaattttcataactgcaggccagttatgatggaaaataatatattgaaattatgtttctactgttgagatcatatttcaaggtacaataaaaaatgtggagactttgtaggcaaagaattagcactgttgtaaaacgattatgtgccgacacaaaataggccctaatttgttgtataaaaaatacaattttgaatttaattgtatatcatgtggtaggttgaactccataaactctcttatac

SEQ ID NO: 218103 - DNA, 2401 bp, Zea Mays
ccacatccgacatcaagccctccaactgagtcgtcggagcggacgtcgagtcgtcgatacgcctgaaccccagctttccactcgcctcgctcgcccctttcgcgtccaccgaccccgaccccgaccccgatccccgccggtgcttcgccaccccgatccccaccgcgcgatggcggagccggctccggctcccccggtgaccgcgccgctggtggggctgctgtacgacgagcggatgtgcgcgcacgcgacgcccaacggggaggaacacccggagaaccccgagcggctgcgctccatctggcgcaagctcaacgccgcgggcgtcgcgtccaggtgtgtggcccttaaggcaaaggaagctgaggacaagtatatagcttctgttcacagcaagaggcatataaagctgatgaaggaaattagctcaacaatatatgatgccagcaggaacaagattgctaggaaattcaattccatttacttgaataagggttcctcggaatctgctgttcttgcagctggttctgtcatagaggtagctgagaaagttgctgcaggtgagttaagttctgctattgctctagtcagacctccaggccaccatgcagaacatgatgaggctatgggattttgcctcttcaacaatgtggcagttgcagctaattatctcttaaacgagaggcctgatttaggtatcaagaagatattgattgtcgattgggatgttcaccatggaaatggcacacagaaaatgttttacgatgatcctcgtgtattgttcttctcagttcacagatttgattatggaagcttctatccttctgaaggggatgcttctcattgtttcatcggggaagaagctggtaaagggtataacatcaatgttccctgggagcatggcaagtgtggtgatgctgattatattgctgcatgggaccatgtactgcttcctgtcactaaagtttttgatcctgatataattctggtatcagcggggtttgatgcagcattgggtgatcctctcggtgggtgctgcattacaccaaatggatatgcactgctactaacaaagttgttaggatttgctcaaggaaggatagtgatggcccttgaaggaggttataaccttaggtccatagcgaactcagtttgtgcttgtgcaaaagttctcttgggagacaaattcacattcaacactccagagatgcaaccatttgaatctacatggagagtaatacaagcggtacgcaatgaattgaagacatgctggcctgttctgagtagcaagttgccagaaaatgtatcattgaggattaagcctgcaccaagcgaggctgagggtatgaatataccatgctgcggatcacgtgacacaagctcaccaaaaggaaccgtgtggaagactgtacctcacaggttgcttttcggtagatcgtctaccccttgttggggaactggtggtgtggcttttctcaaccctgagataaactacaatgagaagtcgtatgtctgcatgtacaaaataacgttggagcagttcaatgacatcttgtttcaggagaatcgtttagtgctggaggatggcaaagacggaaacactgtgtatcctgactctcctttgattggttcatctgaaatcaagtttatatctacaaacagagctgttcatcttgaacctattaaggatagctggtactccaatgtactttatcttgggaatgaggatgaagttccaattctaactatgacgtgccccgcatcagatattgagaggtataaatctggtgagctgcgtttagcacctccatcagagacgtatgcggccactctgataaagggactagtggaaggcaagcaaatggatgcggacggagctgccagctacatcaacgctgctgctgcaagagccttgtgaaggcggcttcagcgtgtgcttttgtacagccagtaaggagtagcaaggatacactatctgttagcgtggcgacaccaggaaaccttcattgtccgcaaatggagaacttggatccaatttgaattgggaagcatgattcgagcttgccctagcttgattactggtgaacggtgatctcccctggctggttgattctgggagaaacactagctgtgtcggggtggagcaacactagttggcggttgcaacaggtgctctcactgcactggtatcgtgcttgtctgacataccgtagtatttgcatggcatgctggtgatggtatttgtgcaattactgcattatgttctgttgcctggagttattgttgtttggccgccaccgctgctgctgctgggcagcgtaatatccactcgtcgaagcggattggcactccgccttcttggccggccgcgcctggtgcccaagcggcagctctggccagt

SEQ ID NO: 218104 - DNA, 2448 bp, Zea Mays
cagacctactcccccataaatataaacgggtgtgtggcccttaaggcaaaggaagctgaggacaagtatatagcttctgttcacagcaagaggcatataaagctgatgaaggaaattagctcaacaatatatgatgccagcaggaacaagattgctaggaaattcaattccatttacttgaataagggttcctcggaatctgctgttcttgcagctggttctgtcatagaggtagctgagaaagttgctgcaggtgagttaagttctgctattgctctagtcagacctccaggccaccatgcagaacatgatgaggctatgggattttgcctcttcaacaatgtggcagttgcagctaattatctcttaaacgagaggcctgatttaggtatcaagaagatattgattgtcgattgggatgttcaccatggaaatggcacacagaaaatgttttacgatgatcctcgtgtattgttcttctcagttcacagatttgattatggaagcttctatccttctgaaggggatgcttctcattgtttcatcggggaagaagctggtaaagggtataacatcaatgttccctgggagcatggcaagtgtggtgatgctgattatattgctgcatgggaccatgtactgcttcctgtcactaaagtttttgatcctgatataattctggtatcagcggggtttgatgcagcattgggtgatcctctcggtgggtgctgcattacaccaaatggatatgcactgctactaacaaagttgttaggatttgctcaaggaaggatagtgatggcccttgaaggaggttataaccttaggtccatagcgaactcagtttgtgcttgtgcaaaagttctcttgggagacaaattcacattcaacactccagagatgcaaccatttgaatctacatggagagtaatacaagcggtacgcaatgaattgaagacatgctggcctgttctgagtagcaagttgccagaaaatgtatcattgaggattaagcctgcaccaagcgagctctacgcttctgattctgaatctgatagtgaagatgttgatgagctccttggcactgttgcatctgtcagtgttattgaagctactggtgttgctataagtgaacacctctcaaagatgaaacttgatgatgacagccttgcagtgaagactaactcaagttgctcagcagcagaacagcatccagttgattcagtaaaagtacataacaatgcatctgttgtgctgaccaaaaaaatatctgatttatctcttgagtggcgatcagatttatcgaaaactgatgtctggtatgccagttttggatcaaacatgtggagaccaagatttctatgttatattcaaggagggaaggctgagggtatgaatataccatgctgcggatcacgtgacacaagctcaccaaaaggaaccgtgtggaagactgtacctcacaggttgcttttcggtagatcgtctaccccttgttggggaactggtggtgtggcttttctcaaccctgagataaactacaatgagaagtcgtatgtctgcatgtacaaaataacgttggagcagttcaatgacatcttgtttcaggagaatcgtttagtgctggaggatggcaaagacggaaacactgtgtatcctgactctcctttgattggttcatctgaaatcaagtttatatctacaaacagagctgttcatcttgaacctattaaggatagctggtactccaatgtactttatcttgggaatgaggatgaagttccaattctaactatgacgtgccccgcatcagatattgagaggtataaatctggtgagctgcgtttagcacctccatcagagacgtatgcggccactctgataaagggactagtggaaggcaagcaaatggatgcggacggagctgccagctacatcaacgctgctgctgcaagagccttgtgaaggcggcttcagcgtgtgcttttgtacagccagtaaggagtagcaaggatacactatctgttagcgtggcgacaccaggaaaccttcattgtccgcaaatggagaacttggatccaatttgaattgggaagcatgattcgagcttgccctagcttgattactggtgaacggtgatctcccctggctggttgattctgggagaaacactagctgtgtcggggtggagcaacactagttggcggttgcaacaggtgctctcactgcactggtatcgtgcttgtctgacataccgtagtatttgcatggcatgctggtgatggtatttgtgcaattactgcattatgttctgttgcctggagttattgttgtttggccgccaccgctgctgctgctgggcagcgtaatatccactcgtcgaagcggattggcactccgccttcttggccggccgcgcctggtgcccaagcggcagctctggccagt

SEQ ID NO: 218105 - DNA, 1808 bp, Zea Mays
gcattgaactgtggatacactatattagaatctatactattggagttctcgtgcatctttgtgcattgggtgatcctctcggtgggtgctgcattacaccaaatggatatgcactgctactaacaaagttgttaggatttgctcaaggaaggatagtgatggcccttgaaggaggttataaccttaggtccatagcgaactcagtttgtgcttgtgcaaaagttctcttgggagacaaattcacattcaacactccagagatgcaaccatttgaatctacatggagagtaatacaagcggtacgcaatgaattgaagacatgctggcctgttctgagtagcaagttgccagaaaatgtatcattgaggattaagcctgcaccaagcgagctctacgcttctgattctgaatctgatagtgaagatgttgatgagctccttggcactgttgcatctgtcagtgttattgaagctactggtgttgctataagtgaacacctctcaaagatgaaacttgatgatgacagccttgcagtgaagactaactcaagttgctcagcagcagaacagcatccagttgattcagtaaaagtacataacaatgcatctgttgtgctgaccaaaaaaatatctgatttatctcttgagtggcgatcagatttatcgaaaactgatgtctggtatgccagttttggatcaaacatgtggagaccaagatttctatgttatattcaaggagggaaggctgagggtatgaatataccatgctgcggatcacgtgacacaagctcaccaaaaggaaccgtgtggaagactgtacctcacaggttgcttttcggtagatcgtctaccccttgttggggaactggtggtgtggcttttctcaaccctgagataaactacaatgagaagtcgtatgtctgcatgtacaaaataacgttggagcagttcaatgacatcttgtttcaggagaatcgtttagtgctggaggatggcaaagacggaaacactgtgtatcctgactctcctttgattggttcatctgaaatcaagtttatatctacaaacagagctgttcatcttgaacctattaaggatagctggtactccaatgtactttatcttgggaatgaggatgaagttccaattctaactatgacgtgccccgcatcagatattgagaggtataaatctggtgagctgcgtttagcacctccatcagagacgtatgcggccactctgataaagggactagtggaaggcaagcaaatggatgcggacggagctgccagctacatcaacgctgctgctgcaagagccttgtgaaggcggcttcagcgtgtgcttttgtacagccagtaaggagtagcaaggatacactatctgttagcgtggcgacaccaggaaaccttcattgtccgcaaatggagaacttggatccaatttgaattgggaagcatgattcgagcttgccctagcttgattactggtgaacggtgatctcccctggctggttgattctgggagaaacactagctgtgtcggggtggagcaacactagttggcggttgcaacaggtgctctcactgcactggtatcgtgcttgtctgacataccgtagtatttgcatggcatgctggtgatggtatttgtgcaattactgcattatgttctgttgcctggagttattgttgtttggccgccaccgctgctgctgctgggcagcgtaatatccactcgtcgaagcggattggcactccgccttcttggccggccgcgcctggtgcccaagcggcagctctggccagt

SEQ ID NO: 218106 - DNA, 756 bp, Zea Mays
gtattcaagttcatctggtcttagaaatgattgtatgatcaggatagctggtactccaatgtactttatcttgggaatgaggatgaagttccaattctaactatgacgtgccccgcatcagatattgagaggtataaatctggtgagctgcgtttagcacctccatcagagacgtatgcggccactctgataaagggactagtggaaggcaagcaaatggatgcggacggagctgccagctacatcaacgctgctgctgcaagagccttgtgaaggcggcttcagcgtgtgcttttgtacagccagtaaggagtagcaaggatacactatctgttagcgtggcgacaccaggaaaccttcattgtccgcaaatggagaacttggatccaatttgaattgggaagcatgattcgagcttgccctagcttgattactggtgaacggtgatctcccctggctggttgattctgggagaaacactagctgtgtcggggtggagcaacactagttggcggttgcaacaggtgctctcactgcactggtatcgtgcttgtctgacataccgtagtatttgcatggcatgctggtgatggtatttgtgcaattactgcattatgttctgttgcctggagttattgttgtttggccgccaccgctgctgctgctgggcagcgtaatatccactcgtcgaagcggattggcactccgccttcttggccggccgcgcctggtgcccaagcggcagctctggccagt

SEQ ID NO: 218107 - DNA, 2765 bp, Zea Mays
attgataaaataaatattacactttatcttagccaaaagctcgaaaatgtatgtgttaaaaacgagtccgaccctctttttttacagctcaattgattgttcgtcctctttagctaacaaggtgatattatataggagcgttatgctacatgtggtttggtgtcgtatagaaattatgtggtttatcacggtccatatttggtttaacggcctatatatagtataacggcatattagtagatgagaagtagggaaaatgaacagactatacgttttgcatgtggtgtatgatttcgcatatggtgtatctctactactccttaagaaaggagcgtaggcgtgcacaccaacccgttctgcctccgcttcgatcatggggtggtcgcgctttcgtcgccgccatcaacggtgtcgctatctcctccctatccggcgtccgcgatgctcgccacccctcctcccccacgcgtcggacgctcgccatgctcgcctccctcccctccggtccgcctcgctccccttccgcccttccgtcgcgtgcgcttggaaaaaggtccagcagccccaaactccccagcggggccatctcgcccacctctccctgcacgccggatccccgccgtccccaccatcgcctgtgttgggtccgacccagtccgctcatgcctcgacgcgcagttctcgcacaccgtccgcggcggcgtccgcctcgcgccggtctcgcacaccgtcccgcagcggatccaatcacgcctcctcaccctccgctgcctcctcccatcccctctcccatcgaatccgcgattccgcgtccacagtggataccgtgagctcgcccccgcctccatggctccatcctccgctcgcgattcccccgtgcccgttggaagggggtcacggatcctcacacggttcctgctgcactacctccgcgctgccacgcgcaggccgccgacgcttgagcgggagggcaccgcgctcgctggcctcgcggacacggccgtccacggcatggcgctcgtcgagggcacgacgttctcgtgccggggcctcttctgagtgctccggatcgtgtcggcggtggggctgagcagggagtgccgtcacaagctggagcggctcatggggctgatgctggtccaggccacgctcgacgacctccttgtctccagcgacgacggcggcgacgtgtacattgtcaacctggtcatgaggctggtcagggtgttcgtggcctccaaagaggaggcagacgcgccgtcggagaggatgcggaaggtggggcgcctggtcgacaagtacctcgacgaaatctcgcaggaccaggggctgaaggtgtccaagttcctcaccgtctccgagagcctgccggactcggccagggactgctacgacggcgtgtaccgggtgctggacatctacctcaagatggcatatcccaaaaccgctctacttacaaggatggcaaacatgctcatccaaatgagtcttcagaacccccttactttggctcatccgtgagcattttacagaagcaaccagccaaggaaccccatatggatggggacaatccgaatggctctgctaacagagatgattagcggcaaggtatcattgcatcaatttgtgtattatcttgagtatacatggatgtgcatagcctgtgtggattttgttcgccaaagctttggccccagtacgtgtttgttacctccaccaatattctgtatgcattcatcatattgaagctaaaaagtcattgtgcttttgtagacctgtgtttttgtagaacacttctctattttatccattcagaacattgttttatatttatccattcagaacttgtgtttttgccaaacacttttctattttgcagtgagcttaactgtcagacttttgatagacacttatccaatatactaatgccccaactactcttgaagttaaaaagtcattggatggagtaagcatccccaagtaatgcattttacgaatttactaattgctattgtggattatcaagcctgtgatatgaaattacttatgcgacttactctccttcatatatttccttcccgaacataacgacgcctgccacatgtccatagcctttttgcacataaagatttgaatatcaaattttagtcgcaccacaacaggtactagaaagtggtataggcagagtcttaccacttcatgttgataagtgtcatatgctacattttgcggcttcctattgataatgcttcgaagataatattaactaagtatcccttgtgaattgtgacactgttttgttgctttaaaagggattacaccaatcctgacctttttgtcaaccaaataataattgaggggattgtgcagcccacgataggccggagcctaagagcagcgtgcttttaggattagttgagatttgagaacatgcaatatgctgtgacggtggatgttctgcaaactgtgttttctgtttttggcgctgttaaaaaaatcaccatgtttgagaagaacagtggattgcaggctctaatataatattcagcttgagaaggacctcaaggaacaacaagttgtgcaaggtgcagtggaaaacactttaggggctggttctatcaatttgctattagagaatccaataccaaaggcaaattctctttccaacacaccaaatccatatgaacaaggcatctcgattattgggcgaacactatcgaaattcgatgaagatgatctgattccatgtttcggatttggagatg

SEQ ID NO: 218108 - DNA, 2091 bp, Zea Mays
attgataaaataaatattacactttatcttagccaaaagctcgaaaatgtatgtgttaaaaacgagtccgaccctctttttttacagctcaattgattgttcgtcctctttagctaacaaggtgatattatataggagcgttatgctacatgtggtttggtgtcgtatagaaattatgtggtttatcacggtccatatttggtttaacggcctatatatagtataacggcatattagtagatgagaagtagggaaaatgaacagactatacgttttgcatgtggtgtatgatttcgcatatggtgtatctctactactccttaagaaaggagcgtaggcgtgcacaccaacccgttctgcctccgcttcgatcatggggtggtcgcgctttcgtcgccgccatcaacggtgtcgctatctcctccctatccggcgtccgcgatgctcgccacccctcctcccccacgcgtcggacgctcgccatgctcgcctccctcccctccggtccgcctcgctccccttccgcccttccgtcgcgtgcgcttggaaaaaggtccagcagccccaaactccccagcggggccatctcgcccacctctccctgcacgccggatccccgccgtccccaccatcgcctgtgttgggtccgacccagtccgctcatgcctcgacgcgcagttctcgcacaccgtccgcggcggcgtccgcctcgcgccggtctcgcacaccgtcccgcagcggatccaatcacgcctcctcaccctccgctgcctcctcccatcccctctcccatcgaatccgcgattccgcgtccacagtggataccgtgagctcgcccccgcctccatggctccatcctccgctcgcgattcccccgtgcccgttggaagggggtcacggatcctcacacggttcctgctgcactacctccgcgctgccacgcgcaggccgccgacgcttgagcgggagggcaccgcgctcgctggcctcgcggacacggccgtccacggcatggcgctcgtcgagggcacgacgttctcgtgccggggcctcttctgagtgctccggatcgtgtcggcggtggggctgagcagggagtgccgtcacaagctggagcggctcatggggctgatgctggtccaggccacgctcgacgacctccttgtctccagcgacgacggcggcgacgtgtacattgtcaacctggtcatgaggctggtcagggtgttcgtggcctccaaagaggaggcagacgcgccgtcggagaggatgcggaaggtggggcgcctggtcgacaagtacctcgacgaaatctcgcaggaccaggggctgaaggtgtccaagttcctcaccgtctccgagagcctgccggactcggccagggactgctacgacggcgtgtaccgggtgctggacatctacctcaagatggcatatcccaaaaccgctctacttacaaggatggcaaacatgctcatccaaatgagtcttcagaacccccttactttggctcatccgtgagcattttacagaagcaaccagccaaggaaccccatatggatggggacaatccgaatggctctgctaacagagatgattagcggcaaggtatcattgcatcaatttgtgtattatcttgagtatacatggatgtgcatagcctgtgtggattttgttcgccaaagctttggccccacccacgataggccggagcctaagagcagcgtgcttttaggattagttgagatttgagaacatgcaatatgctgtgacggtggatgttctgcaaactgtgttttctgtttttggcgctgttaaaaaaatcaccatgtttgagaagaacagtggattgcaggctctaatataatattcagcttgagaaggacctcaaggaacaacaagttgtgcaaggtgcagtggaaaacactttaggggctggttctatcaatttgctattagagaatccaataccaaaggcaaattctctttccaacacaccaaatccatatgaacaaggcatctcgattattgggcgaacactatcgaaattcgatgaagatgatctgattccatgtttcggatttggagatg

SEQ ID NO: 218109 - DNA, 2044 bp, Zea Mays
ccgcactctgcccacgacctcgacctcctcccccatgaccacgacctcaaccgctctgccagctccgccacttacgcacgcacgacctcaacctcgcctgattcagcgcatagaagagcgtgtggcgtcgaggtcgagcgtgcggcgccgaggtcgagcgtgcgtcaccgagggagaggaaaaccactgagcgttatttcctaagcctcctgcttgatgtctccaccgtccctcaacgcaattgccgccgcccgggatgcgctccacccccgcccgctaatcgtccccttgcaactgccgccgcggccgccaatcggcccccaagaaccaaaggttcgagctccgcaggtggcaagctccttcttcatccacgccctccctccgccttgagaaccagaggaaaccagagtcaccaaaactacgggcaagactgtacgaagggaaacatagtactcccacgaagaagaagtgctgcaactgcaggaactccaaatgtttgaagttgtttcgagtggcttcgcatcgcaggctgccaagcccaccgagaagcaggtcaaggttgcaaacatactacttgctcatgttggatgacatggaagcagtaggttgaccaaggcaacagctgagatagctcgtgcagccaaccgatcatggcttgctcttcttatcgatactgcatgtgaccagttttcatttatcctacaaagtctgtttgatctcgctatggagcacaaccgcaataaggactcacaattcaatacacatggcatccatcaaattacagaagaagttatttgtaggtatctaagaagttggagttgcatcaaaaggcgagggtgtcgctaagttccaacatgcattaaaattctatttttgtgatataatattttattaaataatttgtgtgtctttgcaacgcactagcattacgcaaactcaaatagaaatttatatattatagtcattcttgtcattccgtatctatgttttattctaatttttaactttcgtggcaacgcacgggcacatacctattatttcatgatgtgtgatctctttctaagacttctatttccatctgaactacaatatatgatatttatcatcatttttttctagatccatctttcatcccatccactctctgaaaatctaagcttgaatgcccaatactaaattttgcattatggaagcagtttgaacaaagaacaatctctgtcactttgtgtggcccaccagtaaaaataagacaacttgttagtctgattatatgcttctttgattaagagggctatgttcaaataaaacattccagtaaactggacaaagtatcttgaactggaagaagcctttcaaaaatacacatcctttttctacagttcaataactcacaacttcaattctggatgcaagtgtttattattctacactctgctgattcagacctgaaaatgtttgcagttgcaaagagaatatcaaataaaatacttgttgagcttaagtttcttcatcaaatcatttttgggaggcttcaaatgcactataccatggtttggtgaaaggagagaagatgaaggtgctggtacatcacaatcaatactagaagcaagacagacgcacccactattgttactgaaggtcaagatgcacaagatgatctgacaacaccacatgcacctaagatgtccaaaaagattactccaaggaagaaaagcaattgaactaccttatgtatattcaaaattagtgtattatccactatgttgtgtcaagaactatgacttcaaaattagtgtgtcatgaactatgctgtttcatgaactatgtcttcaaattctgggaagtggagtgcagtttcttgtataattttgaacatgtccatgtgcacctactctgctaattgtgtcatggactgacatgaattatgtcatgaactctgccaactgtgtcatgaactgggaagtggagtgcaccaaccgtgtcatgaacatgtccagtttactgcaactctgccaatgataataaaatgtccagtttgtaggac

SEQ ID NO: 218110 - DNA, 2661 bp, Zea Mays
ccgcactctgcccacgacctcgacctcctcccccatgaccacgacctcaaccgctctgccagctccgccacttacgcacgcacgacctcaacctcgcctgattcagcgcatagaagagcgtgtggcgtcgaggtcgagcgtgcggcgccgaggtcgagcgtgcgtcaccgagggagaggaaaaccactgagcgttatttcctaagcctcctgcttgatgtctccaccgtccctcaacgcaattgccgccgcccgggatgcgctccacccccgcccgctaatcgtccccttgcaactgccgccgcggccgccaatcggcccccaagaaccaaaggttcgagctccgcaggtggcaagctccttcttcatccacgccctccctccgccttgagaaccagaggaaaccagagtcaccaaaactacgggcaagactgtacgaagggaaacatagtactcccacgaagaagaagtgctgcaactgcaggaactccaaatgtttgaagttgtttcgagtggcttcgcatcgcaggctgccaagcccaccgagaagcaggttgcaaacatactacttgctcatgttggatgacatggaagcagtaggttgaccaaggcaacagctgagatagctcgtgcagccaaccgatcatggcttgctcttcttatcgatactgcatgtgaccagttttcatttatcctacaaagtctgtttgatctcgctatggagcacaaccgcaataaggactcacaatgtaagagcttgaccttgctattcatgctggttcgtcttgctttacatttgcctgggtatcatttggttcacagtgaagtaaattataattgtttagtaaatatttcattttattttgttctacatgttcatcaaaaggtaggcaaggattgcattttctctactgcatatttagtcatctgcattccccaacttatgctgtaaattttgctaccaaattatgctgtagattttgctttgcgatatctcagtaattgcaggagcataatttggtagctaatgtgttattgttttggtcttcccaatgacgactgttgttggcacttggcaggatgattttgtacgtcgtttgtgccaaactgttttagttttgaccaggtttatatgaaaaatagttacacaagtacattgtaaaagttattttataattaatatagtgatactaatttagtgttctacatgttgatattttttactatactttagtcaaccctaacttcgttttgacccaagaattttggaatggacagaatggttctttcattaatccattgttttgttttatatgttgatcagcccatcacaatgcctttgacagtgactttgctttttaaggtgcagtcaatacacatggcatccatcaaattacagaagaagttatttgtaggtatctaagaagttggagttgcatcaaaaggcgagggtgtcgctaagttccaacatgcattaaaattctatttttgtgatataatattttattaaataatttgtgtgtctttgcaacgcactagcattacgcaaactcaaatagaaatttatatattatagtcattcttgtcattccgtatctatgttttattctaatttttaactttcgtggcaacgcacgggcacatacctattatttcatgatgtgtgatctctttctaagacttctatttccatctgaactacaatatatgatatttatcatcatttttttctagatccatctttcatcccatccactctctgaaaatctaagcttgaatgcccaatactaaattttgcattatggaagcagtttgaacaaagaacaatctctgtcactttgtgtggcccaccagtaaaaataagacaacttgttagtctgattatatgcttctttgattaagagggctatgttcaaataaaacattccagtaaactggacaaagtatcttgaactggaagaagcctttcaaaaatacacatcctttttctacagttcaataactcacaacttcaattctggatgcaagtgtttattattctacactctgctgattcagacctgaaaatgtttgcagttgcaaagagaatatcaaataaaatacttgttgagcttaagtttcttcatcaaatcatttttgggaggcttcaaatgtagcactataccatggtttggtgaaaggagagaagatgaaggtgctggtacatcacaatcaatactagaagcaagacagacgcacccactattgttactgaaggtcaagatgcacaagatgatctgacaacaccacatgcacctaagatgtccaaaaagattactccaaggaagaaaagcaattgaactaccttatgtatattcaaaattagtgtattatccactatgttgtgtcaagaactatgacttcaaaattagtgtgtcatgaactatgctgtttcatgaactatgtcttcaaattctgggaagtggagtgcagtttcttgtataattttgaacatgtccatgtgcacctactctgctaattgtgtcatggactgacatgaattatgtcatgaactctgccaactgtgtcatgaactgggaagtggagtgcaccaaccgtgtcatgaacatgtccagtttactgcaactctgccaatgataataaaatgtccagtttgtaggac

SEQ ID NO: 218111 - DNA, 1337 bp, Zea Mays
ccgcactctgcccacgacctcgacctcctcccccatgaccacgacctcaaccgctctgccagctccgccacttacgcacgcacgacctcaacctcgcctgattcagcgcatagaagagcgtgtggcgtcgaggtcgagcgtgcggcgccgaggtcgagcgtgcgtcaccgagggagaggaaaaccactgagcgttatttcctaagcctcctgcttgatgtctccaccgtccctcaacgcaattgccgccgcccgggatgcgctccacccccgcccgctaatcgtccccttgcaactgccgccgcggccgccaatcggcccccaagaaccaaaggttcgagctccgcaggtggcaagctccttcttcatccacgccctccctccgccttgagaaccagaggaaaccagagtcaccaaaactacgggcaagactgtacgaagggaaacatagtactcccacgaagaagaagtgctgcaactgcaggaactccaaatgtttgaagttgtttcgagtggcttcgcatcgcaggctgccaagcccaccgagaagcaggtcaaggttgcaaacatactacttgctcatgttggatgacatggaagcagtaggttgaccaaggcaacagctgagatagctcgtgcagccaaccgatcatggcttgctcttcttatcgatactgcatgtgaccagttttcatttatcctacaaagtctgtttgatctcgctatggagcacaaccgcaataaggactcacaatttgcaaagagaatatcaaataaaatacttgttgagcttaagtttcttcatcaaatcatttttgggaggcttcaaatgcactataccatggtttggtgaaaggagagaagatgaaggtgctggtacatcacaatcaatactagaagcaagacagacgcacccactattgttactgaaggtcaagatgcacaagatgatctgacaacaccacatgcacctaagatgtccaaaaagattactccaaggaagaaaagcaattgaactaccttatgtatattcaaaattagtgtattatccactatgttgtgtcaagaactatgacttcaaaattagtgtgtcatgaactatgctgtttcatgaactatgtcttcaaattctgggaagtggagtgcagtttcttgtataattttgaacatgtccatgtgcacctactctgctaattgtgtcatggactgacatgaattatgtcatgaactctgccaactgtgtcatgaactgggaagtggagtgcaccaaccgtgtcatgaacatgtccagtttactgcaactctgccaatgataataaaatgtccagtttgtaggac

SEQ ID NO: 218112 - DNA, 2413 bp, Zea Mays
ccgcactctgcccacgacctcgacctcctcccccatgaccacgacctcaaccgctctgccagctccgccacttacgcacgcacgacctcaacctcgcctgattcagcgcatagaagagcgtgtggcgtcgaggtcgagcgtgcggcgccgaggtcgagcgtgcgtcaccgagggagaggaaaaccactgagcgttatttcctaagcctcctgcttgatgtctccaccgtccctcaacgcaattgccgccgcccgggatgcgctccacccccgcccgctaatcgtccccttgcaactgccgccgcggccgccaatcggcccccaagaaccaaaggttcgagctccgcaggtggcaagctccttcttcatccacgccctccctccgccttgagaaccagaggaaaccagagtcaccaaaactacgggcaagactgtacgaagggaaacatagtactcccacgaagaagaagtgctgcaactgcaggaactccaaatgtttgaagttgtttcgagtggcttcgcatcgcaggctgccaagcccaccgagaagcaggtcaaggttgcaaacatactacttgctcatgttggatgacatggaagcagtaggttgaccaaggcaacagctgagatagctcgtgcagccaaccgatcatggcttgctcttcttatcgatactgcatgtgaccagttttcatttatcctacaaagtctgtttgatctcgctatggagcacaaccgcaataaggactcacaatgtaagagcttgaccttgctattcatgctggttcgtcttgctttacatttgcctgggtatcatttggttcacagtgaagtaaattataattgtttagtaaatatttcattttattttgttctacatgttcatcaaaaggtaggcaaggattgcattttctctactgcatatttagtcatctgcattccccaacttatgctgtaaattttgctaccaaattatgctgtagattttgctttgcgatatctcagtaattgcaggagcataatttggtagctaatgtgttattgttttggtcttcccaatgacgactgttgttggcacttggcaggatgattttgtacgtcgtttgtgccaaactgttttagttttgaccaggtttatatgaaaaatagttacacaagtacattgtaaaagttattttataattaatatagtgatactaatttagtgttctacatgttgatattttttactatactttagtcaaccctaacttcgttttgacccaagaattttggaatggacagaatggttctttcattaatccattgttttgttttatatgttgatcagcccatcacaatgcctttgacagtgactttgctttttaaggtgcagtcaatacacatggcatccatcaaattacagaagaagttatttgtagttgcaaagagaatatcaaataaaatacttgttgagcttaagtttcttcatcaaatcatttttgggaggcttcaaatgttctatgaacacaatgataataagatgagctacccagcaatggctcaacttctgtcaaatatactctactacaagagaaattgattgggataacatctctactactatgaagaatctaaggggtaggatgtctcccctggttcaattgaaagtagatgagaagagtaaggaacacaaaaaatacctaaggaggatgttgtatacctaaaagttggattgcaacttgagtatgataggggaactacgatggggaacagttggagtaatgatgctggtactaaaattttttctatgcctgatgatgagtacatatcagaagatacaattgttgtttatgataagctaaatcctgtaaatccaaacttctatttaacatgactctctttatttccactttacatgaaaagtagcactataccatggtttggtgaaaggagagaagatgaaggtgctggtacatcacaatcaatactagaagcaagacagacgcacccactattgttactgaaggtcaagatgcacaagatgatctgacaacaccacatgcacctaagatgtccaaaaagattactccaaggaagaaaagcaattgaactaccttatgtatattcaaaattagtgtattatccactatgttgtgtcaagaactatgacttcaaaattagtgtgtcatgaactatgctgtttcatgaactatgtcttcaaattctgggaagtggagtgcagtttcttgtataattttgaacatgtccatgtgcacctactctgctaattgtgtcatggactgacatgaattatgtcatgaactctgccaactgtgtcatgaactgggaagtggagtgcaccaaccgtgtcatgaacatgtccagtttactgcaactctgccaatgataataaaatgtccagtttgtaggac

SEQ ID NO: 218113 - DNA, 2050 bp, Zea Mays
ccgcactctgcccacgacctcgacctcctcccccatgaccacgacctcaaccgctctgccagctccgccacttacgcacgcacgacctcaacctcgcctgattcagcgcatagaagagcgtgtggcgtcgaggtcgagcgtgcggcgccgaggtcgagcgtgcgtcaccgagggagaggaaaaccactgagcgttatttcctaagcctcctgcttgatgtctccaccgtccctcaacgcaattgccgccgcccgggatgcgctccacccccgcccgctaatcgtccccttgcaactgccgccgcggccgccaatcggcccccaagaaccaaaggttcgagctccgcaggtggcaagctccttcttcatccacgccctccctccgccttgagaaccagaggaaaccagagtcaccaaaactacgggcaagactgtacgaagggaaacatagtactcccacgaagaagaagtgctgcaactgcaggaactccaaatgtttgaagttgtttcgagtggcttcgcatcgcaggctgccaagcccaccgagaagcaggtcaaggttgcaaacatactacttgctcatgttggatgacatggaagcagtaggttgaccaaggcaacagctgagatagctcgtgcagccaaccgatcatggcttgctcttcttatcgatactgcatgtgaccagttttcatttatcctacaaagtctgtttgatctcgctatggagcacaaccgcaataaggactcacaatgtgcagtcaatacacatggcatccatcaaattacagaagaagttatttgtaggtatctaagaagttggagttgcatcaaaaggcgagggtgtcgctaagttccaacatgcattaaaattctatttttgtgatataatattttattaaataatttgtgtgtctttgcaacgcactagcattacgcaaactcaaatagaaatttatatattatagtcattcttgtcattccgtatctatgttttattctaatttttaactttcgtggcaacgcacgggcacatacctattatttcatgatgtgtgatctctttctaagacttctatttccatctgaactacaatatatgatatttatcatcatttttttctagatccatctttcatcccatccactctctgaaaatctaagcttgaatgcccaatactaaattttgcattatggaagcagtttgaacaaagaacaatctctgtcactttgtgtggcccaccagtaaaaataagacaacttgttagtctgattatatgcttctttgattaagagggctatgttcaaataaaacattccagtaaactggacaaagtatcttgaactggaagaagcctttcaaaaatacacatcctttttctacagttcaataactcacaacttcaattctggatgcaagtgtttattattctacactctgctgattcagacctgaaaatgtttgcagttgcaaagagaatatcaaataaaatacttgttgagcttaagtttcttcatcaaatcatttttgggaggcttcaaatgcactataccatggtttggtgaaaggagagaagatgaaggtgctggtacatcacaatcaatactagaagcaagacagacgcacccactattgttactgaaggtcaagatgcacaagatgatctgacaacaccacatgcacctaagatgtccaaaaagattactccaaggaagaaaagcaattgaactaccttatgtatattcaaaattagtgtattatccactatgttgtgtcaagaactatgacttcaaaattagtgtgtcatgaactatgctgtttcatgaactatgtcttcaaattctgggaagtggagtgcagtttcttgtataattttgaacatgtccatgtgcacctactctgctaattgtgtcatggactgacatgaattatgtcatgaactctgccaactgtgtcatgaactgggaagtggagtgcaccaaccgtgtcatgaacatgtccagtttactgcaactctgccaatgataataaaatgtccagtttgtaggac

SEQ ID NO: 218114 - DNA, 2622 bp, Zea Mays
ccgcactctgcccacgacctcgacctcctcccccatgaccacgacctcaaccgctctgccagctccgccacttacgcacgcacgacctcaacctcgcctgattcagcgcatagaagagcgtgtggcgtcgaggtcgagcgtgcggcgccgaggtcgagcgtgcgtcaccgagggagaggaaaaccactgagcgttatttcctaagcctcctgcttgatgtctccaccgtccctcaacgcaattgccgccgcccgggatgcgctccacccccgcccgctaatcgtccccttgcaactgccgccgcggccgccaatcggcccccaagaaccaaaggttcgagctccgcaggtggcaagctccttcttcatccacgccctccctccgccttgagaaccagaggaaaccagagtcaccaaaactacgggcaagactgtacgaagggaaacatagtactcccacgaagaagaagtgctgcaactgcaggaactccaaatgtttgaagttgtttcgagtggcttcgcatcgcaggctgccaagcccaccgagaagcaggtcaaggtacttgccttatccgtgatgagcgaatgtagttgtaaaatgggaaacgttgctgttttattatatggccgggagtggtgaactggtgataggctactcttgtcagtgcatatgtattatttgcaacccatggattatgcaactatttctctattatatttatattttttccctgatagtgccttcatgttttgtgttgtgctttcacatcttgatattatgtgcctcagtcaaagtttcatatttgtttctattgttttcttggttcaaatcatgcgttgcttgatggtgctgctgatttagctctagagatatgggggaaactacggaggaggaacaaatacatagtgatattgccagctggcctggcattaatatgtctgtaaaacctaccaactccagccttaagttgtatggtggtgcagcttttgggagacatgcatgatttcattgtgtaatgtatttaatgaaatgcccacaagtccagtctcaagggagaaggtagtctttagcctgcaaccatacacatacacaatttattacgagaattgcttatataattatgtcattaggttgcaaacatactacttgctcatgttggatgacatggaagcagtaggttgaccaaggcaacagctgagatagctcgtgcagccaaccgatcatggcttgctcttcttatcgatactgcatgtgaccagttttcatttatcctacaaagtctgtttgatctcgctatggagcacaaccgcaataaggactcacaatgtgcagtcaatacacatggcatccatcaaattacagaagaagttatttgtaggtatctaagaagttggagttgcatcaaaaggcgagggtgtcgctaagttccaacatgcattaaaattctatttttgtgatataatattttattaaataatttgtgtgtctttgcaacgcactagcattacgcaaactcaaatagaaatttatatattatagtcattcttgtcattccgtatctatgttttattctaatttttaactttcgtggcaacgcacgggcacatacctattatttcatgatgtgtgatctctttctaagacttctatttccatctgaactacaatatatgatatttatcatcatttttttctagatccatctttcatcccatccactctctgaaaatctaagcttgaatgcccaatactaaattttgcattatggaagcagtttgaacaaagaacaatctctgtcactttgtgtggcccaccagtaaaaataagacaacttgttagtctgattatatgcttctttgattaagagggctatgttcaaataaaacattccagtaaactggacaaagtatcttgaactggaagaagcctttcaaaaatacacatcctttttctacagttcaataactcacaacttcaattctggatgcaagtgtttattattctacactctgctgattcagacctgaaaatgtttgcagttgcaaagagaatatcaaataaaatacttgttgagcttaagtttcttcatcaaatcatttttgggaggcttcaaatgcactataccatggtttggtgaaaggagagaagatgaaggtgctggtacatcacaatcaatactagaagcaagacagacgcacccactattgttactgaaggtcaagatgcacaagatgatctgacaacaccacatgcacctaagatgtccaaaaagattactccaaggaagaaaagcaattgaactaccttatgtatattcaaaattagtgtattatccactatgttgtgtcaagaactatgacttcaaaattagtgtgtcatgaactatgctgtttcatgaactatgtcttcaaattctgggaagtggagtgcagtttcttgtataattttgaacatgtccatgtgcacctactctgctaattgtgtcatggactgacatgaattatgtcatgaactctgccaactgtgtcatgaactgggaagtggagtgcaccaaccgtgtcatgaacatgtccagtttactgcaactctgccaatgataataaaatgtccagtttgtaggac

SEQ ID NO: 218115 - DNA, 3612 bp, Zea Mays
ccgcactctgcccacgacctcgacctcctcccccatgaccacgacctcaaccgctctgccagctccgccacttacgcacgcacgacctcaacctcgcctgattcagcgcatagaagagcgtgtggcgtcgaggtcgagcgtgcggcgccgaggtcgagcgtgcgtcaccgagggagaggaaaaccactgagcgttatttcctaagcctcctgcttgatgtctccaccgtccctcaacgcaattgccgccgcccgggatgcgctccacccccgcccgctaatcgtccccttgcaactgccgccgcggccgccaatcggcccccaagaaccaaaggttcgagctccgcaggtggcaagctccttcttcatccacgccctccctccgccttgagaaccagaggaaaccagagtcaccaaaactacgggcaagactgtacgaagggaaacatagtactcccacgaagaagaagtgctgcaactgcaggaactccaaatgtttgaagttgtttcgagtggcttcgcatcgcaggctgccaagcccaccgagaagcaggtcaaggttgcaaacatactacttgctcatgttggatgacatggaagcagtaggttgaccaaggcaacagctgagatagctcgtgcagccaaccgatcatggcttgctcttcttatcgatactgcatgtgaccagttttcatttatcctacaaagtctgtttgatctcgctatggagcacaaccgcaataaggactcacaatgtaagagcttgaccttgctattcatgctggttcgtcttgctttacatttgcctgggtatcatttggttcacagtgaagtaaattataattgtttagtaaatatttcattttattttgttctacatgttcatcaaaaggtaggcaaggattgcattttctctactgcatatttagtcatctgcattccccaacttatgctgtaaattttgctaccaaattatgctgtagattttgctttgcgatatctcagtaattgcaggagcataatttggtagctaatgtgttattgttttggtcttcccaatgacgactgttgttggcacttggcaggatgattttgtacgtcgtttgtgccaaactgttttagttttgaccaggtttatatgaaaaatagttacacaagtacattgtaaaagttattttataattaatatagtgatactaatttagtgttctacatgttgatattttttactatactttagtcaaccctaacttcgttttgacccaagaattttggaatggacagaatggttctttcattaatccattgttttgttttatatgttgatcagcccatcacaatgcctttgacagtgactttgctttttaaggtgcagtcaatacacatggcatccatcaaattacagaagaagttatttgtaggtatctaagaagttggagttgcatcaaaaggcgagggtgtcgctaagttccaacatgcattaaaattctatttttgtgatataatattttattaaataatttgtgtgtctttgcaacgcactagcattacgcaaactcaaatagaaatttatatattatagtcattcttgtcattccgtatctatgttttattctaatttttaactttcgtggcaacgcacgggcacatacctattatttcatgatgtgtgatctctttctaagacttctatttccatctgaactacaatatatgatatttatcatcatttttttctagatccatctttcatcccatccactctctgaaaatctaagcttgaatgcccaatactaaattttgcattatggaagcagtttgaacaaagaacaatctctgtcactttgtgtggcccaccagtaaaaataagacaacttgttagtctgattatatgcttctttgattaagagggctatgttcaaataaaacattccagtaaactggacaaagtatcttgaactggaagaagcctttcaaaaatacacatcctttttctacagttcaataactcacaacttcaattctggatgcaagtgtttattattctacactctgctgattcagacctgaaaatgtttgcagttgcaaagagaatatcaaataaaatacttgttgagcttaagtttcttcatcaaatcatttttgggaggcttcaaatggtaattagtatgtaaatattgtgcttttgcaatggatgatgcatatttctgttatggtttttctagacttcagttaatcatttcatccgagtcatttaaaagcatagtaaaatgtgtgatgggatcatgattgatatttgtaaagaatacgttcttatatttaatgattccttgtatgtgggtcatgaatacataattcacttgacctaaatgacatttttagtaacttgtattattcatgcctgcggaccaaacaatgtaatgtatttttgttggctttgttgattatgtttgtctgattcaaaccaaacagtgtaatgtaatgtaatgaggaagtactactggagccaaaccaaacaaatagtgtattttgttctcttgtaattgttactgtcggcaaaggtcccattaccatacgtatataaacactgacagactgttatttcaagaccatacttcctcatctgcaagtcactaggatctgttggcatagctatgtattattcaaggaccaccatttcctaaatggtgttttcaatagctatgtattatttagttttgatcatgactacattgataatatagctagctagaataatgtgagtaagtgttgtgtcaccttgaaccatattagtataggtttgtgatgcttttttgcattttcaccttttcagttctatgaacacaatgataataagatgagctacccagcaatggctcaacttctgtcaaatatactctactacaagagaaattgattgggataacatctctactactatgaagaatctaaggggtaggatgtctcccctggttcaattgaaagtagatgagaagagtaaggaacacaaaaaatacctaaggaggatgttgtatacctaaaagttggattgcaacttgagtatgataggggaactacgatggggaacagttggagtaatgatgctgcactataccatggtttggtgaaaggagagaagatgaaggtgctggtacatcacaatcaatactagaagcaagacagacgcacccactattgttactgaaggtcaagatgcacaagatgatctgacaacaccacatgcacctaagatgtccaaaaagattactccaaggaagaaaagcaattgaactaccttatgtatattcaaaattagtgtattatccactatgttgtgtcaagaactatgacttcaaaattagtgtgtcatgaactatgctgtttcatgaactatgtcttcaaattctgggaagtggagtgcagtttcttgtataattttgaacatgtccatgtgcacctactctgctaattgtgtcatggactgacatgaattatgtcatgaactctgccaactgtgtcatgaactgggaagtggagtgcaccaaccgtgtcatgaacatgtccagtttactgcaactctgccaatgataataaaatgtccagtttgtaggac

SEQ ID NO: 218116 - DNA, 3239 bp, Zea Mays
ccgcactctgcccacgacctcgacctcctcccccatgaccacgacctcaaccgctctgccagctccgccacttacgcacgcacgacctcaacctcgcctgattcagcgcatagaagagcgtgtggcgtcgaggtcgagcgtgcggcgccgaggtcgagcgtgcgtcaccgagggagaggaaaaccactgagcgttatttcctaagcctcctgcttgatgtctccaccgtccctcaacgcaattgccgccgcccgggatgcgctccacccccgcccgctaatcgtccccttgcaactgccgccgcggccgccaatcggcccccaagaaccaaaggttcgagctccgcaggtggcaagctccttcttcatccacgccctccctccgccttgagaaccagaggaaaccagagtcaccaaaactacgggcaagactgtacgaagggaaacatagtactcccacgaagaagaagtgctgcaactgcaggaactccaaatgtttgaagttgtttcgagtggcttcgcatcgcaggctgccaagcccaccgagaagcaggtcaaggtacttgccttatccgtgatgagcgaatgtagttgtaaaatgggaaacgttgctgttttattatatggccgggagtggtgaactggtgataggctactcttgtcagtgcatatgtattatttgcaacccatggattatgcaactatttctctattatatttatattttttccctgatagtgccttcatgttttgtgttgtgctttcacatcttgatattatgtgcctcagtcaaagtttcatatttgtttctattgttttcttggttcaaatcatgcgttgcttgatggtgctgctgatttagctctagagatatgggggaaactacggaggaggaacaaatacatagtgatattgccagctggcctggcattaatatgtctgtaaaacctaccaactccagccttaagttgtatggtggtgcagcttttgggagacatgcatgatttcattgtgtaatgtatttaatgaaatgcccacaagtccagtctcaagggagaaggtagtctttagcctgcaaccatacacatacacaatttattacgagaattgcttatataattatgtcattaggttgcaaacatactacttgctcatgttggatgacatggaagcagtaggttgaccaaggcaacagctgagatagctcgtgcagccaaccgatcatggcttgctcttcttatcgatactgcatgtgaccagttttcatttatcctacaaagtctgtttgatctcgctatggagcacaaccgcaataaggactcacaatgtaagagcttgaccttgctattcatgctggttcgtcttgctttacatttgcctgggtatcatttggttcacagtgaagtaaattataattgtttagtaaatatttcattttattttgttctacatgttcatcaaaaggtaggcaaggattgcattttctctactgcatatttagtcatctgcattccccaacttatgctgtaaattttgctaccaaattatgctgtagattttgctttgcgatatctcagtaattgcaggagcataatttggtagctaatgtgttattgttttggtcttcccaatgacgactgttgttggcacttggcaggatgattttgtacgtcgtttgtgccaaactgttttagttttgaccaggtttatatgaaaaatagttacacaagtacattgtaaaagttattttataattaatatagtgatactaatttagtgttctacatgttgatattttttactatactttagtcaaccctaacttcgttttgacccaagaattttggaatggacagaatggttctttcattaatccattgttttgttttatatgttgatcagcccatcacaatgcctttgacagtgactttgctttttaaggtgcagtcaatacacatggcatccatcaaattacagaagaagttatttgtaggtatctaagaagttggagttgcatcaaaaggcgagggtgtcgctaagttccaacatgcattaaaattctatttttgtgatataatattttattaaataatttgtgtgtctttgcaacgcactagcattacgcaaactcaaatagaaatttatatattatagtcattcttgtcattccgtatctatgttttattctaatttttaactttcgtggcaacgcacgggcacatacctattatttcatgatgtgtgatctctttctaagacttctatttccatctgaactacaatatatgatatttatcatcatttttttctagatccatctttcatcccatccactctctgaaaatctaagcttgaatgcccaatactaaattttgcattatggaagcagtttgaacaaagaacaatctctgtcactttgtgtggcccaccagtaaaaataagacaacttgttagtctgattatatgcttctttgattaagagggctatgttcaaataaaacattccagtaaactggacaaagtatcttgaactggaagaagcctttcaaaaatacacatcctttttctacagttcaataactcacaacttcaattctggatgcaagtgtttattattctacactctgctgattcagacctgaaaatgtttgcagttgcaaagagaatatcaaataaaatacttgttgagcttaagtttcttcatcaaatcatttttgggaggcttcaaatgtagcactataccatggtttggtgaaaggagagaagatgaaggtgctggtacatcacaatcaatactagaagcaagacagacgcacccactattgttactgaaggtcaagatgcacaagatgatctgacaacaccacatgcacctaagatgtccaaaaagattactccaaggaagaaaagcaattgaactaccttatgtatattcaaaattagtgtattatccactatgttgtgtcaagaactatgacttcaaaattagtgtgtcatgaactatgctgtttcatgaactatgtcttcaaattctgggaagtggagtgcagtttcttgtataattttgaacatgtccatgtgcacctactctgctaattgtgtcatggactgacatgaattatgtcatgaactctgccaactgtgtcatgaactgggaagtggagtgcaccaaccgtgtcatgaacatgtccagtttactgcaactctgccaatgataataaaatgtccagtttgtaggac

SEQ ID NO: 218117 - DNA, 1064 bp, Zea Mays
ccgcactctgcccacgacctcgacctcctcccccatgaccacgacctcaaccgctctgccagctccgccacttacgcacgcacgacctcaacctcgcctgattcagcgcatagaagagcgtgtggcgtcgaggtcgagcgtgcggcgccgaggtcgagcgtgcgtcaccgagggagaggaaaaccactgagcgttatttcctaagcctcctgcttgatgtctccaccgtccctcaacgcaattgccgccgcccgggatgcgctccacccccgcccgctaatcgtccccttgcaactgccgccgcggccgccaatcggcccccaagaaccaaaggttcgagctccgcaggtggcaagctccttcttcatccacgccctccctccgccttgagaaccagaggaaaccagagtcaccaaaactacgggcaagactgtacgaagggaaacatagtactcccacgaagaagaagtgctgcaactgcaggaactccaaatgtttgaagttgtttcgagtggcttcgcatcgcaggctgccaagcccaccgagaagcaggtcaagcactataccatggtttggtgaaaggagagaagatgaaggtgctggtacatcacaatcaatactagaagcaagacagacgcacccactattgttactgaaggtcaagatgcacaagatgatctgacaacaccacatgcacctaagatgtccaaaaagattactccaaggaagaaaagcaattgaactaccttatgtatattcaaaattagtgtattatccactatgttgtgtcaagaactatgacttcaaaattagtgtgtcatgaactatgctgtttcatgaactatgtcttcaaattctgggaagtggagtgcagtttcttgtataattttgaacatgtccatgtgcacctactctgctaattgtgtcatggactgacatgaattatgtcatgaactctgccaactgtgtcatgaactgggaagtggagtgcaccaaccgtgtcatgaacatgtccagtttactgcaactctgccaatgataataaaatgtccagtttgtaggac

SEQ ID NO: 218118 - DNA, 2938 bp, Zea Mays
ccgcactctgcccacgacctcgacctcctcccccatgaccacgacctcaaccgctctgccagctccgccacttacgcacgcacgacctcaacctcgcctgattcagcgcatagaagagcgtgtggcgtcgaggtcgagcgtgcggcgccgaggtcgagcgtgcgtcaccgagggagaggaaaaccactgagcgttatttcctaagcctcctgcttgatgtctccaccgtccctcaacgcaattgccgccgcccgggatgcgctccacccccgcccgctaatcgtccccttgcaactgccgccgcggccgccaatcggcccccaagaaccaaaggttcgagctccgcaggtggcaagctccttcttcatccacgccctccctccgccttgagaaccagaggaaaccagagtcaccaaaactacgggcaagactgtacgaagggaaacatagtactcccacgaagaagaagtgctgcaactgcaggaactccaaatgtttgaagttgtttcgagtggcttcgcatcgcaggctgccaagcccaccgagaagcaggtcaaggttgcaaacatactacttgctcatgttggatgacatggaagcagtaggttgaccaaggcaacagctgagatagctcgtgcagccaaccgatcatggcttgctcttcttatcgatactgcatgtgaccagttttcatttatcctacaaagtctgtttgatctcgctatggagcacaaccgcaataaggactcacaatgtaagagcttgaccttgctattcatgctggttcgtcttgctttacatttgcctgggtatcatttggttcacagtgaagtaaattataattgtttagtaaatatttcattttattttgttctacatgttcatcaaaaggtaggcaaggattgcattttctctactgcatatttagtcatctgcattccccaacttatgctgtaaattttgctaccaaattatgctgtagattttgctttgcgatatctcagtaattgcaggagcataatttggtagctaatgtgttattgttttggtcttcccaatgacgactgttgttggcacttggcaggatgattttgtacgtcgtttgtgccaaactgttttagttttgaccaggtttatatgaaaaatagttacacaagtacattgtaaaagttattttataattaatatagtgatactaatttagtgttctacatgttgatattttttactatactttagtcaaccctaacttcgttttgacccaagaattttggaatggacagaatggttctttcattaatccattgttttgttttatatgttgatcagcccatcacaatgcctttgacagtgactttgctttttaaggtgcagtcaatacacatggcatccatcaaattacagaagaagttatttgtaggtatctaagaagttggagttgcatcaaaaggcgagggtgtcgctaagttccaacatgcattaaaattctatttttgtgatataatattttattaaataatttgtgtgtctttgcaacgcactagcattacgcaaactcaaatagaaatttatatattatagtcattcttgtcattccgtatctatgttttattctaatttttaactttcgtggcaacgcacgggcacatacctattatttcatgatgtgtgatctctttctaagacttctatttccatctgaactacaatatatgatatttatcatcatttttttctagatccatctttcatcccatccactctctgaaaatctaagcttgaatgcccaatactaaattttgcattatggaagcagtttgaacaaagaacaatctctgtcactttgtgtggcccaccagtaaaaataagacaacttgttagtctgattatatgcttctttgattaagagggctatgttcaaataaaacattccagtaaactggacaaagtatcttgaactggaagaagcctttcaaaaatacacatcctttttctacagttcaataactcacaacttcaattctggatgcaagtgtttattattctacactctgctgattcagacctgaaaatgtttgcagttgcaaagagaatatcaaataaaatacttgttgagcttaagtttcttcatcaaatcatttttgggaggcttcaaatgttctatgaacacaatgataataagatgagctacccagcaatggctcaacttctgtcaaatatactctactacaagagaaattgattgggataacatctctactactatgaagaatctaaggggtaggatgtctcccctggttcaattgaaagtagatgagaagagtaaggaacacaaaaaatacctaaggaggatgttgtatacctaaaagttggattgcaacttgagtatgataggggaactacgatggggaacagttggagtaatgatgctgcactataccatggtttggtgaaaggagagaagatgaaggtgctggtacatcacaatcaatactagaagcaagacagacgcacccactattgttactgaaggtcaagatgcacaagatgatctgacaacaccacatgcacctaagatgtccaaaaagattactccaaggaagaaaagcaattgaactaccttatgtatattcaaaattagtgtattatccactatgttgtgtcaagaactatgacttcaaaattagtgtgtcatgaactatgctgtttcatgaactatgtcttcaaattctgggaagtggagtgcagtttcttgtataattttgaacatgtccatgtgcacctactctgctaattgtgtcatggactgacatgaattatgtcatgaactctgccaactgtgtcatgaactgggaagtggagtgcaccaaccgtgtcatgaacatgtccagtttactgcaactctgccaatgataataaaatgtccagtttgtaggac

SEQ ID NO: 218119 - DNA, 2667 bp, Zea Mays
ccgcactctgcccacgacctcgacctcctcccccatgaccacgacctcaaccgctctgccagctccgccacttacgcacgcacgacctcaacctcgcctgattcagcgcatagaagagcgtgtggcgtcgaggtcgagcgtgcggcgccgaggtcgagcgtgcgtcaccgagggagaggaaaaccactgagcgttatttcctaagcctcctgcttgatgtctccaccgtccctcaacgcaattgccgccgcccgggatgcgctccacccccgcccgctaatcgtccccttgcaactgccgccgcggccgccaatcggcccccaagaaccaaaggttcgagctccgcaggtggcaagctccttcttcatccacgccctccctccgccttgagaaccagaggaaaccagagtcaccaaaactacgggcaagactgtacgaagggaaacatagtactcccacgaagaagaagtgctgcaactgcaggaactccaaatgtttgaagttgtttcgagtggcttcgcatcgcaggctgccaagcccaccgagaagcaggtcaaggttgcaaacatactacttgctcatgttggatgacatggaagcagtaggttgaccaaggcaacagctgagatagctcgtgcagccaaccgatcatggcttgctcttcttatcgatactgcatgtgaccagttttcatttatcctacaaagtctgtttgatctcgctatggagcacaaccgcaataaggactcacaatgtaagagcttgaccttgctattcatgctggttcgtcttgctttacatttgcctgggtatcatttggttcacagtgaagtaaattataattgtttagtaaatatttcattttattttgttctacatgttcatcaaaaggtaggcaaggattgcattttctctactgcatatttagtcatctgcattccccaacttatgctgtaaattttgctaccaaattatgctgtagattttgctttgcgatatctcagtaattgcaggagcataatttggtagctaatgtgttattgttttggtcttcccaatgacgactgttgttggcacttggcaggatgattttgtacgtcgtttgtgccaaactgttttagttttgaccaggtttatatgaaaaatagttacacaagtacattgtaaaagttattttataattaatatagtgatactaatttagtgttctacatgttgatattttttactatactttagtcaaccctaacttcgttttgacccaagaattttggaatggacagaatggttctttcattaatccattgttttgttttatatgttgatcagcccatcacaatgcctttgacagtgactttgctttttaaggtgcagtcaatacacatggcatccatcaaattacagaagaagttatttgtaggtatctaagaagttggagttgcatcaaaaggcgagggtgtcgctaagttccaacatgcattaaaattctatttttgtgatataatattttattaaataatttgtgtgtctttgcaacgcactagcattacgcaaactcaaatagaaatttatatattatagtcattcttgtcattccgtatctatgttttattctaatttttaactttcgtggcaacgcacgggcacatacctattatttcatgatgtgtgatctctttctaagacttctatttccatctgaactacaatatatgatatttatcatcatttttttctagatccatctttcatcccatccactctctgaaaatctaagcttgaatgcccaatactaaattttgcattatggaagcagtttgaacaaagaacaatctctgtcactttgtgtggcccaccagtaaaaataagacaacttgttagtctgattatatgcttctttgattaagagggctatgttcaaataaaacattccagtaaactggacaaagtatcttgaactggaagaagcctttcaaaaatacacatcctttttctacagttcaataactcacaacttcaattctggatgcaagtgtttattattctacactctgctgattcagacctgaaaatgtttgcagttgcaaagagaatatcaaataaaatacttgttgagcttaagtttcttcatcaaatcatttttgggaggcttcaaatgtagcactataccatggtttggtgaaaggagagaagatgaaggtgctggtacatcacaatcaatactagaagcaagacagacgcacccactattgttactgaaggtcaagatgcacaagatgatctgacaacaccacatgcacctaagatgtccaaaaagattactccaaggaagaaaagcaattgaactaccttatgtatattcaaaattagtgtattatccactatgttgtgtcaagaactatgacttcaaaattagtgtgtcatgaactatgctgtttcatgaactatgtcttcaaattctgggaagtggagtgcagtttcttgtataattttgaacatgtccatgtgcacctactctgctaattgtgtcatggactgacatgaattatgtcatgaactctgccaactgtgtcatgaactgggaagtggagtgcaccaaccgtgtcatgaacatgtccagtttactgcaactctgccaatgataataaaatgtccagtttgtaggac

SEQ ID NO: 218120 - DNA, 3513 bp, Zea Mays
ccgcactctgcccacgacctcgacctcctcccccatgaccacgacctcaaccgctctgccagctccgccacttacgcacgcacgacctcaacctcgcctgattcagcgcatagaagagcgtgtggcgtcgaggtcgagcgtgcggcgccgaggtcgagcgtgcgtcaccgagggagaggaaaaccactgagcgttatttcctaagcctcctgcttgatgtctccaccgtccctcaacgcaattgccgccgcccgggatgcgctccacccccgcccgctaatcgtccccttgcaactgccgccgcggccgccaatcggcccccaagaaccaaaggttcgagctccgcaggtggcaagctccttcttcatccacgccctccctccgccttgagaaccagaggaaaccagagtcaccaaaactacgggcaagactgtacgaagggaaacatagtactcccacgaagaagaagtgctgcaactgcaggaactccaaatgtttgaagttgtttcgagtggcttcgcatcgcaggctgccaagcccaccgagaagcaggtcaaggtacttgccttatccgtgatgagcgaatgtagttgtaaaatgggaaacgttgctgttttattatatggccgggagtggtgaactggtgataggctactcttgtcagtgcatatgtattatttgcaacccatggattatgcaactatttctctattatatttatattttttccctgatagtgccttcatgttttgtgttgtgctttcacatcttgatattatgtgcctcagtcaaagtttcatatttgtttctattgttttcttggttcaaatcatgcgttgcttgatggtgctgctgatttagctctagagatatgggggaaactacggaggaggaacaaatacatagtgatattgccagctggcctggcattaatatgtctgtaaaacctaccaactccagccttaagttgtatggtggtgcagcttttgggagacatgcatgatttcattgtgtaatgtatttaatgaaatgcccacaagtccagtctcaagggagaaggtagtctttagcctgcaaccatacacatacacaatttattacgagaattgcttatataattatgtcattaggttgcaaacatactacttgctcatgttggatgacatggaagcagtaggttgaccaaggcaacagctgagatagctcgtgcagccaaccgatcatggcttgctcttcttatcgatactgcatgtgaccagttttcatttatcctacaaagtctgtttgatctcgctatggagcacaaccgcaataaggactcacaatgtaagagcttgaccttgctattcatgctggttcgtcttgctttacatttgcctgggtatcatttggttcacagtgaagtaaattataattgtttagtaaatatttcattttattttgttctacatgttcatcaaaaggtaggcaaggattgcattttctctactgcatatttagtcatctgcattccccaacttatgctgtaaattttgctaccaaattatgctgtagattttgctttgcgatatctcagtaattgcaggagcataatttggtagctaatgtgttattgttttggtcttcccaatgacgactgttgttggcacttggcaggatgattttgtacgtcgtttgtgccaaactgttttagttttgaccaggtttatatgaaaaatagttacacaagtacattgtaaaagttattttataattaatatagtgatactaatttagtgttctacatgttgatattttttactatactttagtcaaccctaacttcgttttgacccaagaattttggaatggacagaatggttctttcattaatccattgttttgttttatatgttgatcagcccatcacaatgcctttgacagtgactttgctttttaaggtgcagtcaatacacatggcatccatcaaattacagaagaagttatttgtaggtatctaagaagttggagttgcatcaaaaggcgagggtgtcgctaagttccaacatgcattaaaattctatttttgtgatataatattttattaaataatttgtgtgtctttgcaacgcactagcattacgcaaactcaaatagaaatttatatattatagtcattcttgtcattccgtatctatgttttattctaatttttaactttcgtggcaacgcacgggcacatacctattatttcatgatgtgtgatctctttctaagacttctatttccatctgaactacaatatatgatatttatcatcatttttttctagatccatctttcatcccatccactctctgaaaatctaagcttgaatgcccaatactaaattttgcattatggaagcagtttgaacaaagaacaatctctgtcactttgtgtggcccaccagtaaaaataagacaacttgttagtctgattatatgcttctttgattaagagggctatgttcaaataaaacattccagtaaactggacaaagtatcttgaactggaagaagcctttcaaaaatacacatcctttttctacagttcaataactcacaacttcaattctggatgcaagtgtttattattctacactctgctgattcagacctgaaaatgtttgcagttgcaaagagaatatcaaataaaatacttgttgagcttaagtttcttcatcaaatcatttttgggaggcttcaaatgttctatgaacacaatgataataagatgagctacccagcaatggctcaacttctgtcaaatatactctactacaagagaaattgattgggataacatctctactactatgaagaatctaaggggtaggatgtctcccctggttcaattgaaagtagatgagaagagtaaggaacacaaaaaatacctaaggaggatgttgtatacctaaaagttggattgcaacttgagtatgataggggaactacgatggggaacagttggagtaatgatgctgtagcactataccatggtttggtgaaaggagagaagatgaaggtgctggtacatcacaatcaatactagaagcaagacagacgcacccactattgttactgaaggtcaagatgcacaagatgatctgacaacaccacatgcacctaagatgtccaaaaagattactccaaggaagaaaagcaattgaactaccttatgtatattcaaaattagtgtattatccactatgttgtgtcaagaactatgacttcaaaattagtgtgtcatgaactatgctgtttcatgaactatgtcttcaaattctgggaagtggagtgcagtttcttgtataattttgaacatgtccatgtgcacctactctgctaattgtgtcatggactgacatgaattatgtcatgaactctgccaactgtgtcatgaactgggaagtggagtgcaccaaccgtgtcatgaacatgtccagtttactgcaactctgccaatgataataaaatgtccagtttgtaggac

SEQ ID NO: 218121 - DNA, 2575 bp, Zea Mays
ccgcactctgcccacgacctcgacctcctcccccatgaccacgacctcaaccgctctgccagctccgccacttacgcacgcacgacctcaacctcgcctgattcagcgcatagaagagcgtgtggcgtcgaggtcgagcgtgcggcgccgaggtcgagcgtgcgtcaccgagggagaggaaaaccactgagcgttatttcctaagcctcctgcttgatgtctccaccgtccctcaacgcaattgccgccgcccgggatgcgctccacccccgcccgctaatcgtccccttgcaactgccgccgcggccgccaatcggcccccaagaaccaaaggttcgagctccgcaggtggcaagctccttcttcatccacgccctccctccgccttgagaaccagaggaaaccagagtcaccaaaactacgggcaagactgtacgaagggaaacatagtactcccacgaagaagaagtgctgcaactgcaggaactccaaatgtttgaagttgtttcgagtggcttcgcatcgcaggctgccaagcccaccgagaagcaggtcaaggtacttgccttatccgtgatgagcgaatgtagttgtaaaatgggaaacgttgctgttttattatatggccgggagtggtgaactggtgataggctactcttgtcagtgcatatgtattatttgcaacccatggattatgcaactatttctctattatatttatattttttccctgatagtgccttcatgttttgtgttgtgctttcacatcttgatattatgtgcctcagtcaaagtttcatatttgtttctattgttttcttggttcaaatcatgcgttgcttgatggtgctgctgatttagctctagagatatgggggaaactacggaggaggaacaaatacatagtgatattgccagctggcctggcattaatatgtctgtaaaacctaccaactccagccttaagttgtatggtggtgcagcttttgggagacatgcatgatttcattgtgtaatgtatttaatgaaatgcccacaagtccagtctcaagggagaaggtagtctttagcctgcaaccatacacatacacaatttattacgagaattgcttatataattatgtcattaggttgcaaacatactacttgctcatgttggatgacatggaagcagtaggttgaccaaggcaacagctgagatagctcgtgcagccaaccgatcatggcttgctcttcttatcgatactgcatgtgaccagttttcatttatcctacaaagtctgtttgatctcgctatggagcacaaccgcaataaggactcacaatgtaagagcttgaccttgctattcatgctggttcgtcttgctttacatttgcctgggtatcatttggttcacagtgaagtaaattataattgtttagtaaatatttcattttattttgttctacatgttcatcaaaaggtaggcaaggattgcattttctctactgcatatttagtcatctgcattccccaacttatgctgtaaattttgctaccaaattatgctgtagattttgctttgcgatatctcagtaattgcaggagcataatttggtagctaatgtgttattgttttggtcttcccaatgacgactgttgttggcacttggcaggatgattttgtacgtcgtttgtgccaaactgttttagttttgaccaggtttatatgaaaaatagttacacaagtacattgtaaaagttattttataattaatatagtgatactaatttagtgttctacatgttgatattttttactatactttagtcaaccctaacttcgttttgacccaagaattttggaatggacagaatggttctttcattaatccattgttttgttttatatgttgatcagcccatcacaatgcctttgacagtgactttgctttttaaggtgcagtcaatacacatggcatccatcaaattacagaagaagttatttgtagttgcaaagagaatatcaaataaaatacttgttgagcttaagtttcttcatcaaatcatttttgggaggcttcaaatgcactataccatggtttggtgaaaggagagaagatgaaggtgctggtacatcacaatcaatactagaagcaagacagacgcacccactattgttactgaaggtcaagatgcacaagatgatctgacaacaccacatgcacctaagatgtccaaaaagattactccaaggaagaaaagcaattgaactaccttatgtatattcaaaattagtgtattatccactatgttgtgtcaagaactatgacttcaaaattagtgtgtcatgaactatgctgtttcatgaactatgtcttcaaattctgggaagtggagtgcagtttcttgtataattttgaacatgtccatgtgcacctactctgctaattgtgtcatggactgacatgaattatgtcatgaactctgccaactgtgtcatgaactgggaagtggagtgcaccaaccgtgtcatgaacatgtccagtttactgcaactctgccaatgataataaaatgtccagtttgtaggac

SEQ ID NO: 218122 - DNA, 2307 bp, Zea Mays
ccgcactctgcccacgacctcgacctcctcccccatgaccacgacctcaaccgctctgccagctccgccacttacgcacgcacgacctcaacctcgcctgattcagcgcatagaagagcgtgtggcgtcgaggtcgagcgtgcggcgccgaggtcgagcgtgcgtcaccgagggagaggaaaaccactgagcgttatttcctaagcctcctgcttgatgtctccaccgtccctcaacgcaattgccgccgcccgggatgcgctccacccccgcccgctaatcgtccccttgcaactgccgccgcggccgccaatcggcccccaagaaccaaaggttcgagctccgcaggtggcaagctccttcttcatccacgccctccctccgccttgagaaccagaggaaaccagagtcaccaaaactacgggcaagactgtacgaagggaaacatagtactcccacgaagaagaagtgctgcaactgcaggaactccaaatgtttgaagttgtttcgagtggcttcgcatcgcaggctgccaagcccaccgagaagcaggtcaaggttgcaaacatactacttgctcatgttggatgacatggaagcagtaggttgaccaaggcaacagctgagatagctcgtgcagccaaccgatcatggcttgctcttcttatcgatactgcatgtgaccagttttcatttatcctacaaagtctgtttgatctcgctatggagcacaaccgcaataaggactcacaatgtaagagcttgaccttgctattcatgctggttcgtcttgctttacatttgcctgggtatcatttggttcacagtgaagtaaattataattgtttagtaaatatttcattttattttgttctacatgttcatcaaaaggtaggcaaggattgcattttctctactgcatatttagtcatctgcattccccaacttatgctgtaaattttgctaccaaattatgctgtagattttgctttgcgatatctcagtaattgcaggagcataatttggtagctaatgtgttattgttttggtcttcccaatgacgactgttgttggcacttggcaggatgattttgtacgtcgtttgtgccaaactgttttagttttgaccaggtttatatgaaaaatagttacacaagtacattgtaaaagttattttataattaatatagtgatactaatttagtgttctacatgttgatattttttactatactttagtcaaccctaacttcgttttgacccaagaattttggaatggacagaatggttctttcattaatccattgttttgttttatatgttgatcagcccatcacaatgcctttgacagtgactttgctttttaaggtgcagtcaatacacatggcatccatcaaattacagaagaagttatttgtaggtatctaagaagttggagttgcatcaaaagttgcaaagagaatatcaaataaaatacttgttgagcttaagtttcttcatcaaatcatttttgggaggcttcaaatgttctatgaacacaatgataataagatgagctacccagcaatggctcaacttctgtcaaatatactctactacaagagaaattgattgggataacatctctactactatgaagaatctaaggggtaggatgtctcccctggttcaattgaaagtagatgagaagagtaaggaacacaaaaaatacctaaggaggatgttgtatacctaaaagttggattgcaacttgagtatgataggggaactacgatggggaacagttggagtaatgatgctgcactataccatggtttggtgaaaggagagaagatgaaggtgctggtacatcacaatcaatactagaagcaagacagacgcacccactattgttactgaaggtcaagatgcacaagatgatctgacaacaccacatgcacctaagatgtccaaaaagattactccaaggaagaaaagcaattgaactaccttatgtatattcaaaattagtgtattatccactatgttgtgtcaagaactatgacttcaaaattagtgtgtcatgaactatgctgtttcatgaactatgtcttcaaattctgggaagtggagtgcagtttcttgtataattttgaacatgtccatgtgcacctactctgctaattgtgtcatggactgacatgaattatgtcatgaactctgccaactgtgtcatgaactgggaagtggagtgcaccaaccgtgtcatgaacatgtccagtttactgcaactctgccaatgataataaaatgtccagtttgtaggac

SEQ ID NO: 218123 - DNA, 3172 bp, Zea Mays
cggcgcgccgcactctgcccacgacctcgacctcctcccccatgaccacgacctcaaccgctctgccagctccgccacttacgcacgcacgacctcaacctcgcctgattcagcgcatagaagagcgtgtggcgtcgaggtcgagcgtgcggcgccgaggtcgagcgtgcgtcaccgagggagaggaaaaccactgagcgttatttcctaagcctcctgcttgatgtctccaccgtccctcaacgcaattgccgccgcccgggatgcgctccacccccgcccgctaatcgtccccttgcaactgccgccgcggccgccaatcggcccccaagaaccaaaggttcgagctccgcaggtggcaagctccttcttcatccacgccctccctccgccttgagaaccagaggaaaccagagtcaccaaaactacgggcaagactgtacgaagggaaacatagtactcccacgaagaagaagtgctgcaactgcaggaactccaaatgtttgaagttgtttcgagtggcttcgcatcgcaggctgccaagcccaccgagaagcaggtcaaggtacttgccttatccgtgatgagcgaatgtagttgtaaaatgggaaacgttgctgttttattatatggccgggagtggtgaactggtgataggctactcttgtcagtgcatatgtattatttgcaacccatggattatgcaactatttctctattatatttatattttttccctgatagtgccttcatgttttgtgttgtgctttcacatcttgatattatgtgcctcagtcaaagtttcatatttgtttctattgttttcttggttcaaatcatgcgttgcttgatggtgctgctgatttagctctagagatatgggggaaactacggaggaggaacaaatacatagtgatattgccagctggcctggcattaatatgtctgtaaaacctaccaactccagccttaagttgtatggtggtgcagcttttgggagacatgcatgatttcattgtgtaatgtatttaatgaaatgcccacaagtccagtctcaagggagaaggttgcaaacatactacttgctcatgttggatgacatggaagcagtaggttgaccaaggcaacagctgagatagctcgtgcagccaaccgatcatggcttgctcttcttatcgatactgcatgtgaccagttttcatttatcctacaaagtctgtttgatctcgctatggagcacaaccgcaataaggactcacaatgtaagagcttgaccttgctattcatgctggttcgtcttgctttacatttgcctgggtatcatttggttcacagtgaagtaaattataattgtttagtaaatatttcattttattttgttctacatgttcatcaaaaggtaggcaaggattgcattttctctactgcatatttagtcatctgcattccccaacttatgctgtaaattttgctaccaaattatgctgtagattttgctttgcgatatctcagtaattgcaggagcataatttggtagctaatgtgttattgttttggtcttcccaatgacgactgttgttggcacttggcaggatgattttgtacgtcgtttgtgccaaactgttttagttttgaccaggtttatatgaaaaatagttacacaagtacattgtaaaagttattttataattaatatagtgatactaatttagtgttctacatgttgatattttttactatactttagtcaaccctaacttcgttttgacccaagaattttggaatggacagaatggttctttcattaatccattgttttgttttatatgttgatcagcccatcacaatgcctttgacagtgactttgctttttaaggtgcagtcaatacacatggcatccatcaaattacagaagaagttatttgtaggtatctaagaagttggagttgcatcaaaaggcgagggtgtcgctaagttccaacatgcattaaaattctatttttgtgatataatattttattaaataatttgtgtgtctttgcaacgcactagcattacgcaaactcaaatagaaatttatatattatagtcattcttgtcattccgtatctatgttttattctaatttttaactttcgtggcaacgcacgggcacatacctattatttcatgatgtgtgatctctttctaagacttctatttccatctgaactacaatatatgatatttatcatcatttttttctagatccatctttcatcccatccactctctgaaaatctaagcttgaatgcccaatactaaattttgcattatggaagcagtttgaacaaagaacaatctctgtcactttgtgtggcccaccagtaaaaataagacaacttgttagtctgattatatgcttctttgattaagagggctatgttcaaataaaacattccagtaaactggacaaagtatcttgaactggaagaagcctttcaaaaatacacatcctttttctacagttcaataactcacaacttcaattctggatgcaagtgtttattattctacactctgctgattcagacctgaaaatgtttgcagttgcaaagagaatatcaaataaaatacttgttgagcttaagtttcttcatcaaatcatttttgggaggcttcaaatgcactataccatggtttggtgaaaggagagaagatgaaggtgctggtacatcacaatcaatactagaagcaagacagacgcacccactattgttactgaaggtcaagatgcacaagatgatctgacaacaccacatgcacctaagatgtccaaaaagattactccaaggaagaaaagcaattgaactaccttatgtatattcaaaattagtgtattatccactatgttgtgtcaagaactatgacttcaaaattagtgtgtcatgaactatgctgtttcatgaactatgtcttcaaattctgggaagtggagtgcagtttcttgtataattttgaacatgtccatgtgcacctactctgctaattgtgtcatggactgacatgaattatgtcatgaactctgccaactgtgtcatgaactgggaagtggagtgcaccaaccgtgtcatgaacatgtccagtttactgcaactctgccaatgataataaaatgtccagtttgtaggac

SEQ ID NO: 218124 - DNA, 2684 bp, Zea Mays
ctccactccacgacggcgcgccgcactctgcccacgacctcgacctcctcccccatgaccacgacctcaaccgctctgccagctccgccacttacgcacgcacgacctcaacctcgcctgattcagcgcatagaagagcgtgtggcgtcgaggtcgagcgtgcggcgccgaggtcgagcgtgcgtcaccgagggagaggaaaaccactgagcgttatttcctaagcctcctgcttgatgtctccaccgtccctcaacgcaattgccgccgcccgggatgcgctccacccccgcccgctaatcgtccccttgcaactgccgccgcggccgccaatcggcccccaagaaccaaaggttcgagctccgcaggtggcaagctccttcttcatccacgccctccctccgccttgagaaccagaggaaaccagagtcaccaaaactacgggcaagactgtacgaagggaaacatagtactcccacgaagaagaagtgctgcaactgcaggaactccaaatgtttgaagttgtttcgagtggcttcgcatcgcaggctgccaagcccaccgagaagcaggtcaaggttgcaaacatactacttgctcatgttggatgacatggaagcagtaggttgaccaaggcaacagctgagatagctcgtgcagccaaccgatcatggcttgctcttcttatcgatactgcatgtgaccagttttcatttatcctacaaagtctgtttgatctcgctatggagcacaaccgcaataaggactcacaatgtaagagcttgaccttgctattcatgctggttcgtcttgctttacatttgcctgggtatcatttggttcacagtgaagtaaattataattgtttagtaaatatttcattttattttgttctacatgttcatcaaaaggtaggcaaggattgcattttctctactgcatatttagtcatctgcattccccaacttatgctgtaaattttgctaccaaattatgctgtagattttgctttgcgatatctcagtaattgcaggagcataatttggtagctaatgtgttattgttttggtcttcccaatgacgactgttgttggcacttggcaggatgattttgtacgtcgtttgtgccaaactgttttagttttgaccaggtttatatgaaaaatagttacacaagtacattgtaaaagttattttataattaatatagtgatactaatttagtgttctacatgttgatattttttactatactttagtcaaccctaacttcgttttgacccaagaattttggaatggacagaatggttctttcattaatccattgttttgttttatatgttgatcagcccatcacaatgcctttgacagtgactttgctttttaaggtgcagtcaatacacatggcatccatcaaattacagaagaagttatttgtaggtatctaagaagttggagttgcatcaaaaggcgagggtgtcgctaagttccaacatgcattaaaattctatttttgtgatataatattttattaaataatttgtgtgtctttgcaacgcactagcattacgcaaactcaaatagaaatttatatattatagtcattcttgtcattccgtatctatgttttattctaatttttaactttcgtggcaacgcacgggcacatacctattatttcatgatgtgtgatctctttctaagacttctatttccatctgaactacaatatatgatatttatcatcatttttttctagatccatctttcatcccatccactctctgaaaatctaagcttgaatgcccaatactaaattttgcattatggaagcagtttgaacaaagaacaatctctgtcactttgtgtggcccaccagtaaaaataagacaacttgttagtctgattatatgcttctttgattaagagggctatgttcaaataaaacattccagtaaactggacaaagtatcttgaactggaagaagcctttcaaaaatacacatcctttttctacagttcaataactcacaacttcaattctggatgcaagtgtttattattctacactctgctgattcagacctgaaaatgtttgcagttgcaaagagaatatcaaataaaatacttgttgagcttaagtttcttcatcaaatcatttttgggaggcttcaaatgcactataccatggtttggtgaaaggagagaagatgaaggtgctggtacatcacaatcaatactagaagcaagacagacgcacccactattgttactgaaggtcaagatgcacaagatgatctgacaacaccacatgcacctaagatgtccaaaaagattactccaaggaagaaaagcaattgaactaccttatgtatattcaaaattagtgtattatccactatgttgtgtcaagaactatgacttcaaaattagtgtgtcatgaactatgctgtttcatgaactatgtcttcaaattctgggaagtggagtgcagtttcttgtataattttgaacatgtccatgtgcacctactctgctaattgtgtcatggactgacatgaattatgtcatgaactctgccaactgtgtcatgaactgggaagtggagtgcaccaaccgtgtcatgaacatgtccagtttactgcaactctgccaatgataataaaatgtccagtttgtaggac

SEQ ID NO: 218125 - DNA, 1767 bp, Zea Mays
ctccactccacgacggcgcgccgcactctgcccacgacctcgacctcctcccccatgaccacgacctcaaccgctctgccagctccgccacttacgcacgcacgacctcaacctcgcctgattcagcgcatagaagagcgtgtggcgtcgaggtcgagcgtgcggcgccgaggtcgagcgtgcgtcaccgagggagaggaaaaccactgagcgttatttcctaagcctcctgcttgatgtctccaccgtccctcaacgcaattgccgccgcccgggatgcgctccacccccgcccgctaatcgtccccttgcaactgccgccgcggccgccaatcggcccccaagaaccaaaggttcgagctccgcaggtggcaagctccttcttcatccacgccctccctccgccttgagaaccagaggaaaccagagtcaccaaaactacgggcaagactgtacgaagggaaacatagtactcccacgaagaagaagtgctgcaactgcaggaactccaaatgtttgaagttgtttcgagtggcttcgcatcgcaggctgccaagcccaccgagaagcaggtcaaggttgcaaacatactacttgctcatgttggatgacatggaagcagtaggttgaccaaggcaacagctgagatagctcgtgcagccaaccgatcatggcttgctcttcttatcgatactgcatgtgaccagttttcatttatcctacaaagtctgtttgatctcgctatggagcacaaccgcaataaggactcacaatttgcaaagagaatatcaaataaaatacttgttgagcttaagtttcttcatcaaatcatttttgggaggcttcaaatgttctatgaacacaatgataataagatgagctacccagcaatggctcaacttctgtcaaatatactctactacaagagaaattgattgggataacatctctactactatgaagaatctaaggggtaggatgtctcccctggttcaattgaaagtagatgagaagagtaaggaacacaaaaaatacctaaggaggatgttgtatacctaaaagttggattgcaacttgagtatgataggggaactacgatggggaacagttggagtaatgatgctggtactaaaattttttctatgcctgatgatgagtacatatcagaagatacaattgttgtttatgataagctaaatcctgtaaatccaaacttctatttaacatgactctctttatttccactttacatgaaaagtagcactataccatggtttggtgaaaggagagaagatgaaggtgctggtacatcacaatcaatactagaagcaagacagacgcacccactattgttactgaaggtcaagatgcacaagatgatctgacaacaccacatgcacctaagatgtccaaaaagattactccaaggaagaaaagcaattgaactaccttatgtatattcaaaattagtgtattatccactatgttgtgtcaagaactatgacttcaaaattagtgtgtcatgaactatgctgtttcatgaactatgtcttcaaattctgggaagtggagtgcagtttcttgtataattttgaacatgtccatgtgcacctactctgctaattgtgtcatggactgacatgaattatgtcatgaactctgccaactgtgtcatgaactgggaagtggagtgcaccaaccgtgtcatgaacatgtccagtttactgcaactctgccaatgataataaaatgtccagtttgtaggac

SEQ ID NO: 218126 - DNA, 3531 bp, Zea Mays
gtgaacactgaacagccccccggtcgctcctcctccctctaccctccagctccagccgccagccgccagccgcccacgcccggagcaccgccgcaacccgcagcgccgctcgcccggaggccggagcaccgccgctctccccgcacggagcaccgccgcgaccacgccgctgtccatccgccgctccgcgctccctccttcgaccttcgccttggttccgacgcggtgaccgtgcgctaaacccttcgaccttcgcccggaggcgggagcgcggcggaccggagtccggagcaaccgtgagacgagcaggggcggccggcgggcgcggatatttgggcgcaacaactttctgcccttccatttctccaactaagaaggaataggatgccaagagagtttctgcaaccccaatgaagatggcaccagctccgcctccggaggggactgcaattctgctaattcgtggagctcagagttctatcttaacggtgctgctagttatgcttgggtgttagtgctatggctactcattaccaagctgctaccttgattgcctctccgtcttacccaaatgccattgcttggtcaagtgacaatctcgtggctgtcgcatctggtcatattgtaactattctgaacccagctgcgcttgatggaccccgtggattggttggacttcgtcacagtgacccttttcctataggagtggttaagagagaagatctcttggagccatgtttattgcccacttccttagcgcgtgaaactgaaccatgtgcccgatcgatttcatggtctcaacaaggatttgcacctaactatgggtgtttgctggctgtttgcactgtgaatgatcatgtgaagctttaccgatcaccaatttgggagttatgtgatgaatgggtagaggtcgcagatatatcacagttgctgtttaactattataaaattataaacttcggagaggataatggttctcatttgacttcttcgaagaatacaaattctggggaggcagaagttttaggatctacttgtcgatcggaagaatctctttatttcaggggtcctggacagagaaaaataaagccagcaagagttggtggttttatttatgacggcaatgaagttgatttagatgcttcaaaggatgcagacttctcgatggaaccatgctcaaaatcaaagaagaaatctttgaaaaagactgtaaaacccagggatgaagtggttgctgtaaatggacgaaacagcacagggaatgttaaagcatcattgtcctccaatgaacaaaacaaatctcttcctcttatcacggcaaaacaccagaatattacacaatagatgctggtgtggttaccagtgatccgatgctcatcggggttttgcatgctcatgaatcatgggtcaatgccataacttggcaagttctttctgcgggctcttcaaaatcctcgttgcttttagctactggatgctcagatggaagtgttaagatatggttagggaatattgaagggttaaatcaatgtgcaattggagaagaagtgccatttgtgttagttgctgaggttgccgctaatttatcagctccagtgtcgtcaatctcattgggcatacctgcccggtctcaacatgaggttagtttggcaattggaagagtatccgggttactagaaatatggatatggaatgcatctaccaacaaaattgagagttccagtgcatggcatgcacatgatcaagtggtttacgatgggctatcgatggcaattgtttattcagctgcagtcaggacaattctacacgttgttggatatctcacgaaaaccaccttgaagaattttttttgcattcagaattttcagagctaagggagtcagaagatctatcaaaagtttctgatcgatgctatggtcttacgctatcacctggagaagagataattgctgtggtccgcagtttggatctgaaccttttgaaccagatgtatcaagtcaggacacaaaaggcggtggtcgagttcatttggatcggtggccaatttgttggtattccactggacgggagtatcgatatttgcagtccgcagtctgcggacttatcctcaagtaaccttatgtggtggggatccaacatcttgtggtcgctgaagaaatacgaaaatgtcgaaaagaggcttgtgttgtgggacgttgtagctgcgctgcaagagctgaagaaaaccgcgcccgcctttctggagactctagtgcacagttgggcctcagctttatttgcgggcgactcacagtgtgtttctatcactgcccagtcatcacgctcgatgcatgacatgatgccccatgtcagctcgcggaagctgcacttactgaacataatctgcagaaaagtgatgctcggcaatcatgcgcggcatggtcctggtgctggaaacaacagtaatgatggaacaactgatttctggagcactcttttggtagcgagtgaaacggagctgcgagagaggctggtgggtttcacctttgccgcggtcgtgaaacggacagcgtgtctgttcaacggcacctccaccgcaaattgctggttccctgtcggcgtcgcccagatggattcttgggtatccatgaactacgaaaaggtgcacggtcagctgcagtcgatcagatcgaagatcaaagagctaggaagcaggatcgacggatactccgacgtagaaagctgcccctactgctcttcgccggtccgtttcgagtcgcctgacgtggccatctgcggagaaaggcacacgctgtcgcggtgcaggacatccatgaccctgtgctccgtcgcgcagccagtgtggcactgctcgtgctgcgggggcacggtcgacaagctgctgccggagtcgttcttcaccatgcctttggacgccgtccgtgacgacaaaggatcgctcgatctgtcggcagcctccgccccgctttgccccttctgcggcgtcctgctgcagaggtcgatgccggcgttcctgctctccacctcgccggtatagtcttcggatgcccccaggtgttacatgcagtagcaatgcaatgggaatatcgtagtggagccaactaccaagtttgttgtagctgatgctgtatggctgcagagtggcagtgccgtcattggggctcgaaatgtttgtgataggttttgtgacttctttctgcttagcccctctaatatatctcgagatacctattttttatttaccgtaccctgcctctggaccaaagcctatgtggcggtggccgccaggctgagtgcggggcgaggggcttgggccagctcctgcactcagcctgatgaccatgtccgctggtgctgtgcccgctgggggtgggcgccgttctgtgtctcctgtgggtgtgggctgtggcatcgacgtgaccgagagcatctcgtgcaacgctagtcgaggcctcctctgatggctccatgacatgcgcctcatcaccggtaagccctgagcctgcgccatgtgtgtggcgcttaaagatc

SEQ ID NO: 218127 - DNA, 3340 bp, Zea Mays
ccggtgagcatctctggaggctcgagtcttgactgagttctatcttaacggtgctgctagttatgcttgggtgttagtgctatggctactcattaccaagctgctaccttgattgcctctccgtcttacccaaatgccattgcttggtcaagtgacaatctcgtggctgtcgcatctggtcatattgtaactattctgaacccagctgcgcttgatggaccccgtggattggttggacttcgtcacagtgacccttttcctataggagtggttaagagagaagatctcttggagccatgtttattgcccacttccttagcgcgtgaaactgaaccatgtgcccgatcgatttcatggtctcaacaaggatttgcacctaactatgggtgtttgctggctgtttgcactgtgaatgatcatgtgaagctttaccgatcaccaatttgggagttatgtgatgaatgggtagaggtcgcagatatatcacagttgctgtttaactattataaaattataaacttcggagaggataatggttctcatttgacttcttcgaagaatacaaattctggggaggcagaagttttaggatctacttgtcgatcggaagaatctctttatttcaggggtcctggacagagaaaaataaagccagcaagagttggtggttttatttatgacggcaatgaagttgatttagatgcttcaaaggatgcagacttctcgatggaaccatgctcaaaatcaaagaagaaatctttgaaaaagactgtaaaacccagggatgaagtggttgctgtaaatggacgaaacagcacagggaatgttaaagcatcattgtcctccaatgaacaaaacaaatctcttcctcttatcacggcaaaacagtatgcctgtcgtgctgcacatttgtcttcccttgtagtttcatggtctccagttgtgtcattaagtgatagaacttcttgtttattgaggcattggtgcattcttgctgttggctctaaatctggaaatatttctttttggaaactatataagccagaatattacacaatagatgctggtgtggttaccagtgatccgatgctcatcggggttttgcatgctcatgaatcatgggtcaatgccataacttggcaagttctttctgcgggctcttcaaaatcctcgttgcttttagctactggatgctcagatggaagtgttaagatatggttagggaatattgaagggttaaatcaatgtgcaattggagaagaagtgccatttgtgttagttgctgaggttgccgctaatttatcagctccagtgtcgtcaatctcattgggcatacctgcccggtctcaacatgaggttagtttggcaattggaagagtatccgggttactagaaatatggatatggaatgcatctaccaacaaaattgagagttccagtgcatggcatgcacatgatcaagtggtgacaggtttacgatgggctatcgatggcaattgtttattcagctgcagtcaggacaattctacacgttgttggatatctcacgaaaaccaccttgaagaattttttttgcattcagaattttcagagctaagggagtcagaagatgtaagagtagtagacacttaaatgttagttattcttgatgtccaattattttcctccatatggttgggttttcaatatgcatgcagctatcaaaagtttctgatcgatgctatggtcttacgctatcacctggagaagagataattgctgtggtccgcagtttggatctgaaccttttgaaccagatgtatcaagtcaggacacaaaaggcggtggtcgagttcatttggatcggtggccaatttgttggtattccactggacgggagtatcgatatttgcagtccgcagtctgcggacttatcctcaagtaaccttatgtggtggggatccaacatcttgtggtcgctgaagaaatacgaaaatgtcgaaaagaggcttgtgttgtgggacgttgtagctgcgctgcaagagctgaagaaaaccgcgcccgcctttctggagactctagtgcacagttgggcctcagctttatttgcgggcgactcacagtgtgtttctatcactgcccagtcatcacgctcgatgcatgacatgatgccccatgtcagctcgcggaagctgcacttactgaacataatctgcagaaaagtgatgctcggcaatcatgcgcggcatggtcctggtgctggaaacaacagtaatgatggaacaactgatttctggagcactcttttggtagcgagtgaaacggagctgcgagagaggctggtgggtttcacctttgccgcggtcgtgaaacggacagcgtgtctgttcaacggcacctccaccgcaaattgctggttccctgtcggcgtcgcccagatggattcttgggtatccatgaactacgaaaaggtgcacggtcagctgcagtcgatcagatcgaagatcaaagagctaggaagcaggatcgacggatactccgacgtagaaagctgcccctactgctcttcgccggtccgtttcgagtcgcctgacgtggccatctgcggagaaaggcacacgctgtcgcggtgcaggacatccatgaccctgtgctccgtcgcgcagccagtgtggcactgctcgtgctgcgggggcacggtcgacaagctgctgccggagtcgttcttcaccatgcctttggacgccgtccgtgacgacaaaggatcgctcgatctgtcggcagcctccgccccgctttgccccttctgcggcgtcctgctgcagaggtcgatgccggcgttcctgctctccacctcgccggtatagtcttcggatgcccccaggtgttacatgcagtagcaatgcaatgggaatatcgtagtggagccaactaccaagtttgttgtagctgatgctgtatggctgcagagtggcagtgccgtcattggggctcgaaatgtttgtgataggttttgtgacttctttctgcttagcccctctaatatatctcgagatacctattttttatttaccgtaccctgcctctggaccaaagcctatgtggcggtggccgccaggctgagtgcggggcgaggggcttgggccagctcctgcactcagcctgatgaccatgtccgctggtgctgtgcccgctgggggtgggcgccgttctgtgtctcctgtgggtgtgggctgtggcatcgacgtgaccgagagcatctcgtgcaacgctagtcgaggcctcctctgatggctccatgacatgcgcctcatcaccggtaagccctgagcctgcgccatgtgtgtggcgcttaaagatc

SEQ ID NO: 218128 - DNA, 2070 bp, Zea Mays
ttttgaggagtttctctgctagtacaatccaattgactgtacattgatctctaatatttgttgccaatatctttcatagaaacattgaaaaattcctcaagtacagtgtcggttcattggacatgttccatgtgcacattcagtaatcatgaaagcatggtgtactgtgagatgtgtggtgttttccgtgagacctttgtcaaatctgccaaggatggtctgttaaaagatacagccgttgcagtgtcaagtgagcctaggacatctgctgcgtcaaaaaacgattctgccaaggcgccagtgaagactcgtgctgtaaattctgatggtgattctatgagaaagcatgctagcatgtcttatgataaagccaattccacgcagttaccatctgctggtagctcactaggtgctgaaaaaaagaagaaaacccctgtactttctgaagaagtacctgtggagaggatagctctgttggcttccgatggttttcagtcaaagggtaaccagaatagcggggctagcagttcttcgcagaatgacaatgtgatccagaaactctcttctgacgtaggccagctaaatgtaaacaagaacaatgtgaatgttacgaaatcttgtttgcctgatgagtataagcctgagaagtggatgttagctgatctggagtcaagggcgttgagccaactgaaccttgcaatagtcggtcatgttgattccggcaagtcgacactatctgggagattactgcatctcttaggaaggatatcaaaaaaatatatgcacaagaatgaaaaggagtcgaaagaaaagctggcatggatggcgaaggaggaaaaagtgttggccagactaaagagcatgctcagcttgttagaagctttggtgttgaacagcttgttgtcgcagtcaacaagatggatgctgttgattatgcaaaagaaaggtttgatttcatcaagctacaacttggtagtttcctgcggtcatgcaacttcaaggactcagctattacctggattcctcttagtgctgtagaaaaccaaaatttgatcaaagctccttcagatgctcgtttgacctcctggacaattggcagcttatggaaaattggaaactggagccatccaaattggttctaaggtgttagttctaccttctgggcaagaggcgactgtgaaagccattgagcgggactctaattcatgcaccgtagcgagagctggtgataatgtggcaatttgtttacagggtattgatggaaaacaactaatacctggcggggttctttgtcaccctggtttccctgtgcctgtagctaaccacttggagctgaaggttctagtcctggacatcactactcctattcttgttggctctcaggtggagtttcacatacatcatgtgaaggaggctgcaagagtaacaaaaattgttgcattacttgacaagactggcaaaccaagtaaatcggcacctcgatttcttaaatccaagcagaattctgttatacaggtcacactagatggagctgtctgtgttcaggaattctccaagagccgagctcttgggagggcatacttgaggtcggctgggcgcaccattgctgttggcgttgttaatcggataattggccaagatcagaactagaagacctactacactcttctgaaatctgaaccaaatccttgtcgttgccttgtcgttgctacggttatactctacgtagtagacactggcaacatgatgttgggaaattttgtttagcagctgcttatagccattccattgtattgagttatatgtgtaagatagtagtcacagctgagttgtgttctaacccccggcttttgcaaaaatgctatggaatccttcgaagttatatatgctgactacttgtgattcgtgaccgctgattcgttatcgttcattactatatgtagtggacccaagtaaaacgatgttggcaaattttgtttagcatttgcatatcttcattctcattgtacttagatgtgtgtaagatggtcacagactcagctgagttttgatttctaatccttgactttt

SEQ ID NO: 218129 - DNA, 1760 bp, Zea Mays
aacccttctcttcctgatagtagatgtgtggttcctgctgaggatgttgagcgcaaatttcagcatatggcaagttcagtgcataaggtagggatggtgctcgattcagtgcaaaacgacactatgcagttaaacagagccatgaaggaagctgcactagattctggaagcatacagcaaaagattgttgtcctcgacacttcgatgcagaaaaatcttaagggacaaggtgatctcaaagtgcttgttgagagcaacacaaaaaacattgctgatcagctggctgttctgaactcccactccaacaaactggttgagatatcctcagccctttcagtcttgccgaaacaaatagaaagagatttaaagcaacaacagagtgacatcttcagaatttttagaaacaacatggaggagattgctagagctgtcaaatctctcaacagtaagatcgatgcaatccaaatgccaacagagcagagatgcacaaccaatggaaggcccctgatgaaccaactaccagtcgatagaaacgaaaggcctcaggtgaaccaaacaccagaggtaacccgggtgagccagacaacagtagcaagcttagtgaaccaagcaccagcagcaaatggaaggcacctgatgagcaaaacaccagcagcaaatgggaaaagtgtgatgagacaaacaccagcagaaaatggaaggcacctagtgagccaaacacctgcagcaaatggaaaaactctgaagagacaaacatcagtaacaaatggaatttccctgatgagccaagtaccagcagcaaatgggaaacctgtggtgatccaaataccagcaccaaaaggaagacctatgatgaggcagaaaacagcagaaagcggaaggaccgagatgaacgaaatacccgtagcaagtggacgaccccatacaaacaaaatacccatagcggaagtgcatcccgcacctttggtgtgccctgcaaagcaggtagcaacagacccgaagcccaaggtagacgaggaaaagctgaaagcgcttccccaaaagctaactagttctagatccagggtggcacctaaacaggaagaggcggcaaatacaaaggtcatcagccgggcagcggcaactgagaaggtggtgatattcatcgacgactctgacgatgacaacgacgtccgtgcttcctgcgtgatcctcaggccctcgggatcaggcagcttaggtgagagggaatgcgacctgatgaaggtgggcgcggaggagagccaggagatcccgcggagggccaggaagcggaggagaagagaaatgcaggccactgtgggtgtggcatgtatgccgctgcctgcctgagcttcggtatggttgactgattggtataattgactgattaattgatgcggtcggtaatttagagcagtgtttgcactgcactgcatactctataaaaggaacagtagtagataggtgaacatgaatgaatgaggacaggaaaacaaaggatcagggttatattatgaatatagtagagagaaacacagttttgttgtggtgtttgttgtgttataataaatcatattggaggtgggaatgaagtcattattactggaggatatatcacaagtactaccttcgttcttaatatttgtcgttcttaatggcaggagctatacggttctgcctttcaattaagaaaaagaatggaattaacacggttttaagaaaaaacaggcctgaaacctccacatagtgcacaaacaacc

SEQ ID NO: 218130 - DNA, 1878 bp, Zea Mays
gaaacaaacaggggctttcatttctccccgccctgcagcacgaccgcgaccagccaccgtctccgcccccgccccggttgcttcagatctcctcctcccccacccggccacccccagccgcaccagccaccggccagctcctccgcaccaggataatctctgcccttcgtaccccctcgccattgcgcgcgcatataaatcccacatccccatcgctctcgcctctgcccacccacccgccgcgcccctactgcgcagcacgcacgtcccctccgcggccctggatctaggctgatcggtcgccggccgggagcgaggatcgggatctcggcccggggctgcccccccgccggaatggaggtcttcggccccgtcacgcccggacaggtgtcatttttgctaggtctattccctgtcctcatctcatggatctactctgaaatcctcgaatacaagaaatctttgtctcatgggaaagttcattcagacgctaatttggataatggaaccatcaaggaggatgaaaagtcagtattacttgaaggaggacagttgaaatcaccatctacaaagttcaggaacttgtctaccaaagcgaatttgttacggtttataactatggacgagtcttttctgcttgaaaaccgtgctgtactgagagccatggctgaatttggcgttgttctggtttacttctatatctgtgaccgcacagacatatttccagaaagcaagaagagctacaatcgtgatctgttcctgtttctatacattcttctcatcatagcatcaacacttacttcactaaagaagcatcatgaaaaatcagcattttcaggaaagtctatactctatcttaatcgccaccaaactgaggaatggaaagggtggatgcaggtcttatttctgatgtaccattattttgctgcttctgagatatacaatgcaatccgtgtgttcattgcttgctatgtctggatgactggatttgggaatttctcatattactatatcaagaaagattttagtattgcaagatttgctcagatgatgtggagattaaatttctttgtggcattctgttgcattgtccttgacaatgatctcatgctctattatatatgcccaatgcacacactatttactcttatggtatatggatcacttggtctgtttaacaaatacaatgaggctataaagatccatcgccatccaaggcacacttacccctgctacatgagtggcatttccgatctggcctcgatcgatacatatggattattggaatgatttatgcttacttccatcctaatgttgaaagatggatggagaagctggaagaatctgagactaaggttagattatcaatcaagggaaccattgtcactctttcattgacggttggctttctgtggtatgaatatatatacaagctagacaaagttacatacaacaagtaccatccctacacatcatggatccctataactgtttatatctgcctgcgcaattgcacccagcagttgaggaatgcctctttagctcttttcgcatggcttggcaagattacactcgagacttatatttctcagatccatatttggcttaggtctagcatgccaaatggacaaccaaagtggcttctttgtttcataccagattatcctatgcttaacttcatgcttactacagcgatctatcttcttctatcataccgtgtgtttgagatcacaaacgtcttgaagtcggcttttatccccagtagggataatagccgcctataccaaaatttgattgctgggatcgccatctcagtgtgcttgtatctctgctcgcttattcttctgaagattcctggtgtatagcttattgcatctg

SEQ ID NO: 218131 - DNA, 2101 bp, Zea Mays
atggtgaggctgaccggtgggcccaactgtacaggagacaaaagactacaggtcatcatcacgggatctcccgacggaacggaacggatatataacaagcctagggctaggggtagccaggcccaggaagagagagaaggttctccaagtcaatcgcaatcacgaagagtcatcacgccatacgacacggaggacaccgagccggaggcgaagtcggtgcgcagcgcgagagtagcggcgagtcggcaaccatcaagcaactgcatggccgcggtacccgccagcgcccccgccgccgccgaggcggcggagctcgtgccgacgctctcctcgctggagccggtctacggcgcgggcgcgcagctcgacgagtcgcgcctccgcttcgcccgcctcggggaccgcttccacgccgtctacggcgcccgccccgcgctcttcgcccgctccccagggagggtcaatctgatcggggagcacatcgactacgagggctactcggtgttgccgatggccatccgccaggacatgatcgtcgccatccgaagggccaacggcgcccaggtgagggtcgccaacgtcgacgacaagtaccccctctgcgtttaccccgccgacccagacaaggaaattgacgtaaaaaatcacaaatgggggcactatttcatgtgtggatacaagggagtttatgaatactgtagatcaaaagggatagatctgggcaaacctgttgcgcttgacgtcgttgttgatggcacagttcctcaaggctctggactgtcaagctcagcagcatttgtctgttcagcaacaattgctatcatgggaatccttgacaaaaactttccaaagaaagaagttgctcaattcacttgtctgtctgagcgccacattggaacgcaatctggcggcatggatcaggtggtacatttgtgatcgcccattgtttggccgagtccaagaaagcagagacagctgcaacaaattataataaccgtgttgtggagtgtcgcttagcagcgattgttcttgccatcaaacttgggatggataggaaaaaggctatctcctccgttacaaccctctccgatgttgaggggctatgtgtttcttttgctgggagagaaggttcatctgatcctgcagtagctgtgaagaaacttctgcatgaggacccatatacagctggagaaatagagaaaattacaggagaaggcctgacatctgtcttccagggctctcagacgtcattggatgttataaaagcggcaaagcactacaagctatttcagcgtgcgacccatgtctactctgaagcaaggagggtttatgctttcagggatactgtctcttcaaaactcagtgaggaaggcaagcttaagaaacttggtgatcttatgaacgagagccattacagctgcagcgtgctatacgaatgcagttgccctgagctggaggagcttgtgaaggtctgcagagacaacggagcactgggagcacgtctgacaggagctgggtggggtggctgcgcggttgctctggtcaaggagcccatcgtccctcagttcattctgaaactaaaggaaatgtactacaaatcaaggattgacaggggagtaatcaagcagggcgatgtgggcctatacgtgttcgcatccaagccgtcgagcggcgcggccatactgaggttgtaggcaggcaggaaggcagaggcagccgctattcttttcacgagtgtggtggccctgtaaaacatggaataaagttgccatgaacaccgaacccttgtagtagcgttgaattatctcagacaacacgcgcattaaattgatatctatctacaggagtaacacacgagcgaaccatgctgttttaaatcctctttcttgctattctcgtttttcgttggttcaccggccatttcgtggagttgtttccagtaacgtaaaatataacgatacgtagataaaactatcaccctcgaagtataattttcttttcttagatatttaagtaatcctgtcactcatcttgagttggtaatcgatccatgcattgtcctataaaattcggtctcagtgagaattacacataagtttta

SEQ ID NO: 218132 - DNA, 1461 bp, Zea Mays
caggtccaggcatccaggctcagcgtctagggaccagccccagccctagcccctagccctggcggccggcgtggcggcacacagtgcccggcgccttcgtccacttcccggcccggcgtgacgttggcccgggcgcctcgcccattcgatttcgtcttccggtgcagcacaggcgagaagcgcactcagctcgacgacccgacccgtcgatcgccgctcccttccatcaaggcaagtagtcaggaaggaagaaaatccattggtggcgcagtcctaggatcagcacaaagatgcctcctggtcgtgagaaggttggagtcaaaaggccacatggacctcagctatcagaaccaccattgcatccatacgaacaactgcgtctaagacaatgtatgaggaataattcaaggctacaacaattaggaatccctgctttatcaagcatgcttgcaagcacaaattctatttctcagaggaataggccaagtcatagaaatagtgaggactctgagtctgattatgatatttcacaagatgagactggtgatgacaatgttaaggtgggctcaaaggaatgtaacataagaactactgataattcgcttggtgcaatcaagctctgctctaagagagtttttgcgcagcaagaaactactagaattacaaggtcaaagaaaaatattgctcaacctgatgcaactcttacaccaaggcacaacattgattaccacacacagggtatagttgaagctaatggccatgcccatttggatgagaacactaacatgaccaatgaaggtcatgttgctccttttgatgggaagaaccctacaggcaatgaagataatgtggatgtcctagctgataacaacaggacgattggaggtcaagttgatgacactaatcagatgtcgaacagagatttagaattaggtcagaatgatcggtgggaaaggggaatcaatatgggacatggtcttcatagaattaaccgaggtttgcgtggaaagttgcaagttgttattcctgaagggaagataaggcctatggcaccacttgttgctgctaagtttgcaactgaatgcaacatttctgtgaggaaccatgtgccagtgttcaaacattggaaggattacaagaaccattcaggcctattcaatctatttacaggaaaacttagtgcaaagtttgacattaacacaagtgatgcaccagttcaaaaggcttgttcccagatgatgaagagtgcggttcgacaacaacgataccggctcaagaaaaagtactttgatccttttccgctacatctagtggcaaaaaaatctccaatcagatctatgactgatgaagagtggaatgaacttgtggagtattggaagagtccaaaaaagtggagacatctcaaaaaaacaaagagaatcgatccaaagttaaattccatcaaacaactggctctcgtag

SEQ ID NO: 218133 - DNA, 2694 bp, Zea Mays
gcctgtattgtgttaccaagtttggaatgggatgctgccttcagtttatagaagcttgcgtcaattcctcctgtaactcgcatggctatgggacgtggaacctgggtgaccgtcctatgcagaaagctgaaggattggtggcattgggttgcagaaggtgatctgccaattgttgcatctcatggaactgaaattgagacatacaaaacactagaaccagctattcgtttattaattttgaaagcgatatgtgatatccgtgttgagcaagaggatattcggaacttcattgacagttcccttaagcatggtcatgacctttctacttttcgtaaagaacggattggaggggattcccttggaatctcatactggtatgaagatgatgagattctcgggcatagattgtatcgtgaaattagacgagtagaacaggttaagaaggagcctggaaagaggtccaggggaaaaggaggatcttcagctatttcagttgtgtcctaccaatgggaaactgttgcgtccacctttgatgagtttgatgatgtggcagaaaaactcttttcaagtcggaacaggacagaggtttctcttggaaagaagttgaagattgaatatcttccagagatagaaaagctccataaaaagaaagagaggttgctcaaaaagcaacagagagaagctcttcttcttgatagctacttggcatcagatggacttaccaccggccgctctctccgtgatagaaagcccgtgacttatacatttgatgactatgatcgctcaataaatgaagccatcaaaattacgaagaaaagagagaactcagctgagcctgttgctactactgccaatagaagggtgcttcctccaagatcggaggcaccaagcaatgggaagttaaataatggtccctcaccaacaaccaatgactcatctgatggaaattcttcaaagtcagatgactaccgagacagcgatggtgaacaagaaaatgaggcacttgatcgcagcaaccggcggaggaaaagatctcagagatacacacaagactttgttgaggctgtctcagatgttgatcctaactttgacagtgacgacgatatcatgggagaggcagtgtatgatgacgaatacctgagaagtcgcaaacagaataagccatcaagtgcttctgaagaggatgaagagttccggttggaagaagatgccgaagatgatgatgaagaggaatattcattgagtaccagtgaagatctagaggagccacaacggcataaaaagctggaaactcgtggccggcgaggtacgaagctgagatcagttggtgaaatccaagcaggtcttagacgcagcaagcgttcttctcgtcctcgtattaactatcgccaatatgatttttcggactcggatacggagcctcgaaaggcaaggaaatctgacgcatcagatcctgatgctggctccgatgccgagaatgatatggagctctcgacatcgagtcaagagcaagaggaggaagaggatgatagtcatgatgaagaaaatggtaataatgcgaatgataaaatggaggaggaccacactgcagaagaaaataaaatagaaccagaggaggagaaggagcagccacagcagcagcctgtagagaagatggatgctcccagcagggaaagtaaaagtgtaggaagaacattcctagatctaaacgagcttgcacctggaggtggctttgatgatggcccaagcttgacagtgagagatgacatggacaacatctagggaataaagttttgttttgatacatttcgggtgctgttggccagttttctgacttccaggcaagggcagatccatggtcctgatggcctgtgatgaatggtgcaactatggtttggcggtgtgagcttatggttatggctgcttcactgatttgcagcagcaggacaggcgatgttccacttgaagcgactttgagcttctccggtgcttatgttatacgtggagaccatgaggaggtagttttatgtatactacatgaaggtcgcaatcgatcatagctgtattgcggccaggctgctgctgcgttgcggccggtctctaggatataaatttattgcctccatttatttagtcttaggcattgtgatgtcaatgagaacatggagggaaacctgtacaccgagtgcggtccgtcggcattcgcccgaccttttccacttgtagattgtaggttttttaaagtccgggcgggattagttctgtatctatacctgacagtctgtttttttctgtcacacctgtgtagctgacattgagcttgtccctgaatgcacaccggcaatgcctctcgttcgctctatatggagaagatgctgcatgtattcagctgatgttgtagcctatggacatgtccattactcagagtggctggcctggtgattgctaatttgatgtatggtttataaaaccaaattcctgtgtgcgtattggttagttgcaaaactttgcaaagataaataatttgggggtgttctgttccattaaacattgcaaaattatgtgaaatgtttggtgaattgggcttcatgtccccagttgtgcttcggagaggctactcatttcttacaaagtagcctcatggtggatgtttgatgacttgtagtgttcctgtaaaataaaagggaaagtacc

SEQ ID NO: 218134 - DNA, 3049 bp, Zea Mays
ctttgcccttctcacctcctccgctgcctcccatggcctccgcctccctgcaccccgcttctccctcccacccaaaccctaaccatagccccgacgcagatctccgatctgatcgccccatgcccgacgccgacgccgtaagcggaggcgcctcgcccacttccccggagaagcgggaggaggaggaagaggaggcgccggggaaggaggcgaagccggcggcggcggcggaggagcagccgaccccacggaagacgcgccttccgcgcgcttgcaacaataagcccaaacccccgccgccgccgccgtccgagcgtccgcgccgccgtgccgcggcggcgtcgggcgccggcggcgcggacgagacgccacaatgccgcgtggtcacgcctctcgtgtcggagcccgaggcgcctgctgagcttccccgctggcggctccgctgcatgtgggagctcggctccgtgctcaacttcctccacgtgttccgacctctgctgaacatcactggggagttcacggctgaggacgtcgaggcggcgcttatcactcccaacgagattctagatgatgtgcatatgccactgctaaagtcaattcctcctgtaactcgcatggctatgggacgtggaacctgggtgaccgtcctatgcagaaagctgaaggattggtggcattgggttgcagaaggtgatctgccaattgttgcatctcatggaactgaaattgagacatacaaaacactagaaccagctattcgtttattaattttgaaagcgatatgtgatatccgtgttgagcaagaggatattcggaacttcattgacagttcccttaagcatggtcatgacctttctacttttcgtaaagaacggattggaggggattcccttggaatctcatactggaaaaactcttttcaagtcggaacaggacagaggtttctcttggaaagaagttgaagattgaatatcttccagagatagaaaagctccataaaaagaaagagaggttgctcaaaaagcaacagagagaagctcttcttcttgatagctacttggcatcagatggacttaccaccggccgctctctccgtgatagaaagcccgtgacttatacatttgatgactatgatcgctcaataaatgaagccatcaaaattacgaagaaaagagagaactcagctgagcctgttgctactactgccaatagaagggtgcttcctccaagatcggaggcaccaagcaatgggaagttaaataatggtccctcaccaacaaccaatgactcatctgatggaaattcttcaaagtcagatgactaccgagacagcgatggtgaacaagaaaatgaggcacttgatcgcagcaaccggcggaggaaaagatctcagagatacacacaagactttgttgaggctgtctcagatgttgatcctaactttgacagtgacgacgatatcatgggagaggcagtgtatgatgacgaatacctgagaagtcgcaaacagaataagccatcaagtgcttctgaagaggatgaagagttccggttggaagaagatgccgaagatgatgatgaagaggaatattcattgagtaccagtgaagatctagaggagccacaacggcataaaaagctggaaactcgtggccggcgaggtacgaagctgagatcagttggtgaaatccaagcaggtcttagacgcagcaagcgttcttctcgtcctcgtattaactatcgccaatatgatttttcggactcggatacggagcctcgaaaggcaaggaaatctgacgcatcagatcctgatgctggctccgatgccgagaatgatatggagctctcgacatcgagtcaagagcaagaggaggaagaggatgatagtcatgatgaagaaaatggtaataatgcgaatgataaaatggaggaggaccacactgcagaagaaaataaaatagaaccagaggaggagaaggagcagccacagcagcagcctgtagagaagatggatgctcccagcagggaaagtaaaagtgtaggaagaacattcctagatctaaacgagcttgcacctggaggtggctttgatgatggcccaagcttgacagtgagagatgacatggacaacatctagggaataaagttttgttttgatacatttcgggtgctgttggccagttttctgacttccaggcaagggcagatccatggtcctgatggcctgtgatgaatggtgcaactatggtttggcggtgtgagcttatggttatggctgcttcactgatttgcagcagcaggacaggcgatgttccacttgaagcgactttgagcttctccggtgcttatgttatacgtggagaccatgaggaggtagttttatgtatactacatgaaggtcgcaatcgatcatagctgtattgcggccaggctgctgctgcgttgcggccggtctctaggatataaatttattgcctccatttatttagtcttaggcattgtgatgtcaatgagaacatggagggaaacctgtacaccgagtgcggtccgtcggcattcgcccgaccttttccacttgtagattgtaggttttttaaagtccgggcgggattagttctgtatctatacctgacagtctgtttttttctgtcacacctgtgtagctgacattgagcttgtccctgaatgcacaccggcaatgcctctcgttcgctctatatggagaagatgctgcatgtattcagctgatgttgtagcctatggacatgtccattactcagagtggctggcctggtgattgctaatttgatgtatggtttataaaaccaaattcctgtgtgcgtattggttagttgcaaaactttgcaaagataaataatttgggggtgttctgttccattaaacattgcaaaattatgtgaaatgtttggtgaattgggcttcatgtccccagttgtgcttcggagaggctactcatttcttacaaagtagcctcatggtggatgtttgatgacttgtagtgttcctgtaaaataaaagggaaagtacc

SEQ ID NO: 218135 - DNA, 1398 bp, Zea Mays
atggctccgcgctctgtgctgcatgacggtcctggaaccgatagcttctccagcccgtctttgtcgttgttcgccactttggtttgggcacccaccgtcgtcatgggagcgtgtgctgctttcggaaggatatatgatatatgttcatgtccacacgctcgatatagattggcccagagcagacctaacaaggttcatggagcatggttaccaccttggttagcgacacactatgctcgttacatggaggttgtctcaggtcactggaattatcatggaaaacctgttgtgcagaatgttttgcataaggcatcagaaaaatcagcacatgcaaagaaatgggctgaaccacatattgagactgctaagatgaaatggattcctgttaaggagaaattggttgtcctcaagaaaaatgcagaaccttatgtacagaaggtatcgacaagatcagtggagttttatgagtcatcaagggatgctgtgacacctcacgttgtcaaagttaaagagtttgctcatccctactaccaggaagccaagaagttttctaagccttacattgatcaaattgctgagatcactaagccacatgttgagaaagttagaactactctgaagccatacactaagagagcagttcatgcgtatgggtcatttcttgcgtctgcaaccacataccatcgacaagctcaggcgaccatcatggactacctccatcagcatggggtacccaagtcacttgcaacgaaggagttagtttggttcctggcttctgccttgctagctctgcctgtcttcgtcatatacaggcttgtagtagagaccttctgaaggcctcgtggcggtaatggtaacggtaaccatggccagaagagacacaagcggcgatacgccgacaagtagaccaatctacccaacactttagggttcagcatgcggtgtttgcattgtcgcgcatctttgagcaatgagcaagattgggttgctcctccctcccggaggcactgctgaaccatacatggaggaaggagactcgggtcatgggcaccctttaccgtgagaagcgttgtagcctacaccaccaacatttctctttcttttacttcttcttcccaggtgtactatgaacttcggtgcaggtgcaacggaccttttatattatctgcactttgctggggttcagggggttaggactttgttttattggtcgttgtttattgtaacttgtgaattcgtttgagttcgtctgtttgtttttttgttggcgacctacattcgaacttgttagctaactggatgttgaagtttgactcaagttgctggagtgtcatgaacaggagaagagtgtctaactgacattgatgtaagcaaggagggcactaggaactttgtggt

SEQ ID NO: 218136 - DNA, 2334 bp, Zea Mays
cgtcctcccagcccacctgagccttctggcccgtcttaatggagggaacgcgaagctttctgccgaaacagtggggtttgggcgcttgtccacggccgccgccaacaacgagttcctgacctccgccgtctcttccccgctccctcgcgctcgcagtcgcagctccggccgccctattttgcggaattcggtagatttgtttccttcatgggtcgcaccatcaagaaggccaggaaagcgaaacccaagaagtctaagaagaaaactgaagcgtcttcatcgtccaatcatgcggttgcctctggtccggctaaggtctggcaaccgggtgtagatgcactggaagatggggaggagcttcagtttgatcctgaggcttataattatctccgaggttttggcattggctggtcttgcttgaggcggagaaagcttcattgaattatatcggtgttttcaagctttctaacataaatgggaaaaagcgggaacctataccagcttcagcagttgatggtgacactgatgtggatagtgacagcagcagtgatgaagaagatgaagaaattaacgaggatacaaagcccatcctacatctaaaaaaggtggctcatgcggggtgtgtaaatcggatacgctcaatgactcaaaagccacatatatgtgctacttggggagatactggtcatgttcaggtgtgggacttgagctccttccttaattctttagcagagtcaggggcatctgcacccaaagaagacgatataatccacaaacacttacccatgaaagtttttagtggccataaagatgagggatatgccattgattggagtccacttgttactggaagacttgtttctggtgactgcaataagtgcattcacctatgggaaccgacttcaaataactggaacgtagatgcaaacccatttgttggacacactgctagtgttgaagatctacagtggagtcccacggaagccgacatatttgcctcgtgttctgtggatggtacgatatcaatatgggatgtacgtacagggaagaaaccttctatttctgtcaaagctcataaagcagatgtgaatgttatctcatggaacaggcttgctagctgcatgatagcttctgggtgcgacgatggcagtttctcagttcatgatcttagatcaattcaggactcgttggtagcacattttgagtaccacaagaaagcaattacatccatcgagtggagcccacacgaagcatcatcattagctgtaacatctgaagaccaccagctcacaatctgggacctttcattggaacgggacaccgaggaggaggctgagttcagagcgaagatgaaagagcaggcaaacgcccctgacgatttgccgcctcagcttctctttgctcatcagggtcagagagacttgaaagaagtgcactggcacccacagataccgtcgatgatcatatcgacggcaatcgacggcttcaacgtgttgatgcctagcaacatcgatacaaccattcctggcagcacagatacagcaatgccgcctgctgagccataggttaggtgtttctggtagctcatgattccaggttcatgcggtggtgagtgtagttgccatttgtcatgtgtcgacagtgctatgctgtcgtgttggagcatgatgggaaaattttgattggctggcgttctatgataatatgattaggatttaatatgtgcatgctttttttagttttaccagcatctttgatggttgtgggccccatcatatgtcaaattatcaaccgatgttttcgttgcatttaagcatttaagaacagcgtacaggggggagcttaaggcttccaatttacagggtttaaatattcactgttgcaaaacaatctcaaatgctaaaataaaacgcggcattgcgaagagcttgttgagtcaaagtagatatattctttatctaattttaagctcatttgcaaaaaaaaaaaaccttgagaaagtgctgaaatcagttggcgccagcgccaacactaccaaaagtcatcatagcatacccaccggctagcatcatgctcatgcgggctaagatttgtatgcaaacttagcctctgtttgctccttataagattatatataatccaacttataaattatatgaacacttatgcattattctaataacttgcttatagattatcataatctaggtatctaaattatataattcatttgataatctatgttgtttgtttgtctcttaatttatttgagctgaattatataatctggtaaaaaaacagaaccttagaaagatgaggattgtaaaaaaatct

SEQ ID NO: 218137 - DNA, 3093 bp, Zea Mays
aacgcgaagctttctgccgaaacagtggggtttgggcgcttgtccacggccgccgccaacaacgagttcctgacctccgccgtctcttccccgctccctcgcgctcgcagtcgcagctccggccgccctattttgcggaattcggtagatttgtttccttcatgggtcgcaccatcaagaaggccaggaaagcgaaacccaagaagtctaagaagaaaactgaagcgtcttcatcgtccaatcatgcggttgcctctggtccggctaaggtctggcaaccgggtgtagatgcactggaagatggggaggagcttcagtttgatcctgaggcttataattatctccgaggttttggcattggctggtcttgcttgagttttgatgttgtgcgcgatcaacttagactcgtccgatcagagttccctcatacattatatggtgttgctgggacgcaggttgcgctagtctttacaccttcaaaatctaggcattgttttttttgcaaaaactaactattgttactattgaaagttgaattgcttttgatgtctatcacatagttctttaatgccttttgttatctaaattagaacctgtacaggaattgattttgtactgctgttcctgtttatgtgttttggattaaaaaagcgcaccattgctgattttaagctcagaaaagccatgccaaaaacgttttgtgagctctcgcttgcatttatatcattcctgttgccagaaattgtgatggattgcaagtgagtgaatttggtaaagattaatacaagcataaatgcgacaactttgtttgatgtatcaaccttactctttctggacatttcagctcaaaggaatggcataagatatggtgtaattgtaaatatcatttctgacaataaaattcatttctgacaataaaatttagtttctccctccctccctctctctctctccctcgtttaatctcgattagtcggactacttggcgattaatcgcgattggtccaaaacgatgattaatcgcgattaatcggacggcttgaaaacattgtgtaccaatcttactctgttgacatttcagcctaaacgaataacataatatttggtggaattgtaaataatcattttggagagtgtactctagtttgcctgagtcaaagagtgaaactcatgttgttcaggcggagaaagcttcattgaattatatcggtgttttcaagctttctaacataaatgggaaaaagcgggaacctataccagcttcagcagttgatggtgacactgatgtggatagtgacagcagcagtgatgaagaagatgaagaaattaacgaggatacaaagcccatcctacatctaaaaaaggtggctcatgcggggtgtgtaaatcggatacgctcaatgactcaaaagccacatatatgtgctacttggggagatactggtcatgttcaggtgtgggacttgagctccttccttaattctttagcagagtcaggggcatctgcacccaaagaagacgatataatccacaaacacttacccatgaaagtttttagtggccataaagatgagggatatgccattgattggagtccacttgttactggaagacttgtttctggtgactgcaataagtgcattcacctatgggaaccgacttcaaataactggaacgtagatgcaaacccatttgttggacacactgctagtgttgaagatctacagtggagtcccacggaagccgacatatttgcctcgtgttctgtggatggtacgatatcaatatgggatgtacgtacagggaagaaaccttctatttctgtcaaagctcataaagcagatgtgaatgttatctcatggaacaggcttgctagctgcatgatagcttctgggtgcgacgatggcagtttctcagttcatgatcttagatcaattcaggactcgttggtagcacattttgagtaccacaagaaagcaattacatccatcgagtggagcccacacgaagcatcatcattagctgtaacatctgaagaccaccagctcacaatctgggacctttcattggaacgggacaccgaggaggaggctgagttcagagcgaagatgaaagagcaggcaaacgcccctgacgatttgccgcctcagcttctctttgctcatcagggtcagagagacttgaaagaagtgcactggcacccacagataccgtcgatgatcatatcgacggcaatcgacggcttcaacgtgttgatgcctagcaacatcgatacaaccattcctggcagcacagatacagcaatgccgcctgctgagccataggttaggtgtttctggtagctcatgattccaggttcatgcggtggtgagtgtagttgccatttgtcatgtgtcgacagtgctatgctgtcgtgttggagcatgatgggaaaattttgattggctggcgttctatgataatatgattaggatttaatatgtgcatgctttttttagttttaccagcatctttgatggttgtgggccccatcatatgtcaaattatcaaccgatgttttcgttgcatttaagcatttaagaacagcgtacaggggggagcttaaggcttccaatttacagggtttaaatattcactgttgcaaaacaatctcaaatgctaaaataaaacgcggcattgcgaagagcttgttgagtcaaagtagatatattctttatctaattttaagctcatttgcaaaaaaaaaaaaccttgagaaagtgctgaaatcagttggcgccagcgccaacactaccaaaagtcatcatagcatacccaccggctagcatcatgctcatgcgggctaagatttgtatgcaaacttagcctctgtttgctccttataagattatatataatccaacttataaattatatgaacacttatgcattattctaataacttgcttatagattatcataatctaggtatctaaattatataattcatttgataatctatgttgtttgtttgtctcttaatttatttgagctgaattatataatctggtaaaaaaacagaaccttagaaagatgaggattgtaaaaaaatct

SEQ ID NO: 218138 - DNA, 706 bp, Zea Mays
cgtccaactcgcatccaacgcccctgccgcatcccgcgtccctcccgcactcgtctctgccgcaccgtacgcgcaggcccgcccgcccgctcccattccccacccccacctatggcggcgctctccgcgcccctccgcgccatcgccgccggatcccgcgtcgccgcgtccgaccccgtcaaggtctcgtgcgtgaggagcactggctcagctcacttcggctgcgcctccatcgatctgccctcgcgttctatgggtccggcggcgaagggaaggcaagatgtacaccgcgaggaagaagatccagaaggagaagggccttgagccctccgagttcgaggactccgttgcccaggtgagcatagcgccaacccacctcctctctcctccttttactgcgtttattttccttgaactgctgctctgtttgtttgtggttcccaatgtgtcggggttgtgatgtgctttttggcttgttgtacctgcatgctttatttgatctggagaacgggaaccaggagctcaagagcgacctcaaggacctgtacatcaacaatgctatccagatggatgttaccgggagcaggaaggctgttgtcatccacgtcccataccgcctgcgcaaggcctttaggaagatccatgtcagactcgtcagggagctggagaagaaattcagcggcaagaacaacactttttttttaac

SEQ ID NO: 218139 - DNA, 2670 bp, Zea Mays
tggagttctaaggaggatcgttagctcgttggtgacaatcttgatctgacagatggctttagattctcgtcttaaggcaaattacaaacattgaataacaatctgtcttttaccaagatggcagaaaacgatactgttcagttacagagagcaatattcgcccagtacattatgatgaaaaggttatttatggagttagaagtggaaagagaagcttcagcaactgctgcaagtgcggccatgtcaatgatccgaaagcttcaaaaagagaaggatgcagaaagaatggaagcatggcaatacaagagaatagctgaggaaaagattaaccacactaacagagcactggatattctgaaggaggtcgtggagctgaaacaattggagatctcgtatctgaggtaccaattgcaggtgtgtaaacagaagctactggatgctggcattgacgattgtgacgttgcagatgagacaatagatagtgataaatctctgtttggaagaaataacatggagaatctttgtcataaaatcaaaagaaattcctctctgccaacgttgcagttgaataaacagtgtacagatatggacatcaagaagaatggtggagtaccatccgcaaggagcaggctgactgatgacggttgtgagcagatttcaatagatgttatggctctcgagcccaaggaaagcttcgcaacagatttgaactttagaggaaagcatggtgaagaagcacattctccaagaagtggaagtgaatctcagactttggatgaccctccgtgttgttcctcattctcagtggtgagtcatcaggcagatatatgcagtgatggagcagttcagaccagggaagacaaagaatgtacagtaaaccatgatcaactcaaggattcttgtgtacatgagtctgagacttcggatgagcctccgtgctcttcctcgttgtcagtggtgagtcaccaggcagatatatgcagtgatggagaagttccgaccagggaacataatgaatgtgcggtaaaccatgatcacctcaaggattcttgtgtacatgactctgagacgttggatgagcctccgtgctcttcctcgttctcagtggagagtcaccaggcagatatatgcagtgatgcagcagttcagaccagggaagataatgattgtacagtaaaccatgatcaactgaaggattcttgtgtacatgatgactctgagacgttggatgagcctccgtgctcttcctcgttctcagtggtgagccatcaggcagatatatgcagtgatggagaagttccgaccagggaagataatgaatgtgcggtaaaccatgatcacctcaaggattcttgtgtacgtgactctcagactttggatgagcctccgtgttcttcctcgttctcagcgggggcagatatatgcagtgatggagcagttcaggccaggggagatatggaatgcacagtagtaaatcatgtcaggctgaaggattcttgtgctggtactgaaattggcgaactggtagctcatccattaagcgaagtcgacccactccaaactccaaagagaagcaacaaagcaactgattcctcgtgtactgggagtgaaataacaacagtagaggaacctcaactgtctcccaggggtgtcaccaaagcgcgaggcccccgcaacctgtctaggttcgctgaaacaagaaaggttgggtcgatgaataatgtggataggcatgtgcgccggagctccgggacttactcgccacgagcagccggtgttgagcggaccatgtcgaagctgaagcgcgtgcaaagcgagaagatggtcgagctaggcgaccctaggactggcagagaacagatcatcatgctgaaggaggtctacgagcagctccgtatgatagagtcacatatgagaccttctggttcccaggaaagcccccgaagtgccacgtcgttagattccgttatggaggcagctctgtccttctccctatagtcgggtcaggcaagcatgtcttgaggctatgtaccacaattcaagcggttggaaattagacgcccaaggttgtgtgtttggttgccggccgagattagccacaccaaactgtggcggcccctgaagcttagcgatggcgcgctgtggcgggcaaccaccaaatgttcagcacatttttaggacatcagtgcaaaaaaaaaagaatgacaggcatttgatgtgtgctcagtacagcgaaatactgggagtttttttatgtgtgctcagtacgctgtaatctgatcctgtgcaaaacatgcatatattgtatgctatgtagttcactgtggtctgcgcagttgtagaagttatgtactatgtatgtgttcatgaagccaagtagtccagcagagacaggagaccggtatctcatgatcgtggctgtagacaagtgcttcttgacaaccagttagatctctctcttgacaaatcagagcacctggaggcattaaaaaaagccacacaagaggacacccaacaatgtcagcacgacagcattctatgcggattcgaggaatactggaatcgaattggtttgatccacaagtttttttttatttccagcaggttttgtcactgcctcttaacctccgaatccctacgcgtggcgtcgtagccacttacgcaatgtag

SEQ ID NO: 218140 - DNA, 4336 bp, Zea Mays
ccgcaccaccccaaagcccacaggaggaagacctagctagacacctgacctagggtttcccttccttggtctccttctccagggccgggagggaacccgtccatctctgagagccgagatcgctccatctcccccacatgccgctccgggagggagccaagcgtgtctccagcgcgcgccactatgcccccgccgcgccaacacccgcgcccgcgggggcacccgtcccgccccaccgcccgccgcgatctgtctccgccgctggctccatatccactgcctccgcccgcaagccgccagagccgcttcgaagggccgtcgccgactgcctctcgccgcccgccccgcacacccatggcccagctgcagccgccgcttctgccaccgcggaggcttcacggacgctccgggattatatagccaacccttcaaccatggatatggcttataatgtcctcattgaccatgcacttgcagaaagtgatcgtagcccagcagttgttccgagatgcgtgtcattgttaaagagatatcttatccggtacattccaagggtgcaaactctgcgacaaattgatctgttttgtgcgaatacgattgcaaaatgtgaaccgatggcaaataatagagcagcatcttttgccaagaataatgtatcagcagcagctgcaataaattcttcatcccttgccccaccaatatccaactttgcttcagcatctcttgtgaagtctttaaactatgttcgctcattggttgcaaggcatactccaaagttgtcattccaatcaatagtcgcggcaaagcagtcacttccttcactttcatcatttctgaatagcaagtgaaaaagttgatgtgggtgaacctgtagatgatagcaaatatatatccttcgacattttaagctggcgatggcatgtgtatggcgaacggcagtcgtccttatctgccaaagaaagcagtgattttgtgggtcttcaagattttcatatacatggttttcttgaagtcggtgctgcagctcttctagttggggatatggatgcgaaaattaatgatcaacagtggaaatattctgttatccaggaatttccagatattgatttgttacaaccttcatcttctgccgcaagtacttttgcgtcatcacaaagtcatttaaaagcaataactgcttcaaaacgcatgagatcagctccaaatcaagtctggatgaacataccaataaacacattccagcctcgagcacggcctctttttcagtacagatactacagtgagcagcaacccttaagattgaatcctgctgaaatttctgaagtcatagctgaagtttgttcagaagcaacttcaaatgcaaatcagttgattgttccatcaagattgagcacccagagtcggcaaccttcagcagatgtggcattcagtgtccttatcaaacttgtcattgacatgtatatgatggactccgagactgctgctcctctgacactttatatgcttgagggtatgctgagctctcaaaagtcatcagccagaacgaaggctcttgatttgatcctaaatctgggggtacatgcacacctgctgcaacctatggttattggagatgcgccgcttatagataaaagtgaatctgtgaaccgttcttatctgagcaatgaatacggatcaagtataaatgaaccgagggaagcagaacctgaagtagaacagaagatcagtcctgctattgatcaatttgaatcatggcttcttaaaatgctttttgaggttctccttctcctagtacagatagaggagcgacaagagatcgtgtgggcctcagctttgagttgtctattttactttgtttgtgatggaggaaaaattatcaggagtagactgggaggtctggacataagggtggttaagactcttcttgagattagtgtggagcactcttgggcaaaagtagtgcacagcaagctcatttgcatgttatcaaatatgatgtaccaagtatcagatttaactcagaatggtgtttctgacacacattttgttcctgagcggattgatcttcttggtgggattgactacatttgtcttgagtattcacgagccaactcaagggaagagaagcgggatttgttctttgtcatttttgactacgtagtgcatcaaataaatgaggcatgcttggctggtggtatttcaacctatacttatgatgatgcccagccccttgcttcccttcttgcctttgctgatgctcctgaggctttctacatatctgtgaagcacggcgttgaaggcgtcggagacatgctaagaaaagctatatcagcagcattatctcagtctgctcaatatgaccaattgaatgtgcttctggataaggttatgaggaaacttgatggaactgccagcacattttccaggattgacaatgagttttcttatatgatccaagtaacgaaatcatgcaagtgttttggcagcattaaagatggatgtgatgatgctgatgtagcgcttagagccaggctttgctgggcaactttgcactcacttcttcactcacatatttcatcatataggcaccatggatatatttggttagttgaattgctcctttcagaaatcagtgaagaaacagatggttctgtatggtctaaaatccaaaagcttcaagaggaaattgaagttgctggtagccaagacctatcatgttcagaagtctctctgcctgtttgtatgctttgtgggcttctaaagtcaaaacacaatttcattaggtggggattcctatatgtgctggacaaatttcttatgcgttgcaaattattattggatgacaatgacatgcaagaccacacaactgctgatcataataaaaattgtcttgataaagcttttgcggttatagatattatgaatagtgctttgttacttgttgttcaaaacaatgagacggaccatatcaacatattaaagatgtgtgacatgctgttctctcaattatgcctgagaattccatccacaaatgcgatgcaagttaggggtcttcagtcccttggtcaactttttggttatacatctaagaacatcgatagtcatttggaaacccttgcatctcaccaaagtattggaaataagaatatttgccggagtgagacattgcaagatattggcatagatcaatctggtcaatccacttctttctgtgaagcatcaatggcagcactgcttctgagagggctcgcgatagccccaatgcagcttgtagcccgtgtaccaacctctttgtttttctggccattgatacagcttgaaggggcagccagtgatgacattgcattgggtattgctgttggtagcacaggaagaggcaaccttcctggtgctacatcagatatccgagcagcactccttttacttttgatcggtaaatgcacagctgatcaggaggcactgaaagaggtagaaggcaatgagttcttcaggggtcttctggatgacacagattcaagggtagcatactattctgccgcttttcttttgaagagaatgatgacagaggaaccagagatataccaacggatgcttcaaagcctcatctcaaaagctcaacagtgtaacaatgagaaacttctggagaacccataccttcagatgcgtgggatattgcagttatcaaatgacctaggagttcaatgataagatcgtgatgacatttcaatggataaagctctaagttagaatcactacttctggctgtgtttattgcagagaacctgaagatgttccgaactaagttttgcagatgctatgtgaatcatgtaaattattgctttggccagatgcatgtacagatccatgaatttctttattctttgttagactagtcacagtccaagggagtcacagattaacaagataatctgatgatcatcctgtgttatggacacagtgcattgtggtttaccaacctggacgacttgacaaaggtttaagccaaggtggcgtagatgtgactccctacaattttgtattgcagaaaccgttgagatctgaggcaaggcattatatatattttttgggcgagacatgctcggttcaataaatatttgtgtgttcgctttgcatatatggtaactgatcagaggagtgtagatttgtattgcggagtaacaatgtaaatgttaggtttgaatatactgatttcgagatgatgtaatccttctatactagcttagcttccatgttggttgtttaatttcgataagaggttgtttacttttatatgctgtttggtttacatatttgtgacgtgatgaataaccgataa

SEQ ID NO: 218141 - DNA, 4423 bp, Zea Mays
ccgcaccaccccaaagcccacaggaggaagacctagctagacacctgacctagggtttcccttccttggtctccttctccagggccgggagggaacccgtccatctctgagagccgagatcgctccatctcccccacatgccgctccgggagggagccaagcgtgtctccagcgcgcgccactatgcccccgccgcgccaacacccgcgcccgcgggggcacccgtcccgccccaccgcccgccgcgatctgtctccgccgctggctccatatccactgcctccgcccgcaagccgccagagccgcttcgaagggccgtcgccgactgcctctcgccgcccgccccgcacacccatggcccagctgcagccgccgcttctgccaccgcggaggcttcacggacgctccgggattatatagccaacccttcaaccatggatatggcttataatgtcctcattgaccatgcacttgcagaaagtgatcgtagcccagcagttgttccgagatgcgtgtcattgttaaagagatatcttatccggtacattccaagggtgcaaactctgcgacaaattgatctgttttgtgcgaatacgattgcaaaatgtgaaccgatggcaaataatagagcagcatcttttgccaagaataatgtatcagcagcagctgcaataaattcttcatcccttgccccaccaatatccaactttgcttcagcatctcttgtgaagtctttaaactatgttcgctcattggttgcaaggcatactccaaagttgtcattccaatcaatagtcgcggcaaagcagtcacttccttcactttcatcatttctgaataggtccttactttctcaactaactccagaagttattagcaacagagaacatcttgaatcgaaggaatgccatagctcacctgattttatatcatcagcaagtgaaaaagttgatgtgggtgaacctgtagatgatagcaaatatatatccttcgacattttaagctggcgatggcatgtgtatggcgaacggcagtcgtccttatctgccaaagaaagcagtgattttgtgggtcttcaagattttcatatacatggttttcttgaagtcggtgctgcagctcttctagttggggatatggatgcgaaaattaatgatcaacagtggaaatattctgttatccaggaatttccagatattgatttgttacaaccttcatcttctgccgcaagtacttttgcgtcatcacaaagtcatttaaaagcaataactgcttcaaaacgcatgagatcagctccaaatcaagtctggatgaacataccaataaacacattccagcctcgagcacggcctctttttcagtacagatactacagtgagcagcaacccttaagattgaatcctgctgaaatttctgaagtcatagctgaagtttgttcagaagcaacttcaaatgcaaatcagttgattgttccatcaagattgagcacccagagtcggcaaccttcagcagatgtggcattcagtgtccttatcaaacttgtcattgacatgtatatgatggactccgagactgctgctcctctgacactttatatgcttgagggtatgctgagctctcaaaagtcatcagccagaacgaaggctcttgatttgatcctaaatctgggggtacatgcacacctgctgcaacctatggttattggagatgcgccgcttatagataaaagtgaatctgtgaaccgttcttatctgagcaatgaatacggatcaagtataaatgaaccgagggaagcagaacctgaagtagaacagaagatcagtcctgctattgatcaatttgaatcatggcttcttaaaatgctttttgaggttctccttctcctagtacagatagaggagcgacaagagatcgtgtgggcctcagctttgagttgtctattttactttgtttgtgatggaggaaaaattatcaggagtagactgggaggtctggacataagggtggttaagactcttcttgagattagtgtggagcactcttgggcaaaagtagtgcacagcaagctcatttgcatgttatcaaatatgatgtaccaagtatcagatttaactcagaatggtgtttctgacacacattttgttcctgagcggattgatcttcttggtgggattgactacatttgtcttgagtattcacgagccaactcaagggaagagaagcgggatttgttctttgtcatttttgactacgtagtgcatcaaataaatgaggcatgcttggctggtggtatttcaacctatacttatgatgatgcccagccccttgcttcccttcttgcctttgctgatgctcctgaggctttctacatatctgtgaagcacggcgttgaaggcgtcggagacatgctaagaaaagctatatcagcagcattatctcagtctgctcaatatgaccaattgaatgtgcttctggataaggttatgaggaaacttgatggaactgccagcacattttccaggattgacaatgagttttcttatatgatccaagtaacgaaatcatgcaagtgttttggcagcattaaagatggatgtgatgatgctgatgtagcgcttagagccaggctttgctgggcaactttgcactcacttcttcactcacatatttcatcatataggcaccatggatatatttggttagttgaattgctcctttcagaaatcagtgaagaaacagatggttctgtatggtctaaaatccaaaagcttcaagaggaaattgaagttgctggtagccaagacctatcatgttcagaagtctctctgcctgtttgtatgctttgtgggcttctaaagtcaaaacacaatttcattaggtggggattcctatatgtgctggacaaatttcttatgcgttgcaaattattattggatgacaatgacatgcaagaccacacaactgctgatcataataaaaattgtcttgataaagcttttgcggttatagatattatgaatagtgctttgttacttgttgttcaaaacaatgagacggaccatatcaacatattaaagatgtgtgacatgctgttctctcaattatgcctgagaattccatccacaaatgcgatgcaagttaggggtcttcagtcccttggtcaactttttggttatacatctaagaacatcgatagtcatttggaaacccttgcatctcaccaaagtattggaaataagaatatttgccggagtgagacattgcaagatattggcatagatcaatctggtcaatccacttctttctgtgaagcatcaatggcagcactgcttctgagagggctcgcgatagccccaatgcagcttgtagcccgtgtaccaacctctttgtttttctggccattgatacagcttgaaggggcagccagtgatgacattgcattgggtattgctgttggtagcacaggaagaggcaaccttcctggtgctacatcagatatccgagcagcactccttttacttttgatcggtaaatgcacagctgatcaggaggcactgaaagaggtagaaggcaatgagttcttcaggggtcttctggatgacacagattcaagggtagcatactattctgccgcttttcttttgaagagaatgatgacagaggaaccagagatataccaacggatgcttcaaagcctcatctcaaaagctcaacagtgtaacaatgagaaacttctggagaacccataccttcagatgcgtgggatattgcagttatcaaatgacctaggagttcaatgataagatcgtgatgacatttcaatggataaagctctaagttagaatcactacttctggctgtgtttattgcagagaacctgaagatgttccgaactaagatgctatgtgaatcatgtaaattattgctttggccagatgcatgtacagatccatgaatttctttattctttgttagactagtcacagtccaagggagtcacagattaacaagataatctgatgatcatcctgtgttatggacacagtgcattgtggtttaccaacctggacgacttgacaaaggtttaagccaaggtggcgtagatgtgactccctacaattttgtattgcagaaaccgttgagatctgaggcaaggcattatatatattttttgggcgagacatgctcggttcaataaatatttgtgtgttcgctttgcatatatggtaactgatcagaggagtgtagatttgtattgcggagtaacaatgtaaatgttaggtttgaatatactgatttcgagatgatgtaatccttctatactagcttagcttccatgttggttgtttaatttcgataagaggttgtttacttttatatgctgtttggtttacatatttgtgacgtgatgaataaccgataa

SEQ ID NO: 218142 - DNA, 934 bp, Zea Mays
tgaacttttcagttattcaagaggatggcattagcctgatagagagcgcccatggtatcaaggacttctcgattacaagcatgaaaggaggttaccgccgcgtactccaacgccctattgattttgaatgggacctgatgacttacacagatgacaatacacctttagtaccaactgatttagatgttctatcagaaacccagttatcagaaacaaatgagccattatctgatgggacttgcagttgtccatcaagtgattccaggttgcaagttttattggacacctctggaccaaccattgaagctagctcagtagaaaccaaatcaattggcatctcagatctgtcaccagagaaactggctgtgaaattagaatttactctaccagcatcatcttatgctacaatggccataagggagttgacgaaaacttcaacttcggttgcttgccagaaaacattaaacggctgaccaagccttgcagtgtaaaatgctttcttcgcaagctggtatccattgtgacaaaacacaccatgtgggtttaactgggcccaggggatggaaccaagcttcggaaaagaaggaacatttcggttctttgctctcactaggaatgatgttccatgattttttagaaaactggaacaggtgttggtctgacatacatggatgtaaacttagatgactgaaaagtagctttaccttttgcagacagatctttttgtctttagtttatgcatcgtatattgtgatgtctgaactggggtcgcaacctcgtgggcatgcacgtatggccatgcacttctttgaggcgtgcactacctcataacgttcacgtccttaccagcactgggtcattttgtggacggcaatcatatcctgaaagaatatgcatagcgagcaacagaagctatccattctgtgttcgctct

SEQ ID NO: 218143 - DNA, 2610 bp, Zea Mays
cgcgcgcacaagcggacagccgattgcttccccgaatctcttcccccaatccggcgcccggcagaatgcgaggccgccacctcctaaaacccatgcccgtcctcctcaacactaccccttcccggctccccgccgcccacttccgcgtccgtgacgcagcccgcccgcccgcgccgctggcagagcccgacgtcggcatctctcgcttcgcctcctccatcccgggcttccgcggcgcgctgaagcagcgctactccgacttcatcgtccacgaggtcgcctgcgacggcgccctcgtccgcctcacttccttcgatctccccgacatcgaggagagtggagataatgcggaggacggtgattccgacgccaccgcggatccatcgcgggcgctcgagtcgttccggctgctctgcggcgaagcggattaccacgccttgaggggattcctggagagggtttcggagggaggtgatggttatttgtcgccaatcattctgtcagctgatgcagataaggcacatcgatccgaggtgcacgagttcatcaagaggaatttcaagttcctgaacacggatacagttgagcacaatgatggtattcagaaatgcattagggtgcgcttgggttcagggccacgctgtggtaggggaaggaacaggagaggcatggacacttcaggctggagagatgacaagccgtttgacagtagaggctctacattctggccttatcacctggggaagttcctgaggtttcacctttataaggagaacaaggacacgcatgaggcactaggggttataggaaaattggcaggggttcagccaagatcgtttggatttgcagggacaaaggataaacgtgctgttacaacccaacaggtgacagtttttaaagtgcatgctagcaggctggctgctcttaatagcaaactcacagttacgtgaaggagggccttgctcttggtcgactcagagggaaccactttgcaattactttgaggaatgttattgcagaatcggccgatgatataaatgctgcagttaatggtctaagtaaaaatggatttatcaattactatggcttacagcgctttggcagcggttctgtacctacccactttgttggtgctgctttgctcagaggagaatggagacatgctgttagcttgattcttggtacaagggtacattataaatggcatgttgatgttgatgcagcacttaggggcatgccccgacatctcacagtggagagagctattcttcagagattgaagaactaccctggcaactatctacaagcactaatggctatacctaaagcactgaggctgatgtatgtacatagctaccagagttacttatggaatcatgctgcaagtatgagagtggaaaagtatggtatttcacaagttgtagaaggtgacttagtttacaaaactgggtcctcccttggagaagcaattaccacagatacatttgatgacgatgatagccacgttaattcacctgaaatggaaatgtcttgtgaaacacttactgaagaaatgatccaatctgtgaaggtagttgattctgaagatttattgaaggcagtctattcgtttgaggatgttgttctccctttgcctgggtcagaaacattgtttcctgggaatgaagttactatgatttatcatgaaatagccaagaaggatggcattagcctgatagagagcgcccatggtatcaaggacttctcgattacaagcatgaaaggaggttaccgccgcgtactccaacgccctattgattttgaatgggacctgatgacttacacagatgacaatacacctttagtaccaactgatttagatgttctatcagaaacccagttatcagaaacaaatgagccattatctgatgggacttgcagttgtccatcaagtgattccaggttgcaagttttattggacacctctggaccaaccattgaagctagctcagtagaaaccaaatcaattggcatctcagatctgtcaccagagaaactggctgtgaaattagaatttactctaccagcatcatcttatgctacaatggccataagggagttgacgaaaacttcaacttcggttgcttgccagaaaacattaaacggctgaccaagccttgcagtgtaaaatgctttcttcgcaagctggtatccattgtgacaaaacacaccatgtgggtttaactgggcccaggggatggaaccaagcttcggaaaagaaggaacatttcggttctttgctctcactaggaatgatgttccatgattttttagaaaactggaacaggtgttggtctgacatacatggatgtaaacttagatgactgaaaagtagctttaccttttgcagacagatctttttgtctttagtttatgcatcgtatattgtgatgtctgaactggggtcgcaacctcgtgggcatgcacgtatggccatgcacttctttgaggcgtgcactacctcataacgttcacgtccttaccagcactgggtcattttgtggacggcaatcatatcctgaaagaatatgcatagcgagcaacagaagctatccattctgtgttcgctct

SEQ ID NO: 218144 - DNA, 2893 bp, Zea Mays
caaaagcgcccacgcgcgcacaagcggacagccgattgcttccccgaatctcttcccccaatccggcgcccggcagaatgcgaggccgccacctcctaaaacccatgcccgtcctcctcaacactaccccttcccggctccccgccgcccacttccgcgtccgtgacgcagcccgcccgcccgcgccgctggcagagcccgacgtcggcatctctcgcttcgcctcctccatcccgggcttccgcggcgcgctgaagcagcgctactccgacttcatcgtccacgaggtcgcctgcgacggcgccctcgtccgcctcacttccttcgatctccccgacatcgaggagagtggagataatgcggaggacggtgattccgacgccaccgcggatccatcgcgggcgctcgagtcgttccggctgctctgcggcgaagcggattaccacgccttgaggggattcctggagagggtttcggagggaggtgatggttatttgtcgccaatcattctgtcagctgatgcagataaggcacatcgatccgaggtgcacgagttcatcaagaggaatttcaagttcctgaacacggatacagttgagcacaatgatggtattcagaaatgcattagggtgcgcttgggttcagggccacgctgtggtaggggaaggaacaggagaggcatggacacttcaggctggagagatgacaagccgtttgacagtagaggctctacattctggccttatcacctggggaagttcctgaggtttcacctttataaggagaacaaggacacgcatgaggcactaggggttataggaaaattggcaggggttcagccaagatcgtttggatttgcagggacaaaggataaacgtgctgttacaacccaacaggtgacagtttttaaagtgcatgctagcaggctggctgctcttaatagcaaactcacagttacgtgaaggagggccttgctcttggtcgactcagagggaaccactttgcaattactttgaggaatgttattgcagaatcggccgatgatataaatgctgcagttaatggtctaagtaaaaatggatttatcaattactatggcttacagcgctttggcagcggttctgtacctacccactttgttggtgctgctttgctcagaggagaatggagacatgctgttagcttgattcttggtacaagggtacattataaatggcatgttgatgttgatgcagcacttaggggcatgccccgacatctcacagtggagagagctattcttcagagattgaagaactaccctggcaactatctacaagcactaatggctatacctaaagcactgaggctgatgtatgtacatagctaccagagttacttatggaatcatgctgcaagtatgagagtggaaaagtatggtatttcacaagttgtagaaggtgacttagtttacaaaactgggtcctcccttggagaagcaattaccacagatacatttgatgacgatgatagccacgttaattcacctgaaatggaaatgtcttgtgaaacacttactgaagaaatgatccaatctgtgaaggtagttgattctgaagatttattgaaggcagtctattcgtttgaggatgttgttctccctttgcctgggtcagaaacattgtttcctgggaatgaagttactatgatttatcatgaaatagccaagaaggatggcattagcctgatagagagcgcccatggtatcaaggacttctcgattacaagcatgaaaggaggttaccgccgcgtactccaacgccctattgattttgaatgggacctgatgacttacacagatgacaatacacctttagtaccaactgatttagatgttctatcagaaacccagttatcagaaacaaatgagccattatctgatgggacttgcagttgtccatcaagtgattccaggttgcaagttttattggacacctctggaccaaccattgaagctagctcagtagaaaccaaatcaattggcatctcagatctgtcaccagagaaactggctgtgaaattagaatttactctaccagcatcatcttatgctacaatggccataagggagttgacgaaaacttcaacttcggtgacttcctgttcaattcttttttttggttttgtaaatacttaaattatctttgctactcttttttttcatcttttggtcattgaaccgaaccatttgagctccaccacgatcacataattttctttagggcatctcactcaatggtttctctttgacagactattatcgtacaaaacaatgtattcagtttgcactccaatgcttgaactcatccaccaacatcctctcttatagccataatgttatgttttcctttggtaatgtacaggttgcttgccagaaaacattaaacggctgaccaagccttgcagtgtaaaatgctttcttcgcaagctggtatccattgtgacaaaacacaccatgtgggtttaactgggcccaggggatggaaccaagcttcggaaaagaaggaacatttcggttctttgctctcactaggaatgatgttccatgattttttagaaaactggaacaggtgttggtctgacatacatggatgtaaacttagatgactgaaaagtagctttaccttttgcagacagatctttttgtctttagtttatgcatcgtatattgtgatgtctgaactggggtcgcaacctcgtgggcatgcacgtatggccatgcacttctttgaggcgtgcactacctcataacgttcacgtccttaccagcactgggtcattttgtggacggcaatcatatcctgaaagaatatgcatagcgagcaacagaagctatccattctgtgttcgctct

SEQ ID NO: 218145 - DNA, 2571 bp, Zea Mays
cgcgcgcacaagcggacagccgattgcttccccgaatctcttcccccaatccggcgcccggcagaatgcgaggccgccacctcctaaaacccatgcccgtcctcctcaacactaccccttcccggctccccgccgcccacttccgcgtccgtgacgcagcccgcccgcccgcgccgctggcagagcccgacgtcggcatctctcgcttcgcctcctccatcccgggcttccgcggcgcgctgaagcagcgctactccgacttcatcgtccacgaggtcgcctgcgacggcgccctcgtccgcctcacttccttcgatctccccgacatcgaggagagtggagataatgcggaggacggtgattccgacgccaccgcggatccatcgcgggcgctcgagtcgttccggctgctctgcggcgaagcggattaccacgccttgaggggattcctggagagggtttcggagggaggtgatggttatttgtcgccaatcattctgtcagctgatgcagataaggcacatcgatccgaggtgcacgagttcatcaagaggaatttcaagttcctgaacacggatacagttgagcacaatgatggtattcagaaatgcattagggtgcgcttgggttcagggccacgctgtggtaggggaaggaacaggagaggcatggacacttcaggctggagagatgacaagccgtttgacagtagaggctctacattctggccttatcacctggggaagttcctgaggtttcacctttataaggagaacaaggacacgcatgaggcactaggggttataggaaaattggcaggggttcagccaagatcgtttggatttgcagggacaaaggataaacgtgctgttacaacccaacaggtgacagtttttaaagtgcatgctagcaggctggctgctcttaatagcaaactcacaggtatcagagttggagactttagttacgtgaaggagggccttgctcttggtcgactcagagggaaccactttgcaattactttgaggaatgttattgcagaatcggccgatgatataaatgctgcagttaatggtctaagtaaaaatggatttatcaattactatggcttacagcgctttggcagcggttctgtacctacccactttgttggtgctgctttgctcagaggagaatggagacatgctgttagcttgattcttggtacaagggtacattataaatggcatgttgatgttgatgcagcacttaggggcatgccccgacatctcacagtggagagagctattcttcagagattgaagaactaccctggcaactatctacaagcactaatggctatacctaaagcactgaggctgatgtatgtacatagctaccagagttacttatggaatcatgctgcaagtatgagagtggaaaagtatggtatttcacaagttgtagaaggtgacttagtttacaaaactgggtcctcccttggagaagcaattaccacagatacatttgatgacgatgatagccacgttaattcacctgaaatggaaatgtcttgtgaaacacttactgaagaaatgatccaatctgtgaaggtagttgattctgaagatttattgaaggcagtctattcgtttgaggatgttgttctccctttgcctgggtcagaaacattgtttcctgggaatgaagttactatgatttatcatgaaatagccaagaaggatggcattagcctgatagagagcgcccatggtatcaaggacttctcgattacaagcatgaaaggaggttaccgccgcgtactccaacgccctattgattttgaatgggacctgatgacttacacagatgacaatacacctttagtaccaactgatttagatgttctatcagaaacccagttatcagaaacaaatgagccattatctgatgggacttgcagttgtccatcaagtgattccaggttgcaagttttattggacacctctggaccaaccattgaagctagctcagtagaaaccaaatcaattggcatctcagatctgtcaccagagaaactggctgtgaaattagaatttactctaccagcatcatcttatgctacaatggccataagggagttgacgaaaacttcaacttcggtgacttcctgttcaattcttttttttggttttgtaaatacttaaattatctttgctactcttttttttcatcttttggtcattgaaccgaaccatttgagctccaccacgatcacataattttctttagggcatctcactcaatggtttctctttgacagactattatcgtacaaaacaatgtattcagtttgcactccaatgcttgaactcatccaccaacatcctctcttatagccataatgttatgttttcctttggtaatgtacaggttgcttgccagaaaacattaaacggctgaccaagccttgcagtgtaaaatgctttcttcgcaagctggtatccattgtgacaaaacacaccatgtgggtttaactgactgcagagcaggaagatgagcacttaagtagcagtttaagttagtttgaaa

SEQ ID NO: 218146 - DNA, 4748 bp, Zea Mays
gttgctgttcccctgcgaggcccgcgtctccccttcgtctcaacacccaccgcctcctcgccggagccagtaagcttccggcgaagaaatccggcgggcacatcacaagggggccgagcagggggacctaggcgagcgccggaatgggggccagcgcccgggggctcgccgtcgtcgtggctctagggttagataggtgtccgtagcttttttcttcgctcgccctcccccacgcggccagggtgtgcagccccggcgtcgcattgggtcccgggacgaccgtaaggccgcgtgatccacccgtgctcgagctcggacagggtcccggttgcgtggcatgggggcatctcttccgcctgctcccgctgcctgcgagtttggcaccgtttttgagctctgaagaggaggaggtggtggcagcaggcaccgatctgaggctggtgggtttttggaagcaggagtcgttgcatcacattgggagcaagtcagttgcatcttctccaattgaaaagccccaacccattggtacaaaaacaatgggtcgggtagatccacaaccatacaagccgagaggccagaagtctgcatttagccttgaacacaaaacttttggtcaagagaggcatgttaacatgccaccatctctgtggagagctgatcaagacccttatgttcaatctgattcatctttatttcccgatggaaggagtactaatccatatgaggcctacaacgagaatgggcttttctcaagctccctgtcagaaatttttgacagaaaattgggactgagatcaaatgatgtgcttctacatcaaccacttgaaaaggttgaaccaactcatgtagatgatgagccctttgagttaacagaggaaatcgaggctcaaataataggaaacatacttcctgatgatgatgatctactatcaggtgttgatgttgggtacacagcccatgctagcaatggtgatgatgttgatgatgatatattttacactggaggtgggatggaactggagaccgttgaaaataaaaaaagtacagaacctaacagtggagctaatgatggtcttgggtcgctaaatggcacaatgaatggtcaacatccatatggggaacacccttcaagaactcttttcgtccagaacattaatagcaatgttgaggattctgaattaaaggtcctatttgagcattatggagaaatcagcaacctttacactgcctgcaaacatcgcggttttgtaatgatatcttactatgacataaggtcatcatggaatgccatgagggcacttcaaaacaagccactaagacatagaaaacttgacatacattactccattccgaaggataatccttcggggaaggatattaaccaggggatgcttgttgtatttaatgttgacccgtctgtaacaaacaatgatatccataagatatttagtgactatggtgaaataaaagagattcgtgatgcaccgcaaaagggccatcacaaagttatagaattttacgatgtcagagcagctgaaggtgcagttcgtgctttaaacaggagtgatcttgctggcaagaaaataaatttggggactgttggtctgagtggtgttagacgattaacacagcacatgtccaaagagtcggggcaagaagaatttggtgtatgcaaactgggcagtctaagcacaaatagccctccattgccttcattgggttcatcttatatggtagccatgacatcttctggccgtgaaaatgggagtattcatggtttgcattctggactgctcacatcaatgagcccgttcagagaggcttcttttccgggcctatcatctaccataccacagagcctgtcctctcccattggaattgcatctgctacaactcatagtaatcaggctccccttggtgagctcagccactcacttagtcggatgaatgggcatatgaattatggttttcaaggcttgggtgctcttcatccccattctcttcctgaagttcacgatggagcaaataatggcaccccgtacaatctaaacaccatggtaccaattggtgtgaatagcaactcaagaacagccgaagcagttgactgcagacatcttcataaagtgggttctagcaacctcaatggacattcatttgatcgtgtcggtgaaggagctatgggattttcaagaagtggaagtggtcctgtccatggtcaccagctaatgtggaataattcaaataacttacaacgtcatcccaattcccctgtgctgtggcaaaatccaggatcatttgtaaataatgtaccgtctcgctccccagcacaaatgcatggagttccaagagcaccatcacacatgattgagaatgtccttccaatgcatcatcatcatgtgggctctgcgccagcaatcaatccatcactttgggacaggcggcatggctatgcaggggaattgacagaagcatcaagttttcatcttggcagtgttgggagcttgggatttcctggtagccctcagcttcatggcctggagctaaataacatattttctcacactggtgggaatcgcatggatccaaccgtgtcttcggctcagatcagcgcaccatctcctcaacagagaggtcctatgttccatggaaggaatcctatggttccccttccatcatttgattcacctggtgagcggataagaagcatgagaaatgactcaggtgctaaccagtctgataataaacggcagtacgagcttgatgttgaccgcataatgcgaggggtagactcacgaactacactgatgataaagaatatcccaaataagtatacctccaagatgctcttggctgctattgatgaaagtcataagggcacttatgactttatttacttgccaattgattttaagaataaatgtaatgttggctatgctttcatcaacatgaccaatgctcagcatatcattccattttatcagacttttaatggtaaaaagtgggagaagtttaacagtgagaaggtggcatcacttgcttatgctagaatccaagggaaaacagctctgattgctcatttccagaactctagtttgatgaatgaggacaaacgttgccgccccatactcttccactcagatggtcctaatgcaggagatcaggaacctttccctatgggtacaaacatccgagccaggtctgggagatcccggacttcctctggtgaagaaaatcaccatgatatccagacagtcttgaccaacggtgacacttcttccaatggagctgacacttcaggtcccaccaaggacactgagtagctgaactgcagcttgctgcgttgctgaccacaaaggcccaaactataactttttgcaaacccattttcagttctttcccccctttcccattttggttctgttttgtaaagtctcccgatctgtatttattgacttccacgatgcgggtcaccgaagacttaggttgctgcaaaattttgtccctgacgggaagctatatgcaagagggtggtactggctatgtgcttgttaacctgaaggccgagaaaggtgaaaagcgcagggagagcctccagattttggtcgctgtaagaattaaccccatgttgtacagcaggtcccagtaacttgtagtgatgggagagtggagtcattttcatcagtttttagtggtggttgtgtggagaggaagagtcttgcctgcgttttcttttggaaccttctcttgtgcctttacatttttttagtcgagggttcctcttaaattgtgtgcagagggggctcaattttgttaaccggaacaaggcgcatgtgcgtcttggatcaaccccggtcttgtcttcaggcactgttaccttatttatcaaacatatgtacacctccatctatatatagtatgagttttgatgcctatctattttgtggctgtcgtctcacaaggttatttatctatatatagtgtgagtaattcttgttcaaatcctttctccttactataaatatttgtcacaatacgcgatcgctcccaataactgctataaatatttgtctccgccgtggcctccatccctaaacggagcacagagccagccccactccctttctccttactccgacaggagatgcggatgccgccgagggccgttccacatggcccctaaaaacagtggggtcctaagctgctggacactagcattttccctatagtttatctgctttatagtttatctactttagacacaaatacgcaaagagcatcgcactgtcatcctgtcttatttagattgttatcctaatatctcaattgcttatcaaacattatttactatacccacgatggttatattggttgagagactttttaaaattgaaattattggggaactatttaaggcctgcaatgattgaaggaagattaaatagtttggcaattctatgcatggagaaaaagttggatgctattgatctcaatggtataatctttgactttgtatcacaatgttagaagacatttttagcgtgatatgaatgagacgtgcgacagcgcagccacacaatagcacacacttttatacggaacatgccacacgagcagtgccgcctcggttttccatcggtcgcatcagcgccccccctcgaggcggttcaccggatgtccgagggcagcgttcgtccaccactcgactcaagacttcgggaatggcccatcaggatgaaccactccctcgg

SEQ ID NO: 218147 - DNA, 4849 bp, Zea Mays
taggtagttgctgttcccctgcgaggcccgcgtctccccttcgtctcaacacccaccgcctcctcgccggagccagtaagcttccggcgaagaaatccggcgggcacatcacaagggggccgagcagggggacctaggcgagcgccggaatgggggccagcgcccgggggctcgccgtcgtcgtggctctagggttagataggtgtccgtagcttttttcttcgctcgccctcccccacgcggccagggtgtgcagccccggcgtcgcattgggtcccgggacgaccgtaaggccgcgtgatccacccgtgctcgagctcggacagggtcccggttgcgtggcatgggggcatctcttccgcctgctcccgctgcctgcgagtttggcaccgtttttgagctctgaagaggaggaggtggtggcagcaggcaccgatctggatgccatttcaagtcatggatccgaggcaccacctctcccagttcaccaatacaaccgtagctgcgtcctccttctctgaggagcagcttcgccttcccacagagaggctggtgggtttttggaagcaggagtcgttgcatcacattgggagcaagtcagttgcatcttctccaattgaaaagccccaacccattggtacaaaaacaatgggtcgggtagatccacaaccatacaagccgagaggccagaagtctgcatttagccttgaacacaaaacttttggtcaagagaggcatgttaacatgccaccatctctgtggagagctgatcaagacccttatgttcaatctgattcatctttatttcccgatggaaggagtactaatccatatgaggcctacaacgagaatgggcttttctcaagctccctgtcagaaatttttgacagaaaattgggactgagatcaaatgatgtgcttctacatcaaccacttgaaaaggttgaaccaactcatgtagatgatgagccctttgagttaacagaggaaatcgaggctcaaataataggaaacatacttcctgatgatgatgatctactatcaggtgttgatgttgggtacacagcccatgctagcaatggtgatgatgttgatgatgatatattttacactggaggtgggatggaactggagaccgttgaaaataaaaaaagtacagaacctaacagtggagctaatgatggtcttgggtcgctaaatggcacaatgaatggtcaacatccatatggggaacacccttcaagaactcttttcgtccagaacattaatagcaatgttgaggattctgaattaaaggtcctatttgagcattatggagaaatcagcaacctttacactgcctgcaaacatcgcggttttgtaatgatatcttactatgacataaggtcatcatggaatgccatgagggcacttcaaaacaagccactaagacatagaaaacttgacatacattactccattccgaaggataatccttcggggaaggatattaaccaggggatgcttgttgtatttaatgttgacccgtctgtaacaaacaatgatatccataagatatttagtgactatggtgaaataaaagagattcgtgatgcaccgcaaaagggccatcacaaagttatagaattttacgatgtcagagcagctgaaggtgcagttcgtgctttaaacaggagtgatcttgctggcaagaaaataaatttggggactgttggtctgagtggtgttagacgattaacacagcacatgtccaaagagtcggggcaagaagaatttggtgtatgcaaactgggcagtctaagcacaaatagccctccattgccttcattggatggtagccatgacatcttctggccgtgaaaatgggagtattcatggtttgcattctggactgctcacatcaatgagcccgttcagagaggcttcttttccgggcctatcatctaccataccacagagcctgtcctctcccattggaattgcatctgctacaactcatagtaatcaggctccccttggtgagctcagccactcacttagtcggatgaatgggcatatgaattatggttttcaaggcttgggtgctcttcatccccattctcttcctgaagttcacgatggagcaaataatggcaccccgtacaatctaaacaccatggtaccaattggtgtgaatagcaactcaagaacagccgaagcagttgactgcagacatcttcataaagtgggttctagcaacctcaatggacattcatttgatcgtgtcggtgaaggagctatgggattttcaagaagtggaagtggtcctgtccatggtcaccagctaatgtggaataattcaaataacttacaacgtcatcccaattcccctgtgctgtggcaaaatccaggatcatttgtaaataatgtaccgtctcgctccccagcacaaatgcatggagttccaagagcaccatcacacatgattgagaatgtccttccaatgcatcatcatcatgtgggctctgcgccagcaatcaatccatcactttgggacaggcggcatggctatgcaggggaattgacagaagcatcaagttttcatcttggcagtgttgggagcttgggatttcctggtagccctcagcttcatggcctggagctaaataacatattttctcacactggtgggaatcgcatggatccaaccgtgtcttcggctcagatcagcgcaccatctcctcaacagagaggtcctatgttccatggaaggaatcctatggttccccttccatcatttgattcacctggtgagcggataagaagcatgagaaatgactcaggtgctaaccagtctgataataaacggcagtacgagcttgatgttgaccgcataatgcgaggggtagactcacgaactacactgatgataaagaatatcccaaataagtatacctccaagatgctcttggctgctattgatgaaagtcataagggcacttatgactttatttacttgccaattgattttaagaataaatgtaatgttggctatgctttcatcaacatgaccaatgctcagcatatcattccattttatcagacttttaatggtaaaaagtgggagaagtttaacagtgagaaggtggcatcacttgcttatgctagaatccaagggaaaacagctctgattgctcatttccagaactctagtttgatgaatgaggacaaacgttgccgccccatactcttccactcagatggtcctaatgcaggagatcaggaacctttccctatgggtacaaacatccgagccaggtctgggagatcccggacttcctctggtgaagaaaatcaccatgatatccagacagtcttgaccaacggtgacacttcttccaatggagctgacacttcaggtcccaccaaggacactgagtagctgaactgcagcttgctgcgttgctgaccacaaaggcccaaactataactttttgcaaacccattttcagttctttcccccctttcccattttggttctgttttgtaaagtctcccgatctgtatttattgacttccacgatgcgggtcaccgaagacttaggttgctgcaaaattttgtccctgacgggaagctatatgcaagagggtggtactggctatgtgcttgttaacctgaaggccgagaaaggtgaaaagcgcagggagagcctccagattttggtcgctgtaagaattaaccccatgttgtacagcaggtcccagtaacttgtagtgatgggagagtggagtcattttcatcagtttttagtggtggttgtgtggagaggaagagtcttgcctgcgttttcttttggaaccttctcttgtgcctttacatttttttagtcgagggttcctcttaaattgtgtgcagagggggctcaattttgttaaccggaacaaggcgcatgtgcgtcttggatcaaccccggtcttgtcttcaggcactgttaccttatttatcaaacatatgtacacctccatctatatatagtatgagttttgatgcctatctattttgtggctgtcgtctcacaaggttatttatctatatatagtgtgagtaattcttgttcaaatcctttctccttactataaatatttgtcacaatacgcgatcgctcccaataactgctataaatatttgtctccgccgtggcctccatccctaaacggagcacagagccagccccactccctttctccttactccgacaggagatgcggatgccgccgagggccgttccacatggcccctaaaaacagtggggtcctaagctgctggacactagcattttccctatagtttatctgctttatagtttatctactttagacacaaatacgcaaagagcatcgcactgtcatcctgtcttatttagattgttatcctaatatctcaattgcttatcaaacattatttactatacccacgatggttatattggttgagagactttttaaaattgaaattattggggaactatttaaggcctgcaatgattgaaggaagattaaatagtttggcaattctatgcatggagaaaaagttggatgctattgatctcaatggtataatctttgactttgtatcacaatgttagaagacatttttagcgtgatatgaatgagacgtgcgacagcgcagccacacaatagcacacacttttatacggaacatgccacacgagcagtgccgcctcggttttccatcggtcgcatcagcgccccccctcgaggcggttcaccggatgtccgagggcagcgttcgtccaccactcgactcaagacttcgggaatggcccatcaggatgaaccactccctcgg

SEQ ID NO: 218148 - DNA, 3287 bp, Zea Mays
gttgctgttcccctgcgaggcccgcgtctccccttcgtctcaacacccaccgcctcctcgccggagccagtaagcttccggcgaagaaatccggcgggcacatcacaagggggccgagcagggggacctaggcgagcgccggaatgggggccagcgcccgggggctcgccgtcgtcgtggctctagggttagataggtgtccgtagcttttttcttcgctcgccctcccccacgcggccagggtgtgcagccccggcgtcgcattgggtcccgggacgaccgtaaggccgcgtgatccacccgtgctcgagctcggacagggtcccggttgcgtggcatgggggcatctcttccgcctgctcccgctgcctgcgagtttggcaccgtttttgagctctgaagaggaggaggtggtggcagcaggcaccgatctggatgccatttcaagtcatggatccgaggcaccacctctcccagttcaccaatacaaccgtagctgcgtcctccttctctgaggagcagcttcgccttcccacagagaggctggtgggtttttggaagcaggagtcgttgcatcacattgggagcaagtcagttgcatcttctccaattgaaaagccccaacccattggtacaaaaacaatgggtcgggtagatccacaaccatacaagccgagaggccagaagtctgcatttagccttgaacacaaaacttttggtcaagagaggcatgttaacatgccaccatctctgtggagagctgatcaagacccttatgttcaatctgattcatctttatttcccgatggaaggagtactaatccatatgaggcctacaacgagaatgggcttttctcaagctccctgtcagaaatttttgacagaaaattgggactgagatcaaatgatgtgcttctacatcaaccacttgaaaaggttgaaccaactcatgtagatgatgagccctttgagttaacagaggaaatcgaggctcaaataataggaaacatacttcctgatgatgatgatctactatcaggtgttgatgttgggtacacagcccatgctagcaatggtgatgatgttgatgatgatatattttacactggaggtgggatggaactggagaccgttgaaaataaaaaaagtacagaacctaacagtggagctaatgatggtcttgggtcgctaaatggcacaatgaatggtcaacatccatatggggaacacccttcaagaactcttttcgtccagaacattaatagcaatgttgaggattctgaattaaaggtcctatttgagcattatggagaaatcagcaacctttacactgcctgcaaacatcgcggttttgtaatgatatcttactatgacataaggtcatcatggaatgccatgagggcacttcaaaacaagccactaagacatagaaaacttgacatacattactccattccgaaggataatccttcggggaaggatattaaccaggggatgcttgttgtatttaatgttgacccgtctgtaacaaacaatgatatccataagatatttagtgactatggtgaaataaaagagattcgtgatgcaccgcaaaagggccatcacaaagttatagaattttacgatgtcagagcagctgaaggtgcagttcgtgctttaaacaggagtgatcttgctggcaagaaaataaatttggggactgttggtctgagtggtgttagacgattaacacagcacatgtccaaagagtcggggcaagaagaatttggtgtatgcaaactgggcagtctaagcacaaatagccctccattgccttcattggccatgacatcttctggccgtgaaaatgggagtattcatggtttgcattctggactgctcacatcaatgagcccgttcagagaggcttcttttccgggcctatcatctaccataccacagagcctgtcctctcccattggaattgcatctgctacaactcatagtaatcaggctccccttggtgagctcagccactcacttagtcggatgaatgggcatatgaattatggttttcaaggcttgggtgctcttcatccccattctcttcctgaagttcacgatggagcaaataatggcaccccgtacaatctaaacaccatggtaccaattggtgtgaatagcaactcaagaacagccgaagcagttgactgcagacatcttcataaagtgggttctagcaacctcaatggacattcatttgatcgtgtcggtgaaggagctatgggattttcaagaagtggaagtggtcctgtccatggtcaccagctaatgtggaataattcaaataacttacaacgtcatcccaattcccctgtgctgtggcaaaatccaggatcatttgtaaataatgtaccgtctcgctccccagcacaaatgcatggagttccaagagcaccatcacacatgattgagaatgtccttccaatgcatcatcatcatgtgggctctgcgccagcaatcaatccatcactttgggacaggcggcatggctatgcaggggaattgacagaagcatcaagttttcatcttggcagtgttgggagcttgggatttcctggtagccctcagcttcatggcctggagctaaataacatattttctcacactggtgggaatcgcatggatccaaccgtgtcttcggctcagatcagcgcaccatctcctcaacagagaggtcctatgttccatggaaggaatcctatggttccccttccatcatttgattcacctggtgagcggataagaagcatgagaaatgactcaggtgctaaccagtctgataataaacggcagtacgagcttgatgttgaccgcataatgcgaggggtagactcacgaactacactgatgataaagaatatcccaaataagtatacctccaagatgctcttggctgctattgatgaaagtcataagggcacttatgactttatttacttgccaattgattttaagaataaatgtaatgttggctatgctttcatcaacatgaccaatgctcagcatatcattccattttatcagacttttaatggtaaaaagtgggagaagtttaacagtgagaaggtggcatcacttgcttatgctagaatccaagggaaaacagctctgattgctcatttccagaactctagtttgatgaatgaggacaaacgttgccgccccatactcttccactcagatggtcctaatgcaggagatcaggtggaagtacagaaaatatacttatataagaagaccga

SEQ ID NO: 218149 - DNA, 3270 bp, Zea Mays
gccgcccgcatttgggtaggtagttgctgttcccctgcgaggcccgcgtctccccttcgtctcaacacccaccgcctcctcgccggagccagtaagcttccggcgaagaaatccggcgggcacatcacaagggggccgagcagggggacctaggcgagcgccggaatgggggccagcgcccgggggctcgccgtcgtcgtggctctagggttagataggtgtccgtagcttttttcttcgctcgccctcccccacgcggccagggtgtgcagccccggcgtcgcattgggtcccgggacgaccgtaaggccgcgtgatccacccgtgctcgagctcggacagggtcccggttgcgtggcatgggggcatctcttccgcctgctcccgctgcctgcgagtttggcaccgtttttgagctctgaagaggaggaggtggtggcagcaggcaccgatctggatgccatttcaagtcatggatccgaggcaccacctctcccagttcaccaatacaaccgtagctgcgtcctccttctctgaggagcagcttcgccttcccacagagaggctggtgggtttttggaagcaggagtcgttgcatcacattgggagcaagtcagttgcatcttctccaattgaaaagccccaacccattggtacaaaaacaatgggtcgggtagatccacaaccatacaagccgagaggccagaagtctgcatttagccttgaacacaaaacttttggtcaagagaggcatgttaacatgccaccatctctgtggagagctgatcaagacccttatgttcaatctgattcatctttatttcccgatggaaggagtactaatccatatgaggcctacaacgagaatgggcttttctcaagctccctgtcagaaatttttgacagaaaattgggactgagatcaaatgatgtgcttctacatcaaccacttgaaaaggttgaaccaactcatgtagatgatgagccctttgagttaacagaggaaatcgaggctcaaataataggaaacatacttcctgatgatgatgatctactatcaggtgttgatgttgggtacacagcccatgctagcaatggtgatgatgttgatgatgatatattttacactggaggtgggatggaactggagaccgttgaaaataaaaaaagtacagaacctaacagtggagctaatgatggtcttgggtcgctaaatggcacaatgaatggtcaacatccatatggggaacacccttcaagaactcttttcgtccagaacattaatagcaatgttgaggattctgaattaaaggtcctatttgagcattatggagaaatcagcaacctttacactgcctgcaaacatcgcggttttgtaatgatatcttactatgacataaggtcatcatggaatgccatgagggcacttcaaaacaagccactaagacatagaaaacttgacatacattactccattccgaaggataatccttcggggaaggatattaaccaggggatgcttgttgtatttaatgttgacccgtctgtaacaaacaatgatatccataagatatttagtgactatggtgaaataaaagagattcgtgatgcaccgcaaaagggccatcacaaagttatagaattttacgatgtcagagcagctgaaggtgcagttcgtgctttaaacaggagtgatcttgctggcaagaaaataaatttggggactgttggtctgagtggtgttagacgattaacacagcacatgtccaaagagtcggggcaagaagaatttggtgtatgcaaactgggcagtctaagcacaaatagccctccattgccttcattgggttcatcttatatggtagccatgacatcttctggccgtgaaaatgggagtattcatggtttgcattctggactgctcacatcaatgagcccgttcagagaggcttcttttccgggcctatcatctaccataccacagagcctgtcctctcccattggaattgcatctgctacaactcatagtaatcaggctccccttggtgagctcagccactcacttagtcggatgaatgggcatatgaattatggttttcaaggcttgggtgctcttcatccccattctcttcctgaagttcacgatggagcaaataatggcaccccgtacaatctaaacaccatggtaccaattggtgtgaatagcaactcaagaacagccgaagcagttgactgcagacatcttcataaagtgggttctagcaacctcaatggacattcatttgatcgtgtcggtgaaggagctatgggattttcaagaagtggaagtggtcctgtccatggtcaccagctaatgtggaataattcaaataacttacaacgtcatcccaattcccctgtgctgtggcaaaatccaggatcatttgtaaataatgtaccgtctcgctccccagcacaaatgcatggagttccaagagcaccatcacacatgattgagaatgtccttccaatgcatcatcatcatgtgggctctgcgccagcaatcaatccatcactttgggacaggcggcatggctatgcaggggaattgacagaagcatcaagttttcatcttggcagtgttgggagcttgggatttcctggtagccctcagcttcatggcctggagctaaataacatattttctcacactggtgggaatcgcatggatccaaccgtgtcttcggctcagatcagcgcaccatctcctcaacagagaggtcctatgttccatggaaggaatcctatggttccccttccatcatttgattcacctggtatacctccaagatgctcttggctgctattgatgaaagtcataagggcacttatgactttatttacttgccaattgattttaagaataaatgtaatgttggctatgctttcatcaacatgaccaatgctcagcatatcattccattttatcagacttttaatggtaaaaagtgggagaagtttaacagtgagaaggtggcatcacttgcttatgctagaatccaagggaaaacagctctgattgctcatttccagaactctagtttgatgaatgaggacaaacgttgccgccccatactcttccactcagatggtcctaatgcaggagatcagtcatattacaataagtttacaaattacaatatcgaaaagggcgtacccaatgctacggtaggctctaccgctgcactaggcctgcccttcacaaattacaatatcgaaatgagtacaaat

SEQ ID NO: 218150 - DNA, 3419 bp, Zea Mays
cccgtctcttgccgcccgcatttgggtaggtagttgctgttcccctgcgaggcccgcgtctccccttcgtctcaacacccaccgcctcctcgccggagccagtaagcttccggcgaagaaatccggcgggcacatcacaagggggccgagcagggggacctaggcgagcgccggaatgggggccagcgcccgggggctcgccgtcgtcgtggctctagggttagataggtgtccgtagcttttttcttcgctcgccctcccccacgcggccagggtgtgcagccccggcgtcgcattgggtcccgggacgaccgtaaggccgcgtgatccacccgtgctcgagctcggacagggtcccggttgcgtggcatgggggcatctcttccgcctgctcccgctgcctgcgagtttggcaccgtttttgagctctgaagaggaggaggtggtggcagcaggcaccgatctggatgccatttcaagtcatggatccgaggcaccacctctcccagttcaccaatacaaccgtagctgcgtcctccttctctgaggagcagcttcgccttcccacagagaggctggtgggtttttggaagcaggagtcgttgcatcacattgggagcaagtcagttgcatcttctccaattgaaaagccccaacccattggtacaaaaacaatgggtcgggtagatccacaaccatacaagccgagaggccagaagtctgcatttagccttgaacacaaaacttttggtcaagagaggcatgttaacatgccaccatctctgtggagagctgatcaagacccttatgttcaatctgattcatctttatttcccgatggaaggagtactaatccatatgaggcctacaacgagaatgggcttttctcaagctccctgtcagaaatttttgacagaaaattgggactgagatcaaatgatgtgcttctacatcaaccacttgaaaaggttgaaccaactcatgtagatgatgagccctttgagttaacagaggaaatcgaggctcaaataataggaaacatacttcctgatgatgatgatctactatcaggtgttgatgttgggtacacagcccatgctagcaatggtgatgatgttgatgatgatatattttacactggaggtgggatggaactggagaccgttgaaaataaaaaaagtacagaacctaacagtggagctaatgatggtcttgggtcgctaaatggcacaatgaatggtcaacatccatatggggaacacccttcaagaactcttttcgtccagaacattaatagcaatgttgaggattctgaattaaaggtcctatttgagcattatggagaaatcagcaacctttacactgcctgcaaacatcgcggttttgtaatgatatcttactatgacataaggtcatcatggaatgccatgagggcacttcaaaacaagccactaagacatagaaaacttgacatacattactccattccgaaggataatccttcggggaaggatattaaccaggggatgcttgttgtatttaatgttgacccgtctgtaacaaacaatgatatccataagatatttagtgactatggtgaaataaaagagattcgtgatgcaccgcaaaagggccatcacaaagttatagaattttacgatgtcagagcagctgaaggtgcagttcgtgctttaaacaggagtgatcttgctggcaagaaaataaatttggggactgttggtctgagtggtgttagacgattaacacagcacatgtccaaagagtcggggcaagaagaatttggtgtatgcaaactgggcagtctaagcacaaatagccctccattgccttcattgggttcatcttatatggtagccatgacatcttctggccgtgaaaatgggagtattcatggtttgcattctggactgctcacatcaatgagcccgttcagagaggcttcttttccgggcctatcatctaccataccacagagcctgtcctctcccattggaattgcatctgctacaactcatagtaatcaggctccccttggtgagctcagccactcacttagtcggatgaatgggcatatgaattatggttttcaaggcttgggtgctcttcatccccattctcttcctgaagttcacgatggagcaaataatggcaccccgtacaatctaaacaccatggtaccaattggtgtgaatagcaactcaagaacagccgaagcagttgactgcagacatcttcataaagtgggttctagcaacctcaatggacattcatttgatcgtgtcggtgaaggagctatgggattttcaagaagtggaagtggtcctgtccatggtcaccagctaatgtggaataattcaaataacttacaacgtcatcccaattcccctgtgctgtggcaaaatccaggatcatttgtaaataatgtaccgtctcgctccccagcacaaatgcatggagttccaagagcaccatcacacatgattgagaatgtccttccaatgcatcatcatcatgtgggctctgcgccagcaatcaatccatcactttgggacaggcggcatggctatgcaggggaattgacagaagcatcaagttttcatcttggcagtgttgggagcttgggatttcctggtagccctcagcttcatggcctggagctaaataacatattttctcacactggtgggaatcgcatggatccaaccgtgtcttcggctcagatcagcgcaccatctcctcaacagagaggtcctatgttccatggaaggaatcctatggttccccttccatcatttgattcacctggtgagcggataagaagcatgagaaatgactcaggtgctaaccagtctgataataaacggcagtacgagcttgatgttgaccgcataatgcgaggggtagactcacgaactacactgatgataaagaatatcccaaataagtatacctccaagatgctcttggctgctattgatgaaagtcataagggcacttatgactttatttacttgccaattgattttaagaataaatgtaatgttggctatgctttcatcaacatgaccaatgctcagcatatcattccattttatcagacttttaatggtaaaaagtgggagaagtttaacagtgagaaggtggcatcacttgcttatgctagaatccaagggaaaacagctctgattgctcatttccagaactctagtttgatgaatgaggacaaacgttgccgccccatactcttccactcagatggtcctaatgcaggagatcagtcatattacaataagtttacaaattacaatatcgaaaagggcgtacccaatgctacggtaggctctaccgctgcactaggcctgcccttcacaaattacaatatcgaaatgagtacaaat

SEQ ID NO: 218151 - DNA, 4014 bp, Zea Mays
ggcctagttaaaatgtagaaggtgctactctggggcttgaaccattgtgaatgtattcagtactagattacttgtccaaaattatcttccttttttagatgggaaccaacccatcacctggttaaaatgagtttggttcaggctctttgacgcttggaggaccaagagatgagtttggtcccaagaaacacaagtagactgatgggtatccaggcacctggcccagtcggcatcagtgtagatgattagctcatgggtggagcgtcgaaggtggaggtcgtagttgatagtactccaaagataccgaaggatctacttgaccacacccaagtgtggctcacgaagattgttgaacgacatatgcgatgtcgagcctggtgaaggtgagatactgataagcatcgctgcatcggcgaggctacggtaggcaatggggtcactgacaggagcgccatctctagagagcttggcctgcgtgtccaccgaggtcacacagggtttgtagttcagcatgctagcccgcttgaggatgtccaggatggcaggatgtactgccactactggaggaagaggcccttggagcgacgctcaacgacaattccctgaaagtgatgaaggggccccaaatccttcatggcgaactaatgctgaagagcggcggtgatccggtgtaggagagccgaagagcaggtagtgagcatgatgtcatcaacacagaggagcaggtatacagtgtcattaacacgtcgatagatgaattgagatgtgtccgacttggcctcgacaaaatcaagagagagcagatatgtggtgaagcgtctgtaccaagtgtgaggggcttgtttcagaccatagagggacttgttgagtttccatacaatatcaaggtgaacatgatcaacaaagccagtagattgattgcagtaggtctcagtgagattcctatgaagaaaggcattcttgacatccaattgatgaattggccaaaaacaggagagtaccaaagtgaggacggtacgaccggtagtaggcttcacgacaggattgaacatctcgttgtagtcaacatcagaatgtcgagtaaacccctggagaacccaatgggtcttgtaccgatccaaagagccatccaccttccgcttatgtgtccaaacccacttgccagtcactacattgccacttgggggatagggaattagatactaggtgtgattggcaagaagggcctgatactcttcctctgtagtacacaacgtcaataaggatcgagacatgcctatacgtgatgtggtagcaggcaccagaatgggactgagcgagtgatccaagtaaggaagtgatcatagcgcttgttgaggccgcagaggaggttgaggacgagcatgtgattgaagacagaagacgggctcctcgaggtcagagagggaggctgccatgcgcttcatttgacgacagtattcggtgacagagaggttcccttgcagaaagttcgaaaagcaacatcaaggtggagagcacgagcctcacggttgtcgaggaactgctcctcgatggcaacccaagcctaacgggcagtgccaccatgccaacatcctacaactcaacagtgacggtccccaaggatctacgagaggaccacactattcatctgccaccaggatgggatagtgagggatgcagcgttggtgaggacatggtcatctatagggcgtagcgctggacaatgtggctgggtatggagtggctttggcagtaaaagatatctacgctgatgcctttggagaaagaaatttgggctctaaccttgtgggcctgatggtaaaggatggacgacaaggaaaggtgaatgccaaaggttactacatttatgagaagggtgcgaagccaaagccagaccctagtgttaagcatgtgatcgaggagtaccgaaagcaggcaaacacaatgcctggtggaaagcctgttactttaatggatcaagatattttggagatgattttcttcccagttgtgaatgaggcatgcagggttatggatgaaaatgttgtaattcgagcttccgatcttgatattgcttctgttcttggaatgggctttcccaaatacaggggtggtcttgtcttctgggctgacactgttggagcgccttacatacattcgaagctaagcaagtgggccgaaatgtatggtcccttcttcaaaccttcatcgtatttggaacaacgagctaaaagtggtgtaccattgagcgcaccaggaacatcacagcaaggttcggcgaggtcgcgcatgtgaggtgctgtccagcattgggaagaagaattcagaatacttgcggccgggatgagccatagacggctgcttcgcagatcaaaaacacctccttgaatacaaataggaggcacagaaatgatgaaaaataaatggttttgcatagctgtaacagttttggtgccttgaactgtaactatggcagagtttctgtgaacagagtggcatgcattaattatacttgaccactctatatgtcgctgtttgtataattttcaatacgtacaagaactaaaatatattattggatagtattttttataataaactcatctgttgctatactttatttaaatctacaaagaaaatttgactcgtacggatatcatgtcgatacctaccagggaacttaggacggcgtcgtcgtctcgaattaatcgcttgcactaagctggacggccgcccgctgtgatccagcgaacaaccaggacggccggtcatggcggcagggacgatgatgcgggtgacaatggaggtgggcacagacggggtggcgctcatcaccatgtgcaacccgccagtgaacgccctgcaccccgccatcttcgctggactctgggagaactacggcgaggccatggcccgtgacgacgtcaaggccatcgtgctcaaaggtgctcgagggaaattctgtggaggtttcgacatcaatacgttctcacaaattcatcggaccggagacatgtcgcttctgccagactctgttaagtttgcgtcttatatgatggaagagggcaaaaagccttccgttgcagccattcaaggccttgctctgggtggtggactagagttgacgatggcttgtcatgctcgaatatctacccctgaagctcaacttggattaccagagttaactcttggcataattcctggatctgggggaacccagcgtctaccgaggcttgtaggtctgcccaaagcaatacaaatgatgctgcaatcaaagttcattatgggggacgaaggaaaagaacaagaacagataagcttggctcaccatctgaagctcatgctgcattaagtatggcaagacagcaggtgaagaagattgcaagaaacatgccgcagtatcaagcctgccttgatgtaattgaagaaggtgtgctatttggaggccattcaggtgttttaaaggaatataaggttttcaaggagttagtgccatcaccaacagcaagggcacttgttcatatcttcttggcacagcgtttgagcacaaaggtgccaggtgtcactgatgttcacctaaaacctaggcaaattagaaaagttggcattattggtggtggtttgatgggctctggaattgcaactgcacttcttgttagcaacatatctgttgtgctcaaggaagtaaaccctcaggttctgcaaaggggacaaaaaacgatagcagctaatcttgaggacctggtcaaaaggggctcacttgcaaaggacaggataaataaggtcatgtcacttctgaaaggcactcttgattattcggattttaaggatgtcgatatggctattgaggccgttatagaggacattcctttgaagcaatcaacattttctgacattgagaagttctgcccaccacattgcatacttgcaacaaacacatctaccatcagtttgaatgttattggcaagaggacaaattctcaagatagaattgtaggggcacattttttcagg

SEQ ID NO: 218152 - DNA, 2693 bp, Zea Mays
tcgtggcccacggacgtgtaggaggggacacgccgccgggcctcactaaccgcaggttcgggagtactccggaacccgccgccgcatccacacgacgccacgactgacgacggagagccccggtctccttccacggctccaccgccaccaccccgcataaaacagcagaagaacaagggtatggcgaaggatgggggtcccgactggaacggcctgctcaagtggagcctcgcccacggcgacggcaccaacccgccgcgtgctctcagcgaggaagacagaaaatggttcatggatgctatgcaagccaacacggtagatgttgtgaagaggatgaaggagatcactcaggtgatgaaaactccagaagatgtcttgcagtctcagggcgtgacccctgagaacatcgaagatatgttggatgagctacaggagcatgttgaatccattgacatggcaaatgatctacattctattggtgggctggatcctctacttggttacttgaaaaattcaaatgctggcatccgagcaaaggcagcagaagttgttagtacaattgtgcagaataatcccaagagtcagcaacttgtcatggaatccaatgggctagagccactgttgacgaacttcaaatcagatccaagtacaaatgcacgcacaaaagctttaggagccatatcttctctaattcgtcataaccagcctggagtttccgcatttcgattgggaaatggctatgctggattgaaggatgctcttggttccgatgatgccagactccaaaggaaagctctcaatctcatacaatacttgctgcacaactacaaggcagacaggagtgttgccacagagcttggtcttccgaagctgatgatgcaccttgtgtccagcgatgattccttagtgcgtgaagctgctctaggcggcctccttgagttggcgcgggacaagacatctggtaacgcgctacctgaccaagaaaagctgaaagacatgctcaagagccgaatagaagggatcagcgcaatggacactgacgatctccacgctgctcgcgaggagcggcagctggtggattcactctggaaggagtgctacaacgaaccttcgtctctcagggagaagggcctcgtcgtgcttccgggagaggatgctccccaacagccgccaccagacgttgcagggaagatgtttgagccaccgcttcgtgcgtgggcggctgcaagacctgctcaggaagatgactctgactctggcagcggaaagaaggctccgccattgctgcttaagttttgacggccttcttatgccgatactagttcttaggctccaccatgggtgttgaaagctgaaagatcagatctgatggatgcctgaccttcttcgaacctcagttgtggttcttgtaatttgcaccgcatttctgttctgagtatgtttttatgagaagactgggaagatgacagacagatactgtatcacgtgatgctcgtaaattaacactacatgcgaattctcttgctcgattgctcattttctgatgcttccatgattgctgatatatcttaatccgatccgatagttataatttcacgggtctagttctagagatgctgaagagcttgcgcctgcttgcaggcatatgttactttcagcttgaaggatggccgtccgattctcgcgttcgatctggacggtgggtgattttgcctactcccgtccgtcgatgattcgtcgcgagccattcagaaggcagcaaatctagctatctcctctgcctcctgctggcggtcctgctgcgccatggcgctacagctgcgggccgccgctctctgtccgcccctgccactcaccgccttccatggccgcctcgttgcaccttggcctccgcctcccttggtcagcatagctgtcgccgccgcctccagcccgggtccctccgcgcccctctcctgccgcggcccggcgcctcgctggcgacgttcgagcgtgagggcgcgcaccggggccggcggcggcgggcagagggagtccccatacgaggtgctcggcgtgtcgccgtcggcggcgcccaacgagatcaagcgcgcgtaccgccgcctcgcgctcaagtaccacccggacgtgaacaaggagcccaatgctcaggagaagtttctgcggatcaagcacgcttacaacactctgatgaactcagagtcacgatccaagtacgcgagcagcagttcggattcgtcctggtcctccagctcccgggagagcaaatcagctgctgcagaagagccgttctatggatttgcggacttccttaaagatttgcaaacagaatttcagaactgggaagctgggttgaattcggatcagaaacctaaaagcctttgggaagagttggcagcaattggcgaggaatttgtagagtttctggagaatgagttgaagattgatgactcgagaccagaggacgtcactggagatgacccatacacccagtttggacagcaggcaaaaagcgctaaggatgacaagacgtcgacgaacagctttgatgatggtctttctgaaatagaggccgctcttgagaatctgaagaaggaactcggactgggctaaaccgttgatgtggcaactagaggtgttgctgctgctactgacttagttccttgttcatacaaagaccggaataatacgaa

SEQ ID NO: 218153 - DNA, 1870 bp, Zea Mays
ctaaagttcgccacctggttttgtgcttcttcaggtttattgcctccattcacttcacggcttaaactacccaattttttgcaatttagtcattttttcgaagaaaaaaaatcatgtttcggctgacttcgagcaggtgttcaggatccatgataggttgtacatcgttttctcaaggctcaccactgacgctcggatgctatgagttgtagttgctgaattttccctgcccaccaccacctattatcttctgttcggctgcttttcgatccctctgcaggtaccattggttgttcttcaggcacaacatgtatcagctgcgtcaggagagggacatgaagcatgagacttttgccatcttgtctctgggaagaggttataatcactcctgagcacaacgaagaagggatttacacgatcagattctacattcagattacaacgtcaataacaggcccagtgaatgctgaaagatgcgctttcatagaagaaactaagctctcaagatggtggcagaattaactcctttcctgttatgtttaggtttcaaggacagcctctgtataagctcagaccaagcaaattccgtgcagcaattgaggaggctttccttgctgaacgtggttttttttatctccaaacggatgaggtggttgcaggactgtggatcctttctgtccatgggagctgctgcaattttctcaccttgtcttacatagtttttgtggtattgtacacagtgctggtcttgtacgaggtcaccctcagatgaactttagtgattgctcccaggcgcggcatgcatgctttgctttattcacatgatcgagttcccctcacgtccacgctctatccgatgccacgagagttttccagaagcaagtccacggattgtgtgttcagcaaataagtaaaccacattgccgccgggtccacgagggagaaaggaaacacgagcattgtttcctccgtcgacgacagagctccgttcgtctccccctcagtttgacagcctcgctctgtcttctctcctcaatcgcgtgcttactcttcagcatttactccttagtagaaattgccgaccaccgccgcaccttgaagaccgccgtgctgttcgtcgtggtggcccgtctcaggcaacgacgactacgtcggtcgtggcctcaaagacctcccgccaccgctgtgacttgaagccctcctccatgccaatcaaggtgattgacaagtcatttggatttcacgctgctgtggaggaggcccaaagggccctcaatgccgctcatgtcgaggctgaaagtgtagacaatggcattggtgttgtgaagctaatgggtcacaactgttgttttactgcaagtcacccttctacctcgaagggaagagacgactcctcgagttcatttagagacgacgtgaggacaagggtcatgtggttcatcgtgctggctgagggtgctgatcaggacctcatcgtgagaagtatgaatttcatggacacctaagatgcttctggagataaactgcttctagatggctgcctttggctattctagaagataaaggctaggcttatggtccaaaccttcgtctccttctcaatgtggtggcagagaacattgttattgccttcatctaccattcagtttgctttattattattattataaaatagatgatccctattgatcaatatgtcttgactactaatatctctatatgtttatatcaacaacctttatagtgttatatatatatatatatatatgtgaacacattgaccacagactcgcgcttcgcgcgagcccatgtggggatttcagctctctttaatttcttagggagttttttttgtagactattgatcgag

SEQ ID NO: 218154 - DNA, 1246 bp, Zea Mays
ctaaagttcgccacctggttttgtgcttcttcaggtgttcaggatccatgataggttgtacatcgttttctcaaggctcaccactgacgctcggatgctatgagttgtagttgctgaattttccctgcccaccaccacctattatcttctgttcggctgcttttcgatccctctgcaggtaccattggttgttcttcaggcacaacatgtatcagctgcgtcaggagagggacatgaagcatgagacttttgccatcttgtctctgggaagaggttataatcactcctgagcacaacgaagaagggatttacacgatcagattctacattcagattacaacgtcaataacaggcccagtgaatgctgaaagatgcgctttcatagaagaaactaagctctcaagatggtggcagaattaactcctttcctgttatgtttaggtttcaaggacagcctctgtataagctcagaccaagcaaattccgtgcagcaattgaggaggctttccttgctgaacgtggttttttttatctccaaacggatgaggtggttgcaggactgtggatcctttctgtccatgggagctgctgcaattttctcaccttgtcttacatagtgctggtcttgtacgaggtcaccctcagatgaactttagtgattgctcccaggcgcggcatgcatgctttgctttattcacatgatcgagttcccctcacgtccacgctctatccgatgccacgagagttttccagaagcaagtccacggattgtgtgttcagcaaataagtaaaccacattgccgccgggtccacgagggagaaaggaaacacgagcattgtttcctccgtcgacgacagagctccaaattgccgaccaccgccgcaccttgaagaccgccgtgctgttcgtcgtggtggcccgtctcaggcaacgacgactacgtcggtcgtggcctcaaagacctcccgccaccgctgtgacttgaagccctcctccatgccaatcaaggaatatcggccaccgctgtgccttgaagaggtacccccggttaccacatgtcgaagacctctcggagcactttgcctacttgcttaacatcttcctggcatattgaaagtgatgcagcgagacgggtttgtcctcggaacctcaagaggagggcatgacactgcgaaaatcattgattgtcttcaggaccgtgatactaaccagatttatattatcgaaggcgatggcattcagaaa

SEQ ID NO: 218155 - DNA, 1594 bp, Zea Mays
ctaaagttcgccacctggttttgtgcttcttcaggtttattgcctccattcacttcacggcttaaactacccaattttttgcaatttagtcattttttcgaagaaaaaaaatcatgtttcggctgacttcgagcaggtgttcaggatccatgataggttgtacatcgttttctcaaggctcaccactgacgctcggatgctatgagttgtagttgctgaattttccctgcccaccaccacctattatcttctgttcggctgcttttcgatccctctgcaggtaccattggttgttcttcaggcacaacatgtatcagctgcgtcaggagagggacatgaagcatgagacttttgccatcttgtctctgggaagaggttataatcactcctgagcacaacgaagaagggatttacacgatcagattctacattcagattacaacgtcaataacaggcccagtgaatgctgaaagatgcgctttcatagaagaaactaagctctcaagatggtggcagaattaactcctttcctgttatgtttaggtttcaaggacagcctctgtataagctcagaccaagcaaattccgtgcagcaattgaggaggctttccttgctgaacgtggttttttttatctccaaacggatgaggttgttggcaaagggaaagatcattccttacttaacccatccatagtccctgccatgcccgttagcaggattttgattgtggttgcaggactgtggatcctttctgtccatgggagctgctgcaattttctcaccttgtcttacatagtgctggtcttgtacgaggtcaccctcagatgaactttagtgattgctcccaggcgcggcatgcatgctttgctttattcacatgatcgagttcccctcacgtccacgctctatccgatgccacgagagttttccagaagcaagtccacggattgtgtgttcagcaaataagtaaaccacattgccgccgggtccacgagggagaaaggaaacacgagcattgtttcctccgtcgacgacagagctccgttcgtctccccctcagtttgacagcctcgctctgtcttctctcctcaatcgcgtgcttactcttcagcatttactccttagtagaaattgccgaccaccgccgcaccttgaagaccgccgtgctgttcgtcgtggtggcccgtctcaggcaacgacgactacgtcggtcgtggcctcaaagacctcccgccaccgctgtgacttgaagccctcctccatgccaatcaaggaatatcggccaccgctgtgccttgaagaggtacccccggttaccacatgtcgaagacctctcggagcactttgcctacttgcttaacatcttcctggcatattgaaagtgatgcagcggtaatgataatatactttatttatgtccatgttgttcttgcttcctatacccaaacacctctgcacttttgcatctggagcaccttggttatttgcatattgccttcacagtatactgaaagttatatggtggtgctccaataaactttatttatgtccatgcttgcattgtgttcccatcgcttaatattggacgattac

SEQ ID NO: 218156 - DNA, 1452 bp, Zea Mays
ctaaagttcgccacctggttttgtgcttcttcaggtttattgcctccattcacttcacggcttaaactacccaattttttgcaatttagtcattttttcgaagaaaaaaaatcatgtttcggctgacttcgagcaggtgttcaggatccatgataggttgtacatcgttttctcaaggctcaccactgacgctcggatgctatgagttgtagttgctgaattttccctgcccaccaccacctattatcttctgttcggctgcttttcgatccctctgcaggtaccattggttgttcttcaggcacaacatgtatcagctgcgtcaggagagggacatgaagcatgagacttttgccatcttgtctctgggaagaggttataatcactcctgagcacaacgaagaagggatttacacgatcagattctacattcagattacaacgtcaataacaggcccagtgaatgctgaaagatgcgctttcatagaagaaactaagctctcaagatggtggcagaattaactcctttcctgttatgtttaggtttcaaggacagcctctgtataagctcagaccaagcaaattccgtgcagcaattgaggaggctttccttgctgaacgtggttttttttatctccaaacggatgaggtggttgcaggactgtggatcctttctgtccatgggagctgctgcaattttctcaccttgtcttacatagtttttgtggtattgtacacagtgctggtcttgtacgaggtcaccctcagatgaactttagtgattgctcccaggcgcggcatgcatgctttgctttattcacatgatcgagttcccctcacgtccacgctctatccgatgccacgagagttttccagaagcaagtccacggattgtgtgttcagcaaataagtaaaccacattgccgccgggtccacgagggagaaaggaaacacgagcattgtttcctccgtcgacgacagagctccaaattgccgaccaccgccgcaccttgaagaccgccgtgctgttcgtcgtggtggcccgtctcaggcaacgacgactacgtcggtcgtggcctcaaagacctcccgccaccgctgtgacttgaagccctcctccatgccaatcaaggaatatcggccaccgctgtgccttgaagaggtacccccggttaccacatgtcgaagacctctcggagcactttgcctacttgcttaacatcttcctggcatattgaaagtgatgcagcggtaatgataatatactttatttatgtccatgttgttcttgcttcctatacccaaacacctctgcacttttgcatctggagcaccttggttatttgcatattgccttcacagtatactgaaagttatatggtggtgctccaataaactttatttatgtccatgcttgcattgtgttcccatcgcttaatattggacgattac

SEQ ID NO: 218157 - DNA, 1418 bp, Zea Mays
ctaaagttcgccacctggttttgtgcttcttcaggtgttcaggatccatgataggttgtacatcgttttctcaaggctcaccactgacgctcggatgctatgagttgtagttgctgaattttccctgcccaccaccacctattatcttctgttcggctgcttttcgatccctctgcaggtaccattggttgttcttcaggcacaacatgtatcagctgcgtcaggagagggacatgaagcatgagacttttgccatcttgtctctgggaagaggttataatcactcctgagcacaacgaagaagggatttacacgatcagattctacattcagattacaacgtcaataacaggcccagtgaatgctgaaagatgcgctttcatagaagaaactaagctctcaagatggtggcagaattaactcctttcctgttatgtttagacaggtttcaaggacagcctctgtataagctcagaccaagcaaattccgtgcagcaattgaggaggctttccttgctgaacgtggttttttttatctccaaacggatgaggtggttgcaggactgtggatcctttctgtccatgggagctgctgcaattttctcaccttgtcttacatagtgctggtcttgtacgaggtcaccctcagatgaactttagtgattgctcccaggcgcggcatgcatgctttgctttattcacatgatcgagttcccctcacgtccacgctctatccgatgccacgagagttttccagaagcaagtccacggattgtgtgttcagcaaataagtaaaccacattgccgccgggtccacgagggagaaaggaaacacgagcattgtttcctccgtcgacgacagagctccgttcgtctccccctcagtttgacagcctcgctctgtcttctctcctcaatcgcgtgcttactcttcagcatttactccttagtagaaattgccgaccaccgccgcaccttgaagaccgccgtgctgttcgtcgtggtggcccgtctcaggcaacgacgactacgtcggtcgtggcctcaaagacctcccgccaccgctgtgacttgaagccctcctccatgccaatcaaggaatatcggccaccgctgtgccttgaagaggtacccccggttaccacatgtcgaagacctctcggagcactttgcctacttgcttaacatcttcctggcatattgaaagtgatgcagcggtaatgataatatactttatttatgtccatgttgttcttgcttcctatacccaaacacctctgcacttttgcatctggagcaccttggttatttgcatattgccttcacagtatactgaaagttatatggtggtgctccaataaactttatttatgtccatgcttgcattgtgttcccatcgcttaatattggacgattac

SEQ ID NO: 218158 - DNA, 2413 bp, Zea Mays
ctaccatgcatagttcttccacattagtttcttgtgcttgtctaatccaatttcttttcgtgacatttctcagtacagttttcagtatttctttcaactcatcatactaatagggagagtgagtgcctcagccccaaggctatattctatgccgatatgaacttaattcaaaaataaaaaaggaaacgttacaggctcaaacctcaatcgacaaacagcaactaggattcctacaaagctgtatctaagttattaaaacttccccttttgaagccccgtccgcacttcacgggatcgtttcgtatcaggctttgacacctgttagagcgcggacccgaaatcggattctaattgagctctgagcagcggtgtcctgagtccgtcaccgtgttctctcccccgcgcttcccttcaacgccgcctccctaaagatccgccgcttctctgccctctgctcgtcgattcggcgcctcctctccttcacgcgcccacgctgccgtcgcctcctcctcactgtcgtccatgccgctgtagccgcctacggccatggccgctagagccagcgactatttgacggtggagtaccactccagagagctcccctctttcccctccgacgacgagggaggcaccgccggcagtggcgtcctcgtatgcagaacagcagaagacgctcgctcgctctgcgcgcatcgaaccaaaaaccacacctcggcggcagctatataaaagccttcacctgacccgggcgctagggtttattcgctcctcccacccgccgccgtcgccgcctcctctccccagcacccggagctcgctcgaccgccgctcaccatgatcatccccaagaagaaccgcaatgagatctgcaagtacctcttcaaggagggcgtgttgtatgccaagaaggactacaacctggcgaagcatccgcagatcgatgtgcccaacctccaggactccaggtgatcaagctcatgcagagctttaagtccaaggagtatgttagggagaccttctcctggcagtactactactggtacctcaccaacgatggcattgagcacctacgcaactacctgaacctccggtctgagatcgtgcctgccacgctcaagaagtctgccaagccaccgggccgcccatttggctctggccctcctggtgaccgcccaaggtaccattggttgttcttcaggcacaacatgtatcagctgcgtcaggagagggacatgaagcatgagacttttgccatcttgtctctgggaagaggttataatcactcctgagcacaacgaagaagggatttacacgatcagattctacattcagattacaacgtcaataacaggcccagtgaatgctgaaagatgcgctttcatagaagaaactaagctctcaagatggtggcagaattaactcctttcctgttatgtttaggtttcaaggacagcctctgtataagctcagaccaagcaaattccgtgcagcaattgaggaggctttccttgctgaacgtggttttttttatctccaaacggatgaggtggttgcaggactgtggatcctttctgtccatgggagctgctgcaattttctcaccttgtcttacatagtgctggtcttgtacgaggtcaccctcagatgaactttagtgattgctcccaggcgcggcatgcatgctttgctttattcacatgatcgagttcccctcacgtccacgctctatccgatgccacgagagttttccagaagcaagtccacggattgtgtgttcagcaaataagtaaaccacattgccgccgggtccacgagggagaaaggaaacacgagcattgtttcctccgtcgacgacagagctccgttcgtctccccctcagtttgacagcctcgctctgtcttctctcctcaatcgcgtgcttactcttcagcatttactccttagtagaaattgccgaccaccgccgcaccttgaagaccgccgtgctgttcgtcgtggtggcccgtctcaggcaacgacgactacgtcggtcgtggcctcaaagacctcccgccaccgctgtgacttgaagccctcctccatgccaatcaaggaatatcggccaccgctgtgccttgaagaggtacccccggttaccacatgtcgaagacctctcggagcactttgcctacttgcttaacatcttcctggcatattgaaagtgatgcagcggtaatgataatatactttatttatgtccatgttgttcttgcttcctatacccaaacacctctgcacttttgcatctggagcaccttggttatttgcatattgccttcacagtatactgaaagttatatggtggtgctccaataaactttatttatgtccatgcttgcattgtgttcccatcgcttaatattggacgattac

SEQ ID NO: 218159 - DNA, 2532 bp, Zea Mays
cgccagtcaagttttcagtgtccggctgccggcagtcaccgcaaaacgaaatctctctcctccacctcgtagtcgtagccgtttcatccactttctagtttcctttctcctcctccagccctccttaaaaaatcggccacggttatttatttctctcgccccgctccgctttcctaatctgcgagctggggggagatcgagaccctagaacggagggcgggtgtgcggcgctgagggccttagacgaatggcggtggaggagaccgcggagagctgcggcagccacgccgcgaccgctgcgtccggcggcggcgcggcggggcccgcgacgtcctcgtcatcggccgccgcggcggcgcaggcgcggaagcagcaacagcagcagcgccataagctcgaggtgtacacggaggttcttcggcgcctccacgacgccggcctgcccgacgcgcgggcgcccgggttcgacgacgagctctggaatcacttcaaccgcctccctgcccgctacgccatggatgtgaacgtggagagggcggaggacgtgctcacgcacaagcggctcctggagcaggccaaggatccggctcatcgcccggctttcgcggtgcggtccgtgcaggggaggaagtcgcttcaagactgttgaacaggcagcaaagcatatatcctcctcctgccttcggttcttctacaaatcttgaggcccttgctcttgaagctagcaagtctcatgatcacgatagcacttctgataatggccgatctctatacaggcccatgcatgaaatcaccttttcaaccattgacaagccaaaacttctcagtgagctgacatctctgcttggtgagcttggtctaaacattcaagaagcacatgcattttcaacaaatgatggctactcacttgatgtcttcgttgttgtcggttggcatgatgaggaaacagaggatttagtagaagcagtgcagaaggaaattggcaggattgaagagttgaaaaaatgcagattgctgagaattcagcagctgaccgtgttgagataccaacagatggtgctagtgaatgggaaattgatgtaaagcttctcaagtttgggaataaagtagcatcaggatcatatggtgacctttaccggggtacatattgcagtcaagatgttgctattaaagtgctgaaacctgagagaataaatgcagacatgcaacgagaatttgctcaggaagtatatattatgaggaaggtccgtcacaagaatgttgtgcaatttattggggcttgcactaaacccccaaacctatgtatagtcacagaatttatgtccggtggaagtgtgtatgattacctccataaacataaaggtgttttcaaacttcctgctttagttggagttgcaacggatgtgtcaaaaggcatgagctacttacaccagaataatattattcatcgtgatttgaaaactgcaaaccttctgatggatgaaaatgggactgttaaagttgctgattttggtgttgcacgtgttaaagctcaatctggagttatgactgcagaaactggtacttaccgttggatggccccagaggtcattgagcacaaaccctatgatcacaaggctgatgtttttagttttggaattttgatgtgggaactactcacagggaagattccttatgagtacctgactccactacaagccgctgttggtgtggtgcagaagggattacggcctacaattccaaagcatactcacgcaaagctttccgagcttcttcagaaatgctggcagcaggaccctacccaaagaccagacttctccgaaatattagaaactcttcagagaatagcagaggaggtcggagaggagcacgatgggaagcacaaggacagaacactgggtggtttcttttcggctttgagggggcggagccattgagacacagtcgaagacttttaataataaaaatgtacatggcctcggtccgtcctttgaaggacctgagctacaaccagtgcagtgcctgttcctcgcacgtcagcaccagtacacagaaatacagacctgctgtgcagctgcagttgactgaagcggcaatttttatttagctgcagccatcgctttccgcatatccgcttgttattcctgagttccattacgcaatgtataacataggtgaggaagcttgggaactgtatcatcagtctgatttccctgggagtgcaatcctgctgtagatgaaaaaaaaagccagattcaggccgtggcatgattcttttaagactccatcatttagcatcttttcgtttatggcagcgcggcgagcttgagtagctgaacaacagaacaaggcacctgcatctgcatgggttctgctcgcttgtgccaatttttgttccccagttgccgtgagaacaaactataatatcttatattcagaacaaatggagagaaaaaaaccatgtgtgtagtcttcatcgacagttcgacactgatgattcgaggagtagcactagaaagaggtagacttgtg

SEQ ID NO: 218160 - DNA, 2565 bp, Zea Mays
caagttttcagtgtccggctgccggcagtcaccgcaaaacgaaatctctctcctccacctcgtagtcgtagccgtttcatccactttctagtttcctttctcctcctccagccctccttaaaaaatcggccacggttatttatttctctcgccccgctccgctttcctaatctgcgagctggggggagatcgagaccctagaacggagggcgggtgtgcggcgctgagggccttagacgaatggcggtggaggagaccgcggagagctgcggcagccacgccgcgaccgctgcgtccggcggcggcgcggcggggcccgcgacgtcctcgtcatcggccgccgcggcggcgcaggcgcggaagcagcaacagcagcagcgccataagctcgaggtgtacacggaggttcttcggcgcctccacgacgccggcctgcccgacgcgcgggcgcccgggttcgacgacgagctctggaatcacttcaaccgcctccctgcccgctacgccatggatgtgaacgtggagagggcggaggacgtgctcacgcacaagcggctcctggagcaggccaaggatccggctcatcgcccggctttcgcggtgcggtccgtgcaggggaggaagtcgcttcaagactgttgaacaggcagcaaagcatatatcctcctcctgccttcggttcttctacaaatcttgaggcccttgctcttgaagctagcaagtctcatgatcacgatagcacttctgataatggccgatctctatacaggcccatgcatgaaatcaccttttcaaccattgacaagccaaaacttctcagtgagctgacatctctgcttggtgagcttggtctaaacattcaagaagcacatgcattttcaacaaatgatggctactcacttgatgtcttcgttgttgtcggttggcatgatgaggaaacagaggatttagtagaagcagtgcagaaggaaattggcaggattgaagagacacaagcatggtcttcatctcattcatggtctactccagttgaaaaaatgcagattgctgagaattcagcagctgaccgtgttgagataccaacagatggtgctagtgaatgggaaattgatgtaaagcttctcaagtttgggaataaagtagcatcaggatcatatggtgacctttaccggggtacatattgcagtcaagatgttgctattaaagtgctgaaacctgagagaataaatgcagacatgcaacgagaatttgctcaggaagtatatattatgaggaaggtccgtcacaagaatgttgtgcaatttattggggcttgcactaaacccccaaacctatgtatagtcacagaatttatgtccggtggaagtgtgtatgattacctccataaacataaaggtgttttcaaacttcctgctttagttggagttgcaacggatgtgtcaaaaggcatgagctacttacaccagaataatattattcatcgtgatttgaaaactgcaaaccttctgatggatgaaaatgggactgttaaagttgctgattttggtgttgcacgtgttaaagctcaatctggagttatgactgcagaaactggtacttaccgttggatggccccagaggtcattgagcacaaaccctatgatcacaaggctgatgtttttagttttggaattttgatgtgggaactactcacagggaagattccttatgagtacctgactccactacaagccgctgttggtgtggtgcagaagggattacggcctacaattccaaagcatactcacgcaaagctttccgagcttcttcagaaatgctggcagcaggaccctacccaaagaccagacttctccgaaatattagaaactcttcagagaatagcagaggaggtcggagaggagcacgatgggaagcacaaggacagaacactgggtggtttcttttcggctttgagggggcggagccattgagacacagtcgaagacttttaataataaaaatgtacatggcctcggtccgtcctttgaaggacctgagctacaaccagtgcagtgcctgttcctcgcacgtcagcaccagtacacagaaatacagacctgctgtgcagctgcagttgactgaagcggcaatttttatttagctgcagccatcgctttccgcatatccgcttgttattcctgagttccattacgcaatgtataacataggtgaggaagcttgggaactgtatcatcagtctgatttccctgggagtgcaatcctgctgtagatgaaaaaaaaagccagattcaggccgtggcatgattcttttaagactccatcatttagcatcttttcgtttatggcagcgcggcgagcttgagtagctgaacaacagaacaaggcacctgcatctgcatgggttctgctcgcttgtgccaatttttgttccccagttgccgtgagaacaaactataatatcttatattcagaacaaatggagagaaaaaaaccatgtgtgtagtcttcatcgacagttcgacactgatgattcgaggagtagcactagaaagaggtagacttgtg

SEQ ID NO: 218161 - DNA, 2587 bp, Zea Mays
ggcagtcaccgcaaaacgaaatctctctcctccacctcgtagtcgtagccgtttcatccactttctagtttcctttctcctcctccagccctccttaaaaaatcggccacggttatttatttctctcgccccgctccgctttcctaatctgcgagctggggggagatcgagaccctagaacggagggcgggtgtgcggcgctgagggccttagacgaatggcggtggaggagaccgcggagagctgcggcagccacgccgcgaccgctgcgtccggcggcggcgcggcggggcccgcgacgtcctcgtcatcggccgccgcggcggcgcaggcgcggaagcagcaacagcagcagcgccataagctcgaggtgtacacggaggttcttcggcgcctccacgacgccggcctgcccgacgcgcgggcgcccgggttcgacgacgagctctggaatcacttcaaccgcctccctgcccgctacgccatggatgtgaacgtggagagggcggaggacgtgctcacgcacaagcggctcctggagcaggccaaggatccggctcatcgcccggctttcgcggtgcggtccgtgcaggtatctccaattcttgatgggaatcagactgattctgattcgaacactgcaggggaggaagtcgcttcaagactgttgaacaggcagcaaagcatatatcctcctcctgccttcggttcttctacaaatcttgaggcccttgctcttgaagctagcaagtctcatgatcacgatagcacttctgataatggccgatctctatacaggcccatgcatgaaatcaccttttcaaccattgacaagccaaaacttctcagtgagctgacatctctgcttggtgagcttggtctaaacattcaagaagcacatgcattttcaacaaatgatggctactcacttgatgtcttcgttgttgtcggttggcatgatgaggaaacagaggatttagtagaagcagtgcagaaggaaattggcaggattgaagagacacaagcatggtcttcatctcattcatggtctactccagttgaaaaaatgcagattgctgagaattcagcagctgaccgtgttgagataccaacagatggtgctagtgaatgggaaattgatgtaaagcttctcaagtttgggaataaagtagcatcaggatcatatgttaccggggtacatattgcagtcaagatgttgctattaaagtgctgaaacctgagagaataaatgcagacatgcaacgagaatttgctcaggaagtatatattatgaggaaggtccgtcacaagaatgttgtgcaatttattggggcttgcactaaacccccaaacctatgtatagtcacagaatttatgtccggtggaagtgtgtatgattacctccataaacataaaggtgttttcaaacttcctgctttagttggagttgcaacggatgtgtcaaaaggcatgagctacttacaccagaataatattattcatcgtgatttgaaaactgcaaaccttctgatggatgaaaatgggactgttaaagttgctgattttggtgttgcacgtgttaaagctcaatctggagttatgactgcagaaactggtacttaccgttggatggccccagaggtcattgagcacaaaccctatgatcacaaggctgatgtttttagttttggaattttgatgtgggaactactcacagggaagattccttatgagtacctgactccactacaagccgctgttggtgtggtgcagaagggattacggcctacaattccaaagcatactcacgcaaagctttccgagcttcttcagaaatgctggcagcaggaccctacccaaagaccagacttctccgaaatattagaaactcttcagagaatagcagaggaggtcggagaggagcacgatgggaagcacaaggacagaacactgggtggtttcttttcggctttgagggggcggagccattgagacacagtcgaagacttttaataataaaaatgtacatggcctcggtccgtcctttgaaggacctgagctacaaccagtgcagtgcctgttcctcgcacgtcagcaccagtacacagaaatacagacctgctgtgcagctgcagttgactgaagcggcaatttttatttagctgcagccatcgctttccgcatatccgcttgttattcctgagttccattacgcaatgtataacataggtgaggaagcttgggaactgtatcatcagtctgatttccctgggagtgcaatcctgctgtagatgaaaaaaaaagccagattcaggccgtggcatgattcttttaagactccatcatttagcatcttttcgtttatggcagcgcggcgagcttgagtagctgaacaacagaacaaggcacctgcatctgcatgggttctgctcgcttgtgccaatttttgttccccagttgccgtgagaacaaactataatatcttatattcagaacaaatggagagaaaaaaaccatgtgtgtagtcttcatcgacagttcgacactgatgattcgaggagtagcactagaaagaggtagacttgtg

SEQ ID NO: 218162 - DNA, 2555 bp, Zea Mays
ctctcctccacctcgtagtcgtagccgtttcatccactttctagtttcctttctcctcctccagccctccttaaaaaatcggccacggttatttatttctctcgccccgctccgctttcctaatctgcgagctggggggagatcgagaccctagaacggagggcgggtgtgcggcgctgagggccttagacgaatggcggtggaggagaccgcggagagctgcggcagccacgccgcgaccgctgcgtccggcggcggcgcggcggggcccgcgacgtcctcgtcatcggccgccgcggcggcgcaggcgcggaagcagcaacagcagcagcgccataagctcgaggtgtacacggaggttcttcggcgcctccacgacgccggcctgcccgacgcgcgggcgcccgggttcgacgacgagctctggaatcacttcaaccgcctccctgcccgctacgccatggatgtgaacgtggagagggcggaggacgtgctcacgcacaagcggctcctggagcaggccaaggatccggctcatcgcccggctttcgcggtatctccaattcttgatgggaatcagactgattctgattcgaacactgcaggggaggaagtcgcttcaagactgttgaacaggcagcaaagcatatatcctcctcctgccttcggttcttctacaaatcttgaggcccttgctcttgaagctagcaagtctcatgatcacgatagcacttctgataatggccgatctctatacaggcccatgcatgaaatcaccttttcaaccattgacaagccaaaacttctcagtgagctgacatctctgcttggtgagcttggtctaaacattcaagaagcacatgcattttcaacaaatgatggctactcacttgatgtcttcgttgttgtcggttggcatgatgaggaaacagaggatttagtagaagcagtgcagaaggaaattggcaggattgaagagacacaagcatggtcttcatctcattcatggtctactccagttgaaaaaatgcagattgctgagaattcagcagctgaccgtgttgagataccaacagatggtgctagtgaatgggaaattgatgtaaagcttctcaagtttgggaataaagtagcatcaggatcatatggtgacctttaccggggtacatattgcagtcaagatgttgctattaaagtgctgaaacctgagagaataaatgcagacatgcaacgagaatttgctcaggaagtatatattatgaggaaggtccgtcacaagaatgttgtgcaatttattggggcttgcactaaacccccaaacctatgtatagtcacagaatttatgtccggtggaagtgtgtatgattacctccataaacataaaggtgttttcaaacttcctgctttagttggagttgcaacggatgtgtcaaaaggcatgagctacttacaccagaataatattattcatcgtgatttgaaaactgcaaaccttctgatggatgaaaatgggactgttaaagttgctgattttggtgttgcacgtgttaaagctcaatctggagttatgactgcagaaactggtacttaccgttggatggccccagaggtcattgagcacaaaccctatgatcacaaggctgatgtttttagttttggaattttgatgtgggaactactcacagggaagattccttatgagtacctgactccactacaagccgctgttggtgtggtgcagaagggattacggcctacaattccaaagcatactcacgcaaagctttccgagcttcttcagaaatgctggcagcaggaccctacccaaagaccagacttctccgaaatattagaaactcttcagagaatagcagaggaggtcggagaggagcacgatgggaagcacaaggacagaacactgggtggtttcttttcggctttgagggggcggagccattgagacacagtcgaagacttttaataataaaaatgtacatggcctcggtccgtcctttgaaggacctgagctacaaccagtgcagtgcctgttcctcgcacgtcagcaccagtacacagaaatacagacctgctgtgcagctgcagttgactgaagcggcaatttttatttagctgcagccatcgctttccgcatatccgcttgttattcctgagttccattacgcaatgtataacataggtgaggaagcttgggaactgtatcatcagtctgatttccctgggagtgcaatcctgctgtagatgaaaaaaaaagccagattcaggccgtggcatgattcttttaagactccatcatttagcatcttttcgtttatggcagcgcggcgagcttgagtagctgaacaacagaacaaggcacctgcatctgcatgggttctgctcgcttgtgccaatttttgttccccagttgccgtgagaacaaactataatatcttatattcagaacaaatggagagaaaaaaaccatgtgtgtagtcttcatcgacagttcgacactgatgattcgaggagtagcactagaaagaggtagacttgtg

SEQ ID NO: 218163 - DNA, 2234 bp, Zea Mays
cactttctagtttcctttctcctcctccagccctccttaaaaaatcggccacggttatttatttctctcgccccgctccgctttcctaatctgcgagctggggggagatcgagaccctagaacggagggcgggtgtgcggcgctgagggccttagacgaatggcggtggaggagaccgcggagagctgcggcagccacgccgcgaccgctgcgtccggcggcggcgcggcggggcccgcgacgtcctcgtcatcggccgccgcggcggcgcaggcgcggaagcagcaacagcagcagcgccataagctcgaggtgtacacggaggttcttcggcgcctccacgacgccggcctgcccgacgcgcgggcgcccgggttcgacgacgagctctggaatcacttcaaccgcctccctgcccgctacgccatggatgtgaacgtggagagggcggaggacgtgctcacgcacaagcggctcctggagcaggccaaggatccggctcatcgcccggctttcgcggtgcggtccgtgcaggggaggaagtcgcttcaagactgttgaacaggcagcaaagcatatatcctcctcctgccttcggttcttctacaaatcttgaggcccttgctcttgaagctagcaagtctcatgatcacgatagcacttctgataatggccgatctctatacaggcccatgcatgaaatcaccttttcaaccattgacaagccaaaacttctcagtgagctgacatctctgcttggtgagcttggtctaaacattcaagaagcacatgcattttcaacaaatgatggctactcacttgatgtcttcgttgttgtcggttggcatgatgaggaaacagaggatttagtagaagcagtgcagaaggaaattggcaggattgaagagacacaagcatggtcttcatctcattcatggtctactccagttgaaaaaatgcagattgctgagaattcagcagctgaccgtgttgagataccaacagatggtgctagtgaatgggaaattgatgtaaagcttctcaagtttgggaataaagtagcatcaggatcatatggtgacctttaccggggtacatattgcagtcaagatgttgctattaaagtgctgaaacctgagagaataaatgcagacatgcaacgagaatttgctcaggaagtatatattatgagactgttaaagttgctgattttggtgttgcacgtgttaaagctcaatctggagttatgactgcagaaactggtacttaccgttggatggccccagaggtcattgagcacaaaccctatgatcacaaggctgatgtttttagttttggaattttgatgtgggaactactcacagggaagattccttatgagtacctgactccactacaagccgctgttggtgtggtgcagaagggattacggcctacaattccaaagcatactcacgcaaagctttccgagcttcttcagaaatgctggcagcaggaccctacccaaagaccagacttctccgaaatattagaaactcttcagagaatagcagaggaggtcggagaggagcacgatgggaagcacaaggacagaacactgggtggtttcttttcggctttgagggggcggagccattgagacacagtcgaagacttttaataataaaaatgtacatggcctcggtccgtcctttgaaggacctgagctacaaccagtgcagtgcctgttcctcgcacgtcagcaccagtacacagaaatacagacctgctgtgcagctgcagttgactgaagcggcaatttttatttagctgcagccatcgctttccgcatatccgcttgttattcctgagttccattacgcaatgtataacataggtgaggaagcttgggaactgtatcatcagtctgatttccctgggagtgcaatcctgctgtagatgaaaaaaaaagccagattcaggccgtggcatgattcttttaagactccatcatttagcatcttttcgtttatggcagcgcggcgagcttgagtagctgaacaacagaacaaggcacctgcatctgcatgggttctgctcgcttgtgccaatttttgttccccagttgccgtgagaacaaactataatatcttatattcagaacaaatggagagaaaaaaaccatgtgtgtagtcttcatcgacagttcgacactgatgattcgaggagtagcactagaaagaggtagacttgtg

SEQ ID NO: 218164 - DNA, 2480 bp, Zea Mays
cactttctagtttcctttctcctcctccagccctccttaaaaaatcggccacggttatttatttctctcgccccgctccgctttcctaatctgcgagctggggggagatcgagaccctagaacggagggcgggtgtgcggcgctgagggccttagacgaatggcggtggaggagaccgcggagagctgcggcagccacgccgcgaccgctgcgtccggcggcggcgcggcggggcccgcgacgtcctcgtcatcggccgccgcggcggcgcaggcgcggaagcagcaacagcagcagcgccataagctcgaggtgtacacggaggttcttcggcgcctccacgacgccggcctgcccgacgcgcgggcgcccgggttcgacgacgagctctggaatcacttcaaccgcctccctgcccgctacgccatggatgtgaacgtggagagggcggaggacgtgctcacgcacaagcggctcctggagcaggccaaggatccggctcatcgcccggctttcgcggtgcggtccgtgcaggggaggaagtcgcttcaagactgttgaacaggcagcaaagcatatatcctcctcctgccttcggttcttctacaaatcttgaggcccttgctcttgaagctagcaagtctcatgatcacgatagcacttctgataatggccgatctctatacaggcccatgcatgaaatcaccttttcaaccattgacaagccaaaacttctcagtgagctgacatctctgcttggtgagcttggtctaaacattcaagaagcacatgcattttcaacaaatgatggctactcacttgatgtcttcgttgttgtcggttggcatgatgaggaaacagaggatttagtagaagcagtgcagaaggaaattggcaggattgaagagacacaagcatggtcttcatctcattcatggtctactccagttgaaaaaatgcagattgctgagaattcagcagctgaccgtgttgagataccaacagatggtgctagtgaatgggaaattgatgtaaagcttctcaagtttgggaataaagtagcatcaggatcatatggtgacctttaccggggtacatattgcagtcaagatgttgctattaaagtgctgaaacctgagagaataaatgcagacatgcaacgagaatttgctcaggaagtatatattatgaggtccgtcacaagaatgttgtgcaatttattggggcttgcactaaacccccaaacctatgtatagtcacagaatttatgtccggtggaagtgtgtatgattacctccataaacataaaggtgttttcaaacttcctgctttagttggagttgcaacggatgtgtcaaaaggcatgagctacttacaccagaataatattattcatcgtgatttgaaaactgcaaaccttctgatggatgaaaatgggactgttaaagttgctgattttggtgttgcacgtgttaaagctcaatctggagttatgactgcagaaactggtacttaccgttggatggccccagaggtcattgagcacaaaccctatgatcacaaggctgatgtttttagttttggaattttgatgtgggaactactcacagggaagattccttatgagtacctgactccactacaagccgctgttggtgtggtgcagaagggattacggcctacaattccaaagcatactcacgcaaagctttccgagcttcttcagaaatgctggcagcaggaccctacccaaagaccagacttctccgaaatattagaaactcttcagagaatagcagaggaggtcggagaggagcacgatgggaagcacaaggacagaacactgggtggtttcttttcggctttgagggggcggagccattgagacacagtcgaagacttttaataataaaaatgtacatggcctcggtccgtcctttgaaggacctgagctacaaccagtgcagtgcctgttcctcgcacgtcagcaccagtacacagaaatacagacctgctgtgcagctgcagttgactgaagcggcaatttttatttagctgcagccatcgctttccgcatatccgcttgttattcctgagttccattacgcaatgtataacataggtgaggaagcttgggaactgtatcatcagtctgatttccctgggagtgcaatcctgctgtagatgaaaaaaaaagccagattcaggccgtggcatgattcttttaagactccatcatttagcatcttttcgtttatggcagcgcggcgagcttgagtagctgaacaacagaacaaggcacctgcatctgcatgggttctgctcgcttgtgccaatttttgttccccagttgccgtgagaacaaactataatatcttatattcagaacaaatggagagaaaaaaaccatgtgtgtagtcttcatcgacagttcgacactgatgattcgaggagtagcactagaaagaggtagacttgtg

SEQ ID NO: 218165 - DNA, 1606 bp, Zea Mays
atggcggtcgccttcgcctcctcgcggcgcgccctgcacaccctccaccgccgcctcctcctccacccctcccccacacccgccgccgcgcgccgcgcgctacccacttccactcgtactcccatccccgcccactcccccaccttcatctcctcctcctcctcctcctcctcctcccgcttcttcaccaccgcgcgcaccgatgcgacgaggctgcggcacggggtgctgccgcagcggctggcgggcggggtcaggtcggtggcgagcggcgggtcgaagctggcgccgctgggccagggggtcaaggggctggggcggcccatggaggcggcgaggagcgcggccgcgcggtaccgcgcggccgtcggcctgcaggtcgaggccttctggcggcgcaactacatgatcctcgtcggcgcgggggcagtcgtcgtctgcgtcgcgctgtggaggatcatgttcggcatcgccagcaccttcgtcggcctctccgagggcatggccaagtacggcttcctcgccctagccaccgcccttgtcgcctttgccacaacagcttaccatgttgggaaacaaatagagagcctataccctgcaagatggtcatattaatagcagataaccatgcatcagggcatgtatgcccgggcaaggttaaccataaaccctgacaaggtttaccggctggctatgacaaaactcaatacatctgctgcaatccttgaagttatgggtgcgcccctaactggtactgatgtcagagcatatgttatgtctggaggaggcccgaaactgaaggacttcaaatttaagcttggcagcaaacggtgcttcctcattttccccatcaaaggatcagaaagaaggggtcttgtaagtgttgagttcaagaagaaaaagggacagtatgacatgaaactactagctgttgacataccaatggcatcaggtcctgaccagcggctgttcgtcgtcggtgatgaacaagagtacaaggtgggcgggggcttgatatctgagctgcgagacccgatcgtaaaagctatggctgcagaaaaggagtttgattatcttgatgaaagagaggacgaggaagatgagcggagggagcgtgaggaggcggagcaagaggaagcggaagcattgaggcgcgaggaggaaaggttgcgtcagcaggctgaagaacggaggcggcgggaggaggctgagagcctggagaaagcttcgtgacatgatttaactgcatcgattttccaccttgtgcattgttttatacttctctccccctcccggagtgtagcagtccgcgtttccacagcaagagaagattgcttctgagttcggttgagttccagacttccaggtggtcgattcggcgtcaccagtctcaagttgttgaggagaaaggaataattttgcatgttccgcaacagaacacttcggcgaaacaatgtaatttagtggttggtcagttgttaaagccttttttttttttgctgaatgtctgcggtcatggaattgagatgagtaaagttgagtttgtagttaggttttgattaacccaaaaagatttataaaagtttaattcatcatctctctcctt

SEQ ID NO: 218166 - DNA, 794 bp, Zea Mays
cttttcccaccgtttctttcctcacctcccgcgacagcaccggtagctgccatggcctcttgcgacctccttgatgtcgaccctctggagcttcagtttccgttcgtgctcgacaagcagatcccctgcccgctgcggctcgccaacaggactgaccgtaccgtcgcctttaaggtgaagacgacgaacccgaggaagtactgcgtgcgccccaacaatggcatcgtaccgccccgatccttgtgtacggttgtagtcacgatgcaggcgcagacggtggtgcctccggatttgcagtgcaaggacaagttcatggtgcagagcgtggtcatcagtgatagcttgtcagccaaggacataacctctcaaatgttcgcgaaagaggggggtaatgtgctccaggaggtaaaattgaaggttgcttatgtgatgccacctgaaccaccatcagagattgcagaggagcacgatggtttagatcgagttttagtgcctatgcagaggatcgtggataatgggaaaagtacttcagagctatcgagtggctccgtgtcattgaggtcagctgaggagtttggatcacctgttggtcgaattgtgaagagtgaggagtttctgaaggctgcaggacctgctatggaaacaaaaacatatgcaggacctggtgaacaatctcatcagctgtcagctataattacaaagctgactgaagaaaagaattctgctcttgagcaaaacagaaagcttcaagttgaattggaaattctgaatttctagggaaaattttctactgg

SEQ ID NO: 218167 - DNA, 2196 bp, Zea Mays
cgactcccgggctccgtgtctcgctcgactgacccgttcttccccgaggggcgaggaggagtgtccatgaccggagcctgacgcgcctacagagggagaaaggagggggaatacccggcccggtccagatctctcagaccgaagcgctggacaaggggccgatggcttcggcggctgcagcggtgatcccggacggccggcgatggagcaaaggtccgggctcctcgtcgtcgccggtgacaacggccattttcctcttcttcttcgttgtcgtggtcggcgtcctcgtgtccgcccgctggatcaccaccacgactcatctgtcgaccaccaatctggatcagtggagctcaaagctggtaggctatcttaaccgcgacgcacaccacctcctccatcccggccatccccgcggcaccgccgccgcctcggccgacctactccctctcctgcccggcgccgccgcttcaccgtgacccgaccatccccagcaacatctcccagaccctcgacctcgtgctctcccccaacgcctcctccgcctccacttgcgccgcctttcccgaccccccgccgctccctgccaactccaacgcctcctccacctgccccgcctacttccgcttcatccacgaggacctccacccatggcgcgccgctgggggcatcacccgcgccatggtcgaccgcgcgcgcgccaccgccaacttccgcctcgtcgtcatccggggccgcgcgtacatcgagcgcatcgcgccggcattccagacgcgcgacctcttcaccatctggggcattctgcagctgctccggcgctaccccggccgcgtccctgacctcgacctcatgtttgactgcgtcgactggcccgtcgtgcacgccgaccagtaccagggggagaacgccacgctattgccgccgctcttcaggtactgcggcgacaacgagacgctagatgttgtcttcccagactggtcattctggggctggcctgagatcaacataaaaccgtgggatgctctgcagaaggaattgaatggtggaaacaagagggtgaaatggttggctagagaaccttatgcttattggaaagggaatccagatgttgcagttacaaggcaggagcttgttaagtgtaacgtctccagtaagcatgaatggaatgcaaggatttacaaacaggattggctcaaagagatcaaggcaggatacaaacagtcagatttggctagtcaatgcactcataggtacaagatttatattgaaggatcagcatggtcagtcagtgagaagtatattctagcttgtgattccatgacactagttgttacaccaaaatactatgatttttattcaagggtgctgatgcccatgcaacattattggccaatttgggatgacaataagtgtagctccataaagtttgctgttgattggggcaactctcacaagcagaaggcacagaggataggaaagcaaggaagcaactttattcaaaaagagctcagcatggaatatgtatatgattacatgtttcacctcttaactgagtatgccaagctcctaaggttcaagccaagaaaaccacctgaagctattgaggtctgtcctgaatctctggcttgccaagctataggccgcgagaagaagttcatggaggactccatggtgagatccgccagcgatgctggcccatgtgacctgcctcctcctttcagtcctgaggaattcaaagcactgcgacgtaggagagagaaggcaatgaagcggatcgaaacatgggtgcaaaaaacttcgaggcccatggttagcaagccctgagagagcttcatgcttttccctccccaatagatacatacccaatttttgtcgtgctaataacccaaggcatttcttatctgtttgaatcaaatgtgtgattctgcagaagttatagatggtttcagttctccagatcttatcagtattcttctatttgtcttgtggcttgtatttttcgatactctctgctttagctgtaggatgtagcgatattgcttagtgacccgactttagagtgagagtaaagaatgtgtttgtctagagccagttgaggggagggtttagatagagggattccaggacattttgtttggttggtgggacgagaaatgcggttttaggggcacgtttggtctgtggctcttgatgagaaag

SEQ ID NO: 218168 - DNA, 3001 bp, Zea Mays
gaaggacaaccatggcgatgaccctgctcttatcctttacacaagtggcacaactggtaaacctaaaggagtagttcacacccatgagggcattctttctcaggttcagattctatctgaagcgtggggatatcgaagtgaagaccaatttctgcactgtctcccgctgcaccatgtgcatgggcttttcaatgctctatttgcgcccctttattcaggatcagtggttgagtttataccaaaattcagtgtaagcgggatatggcagagatggcgagaatcatatcccaacgatgcgagtaaaagtacagaggccattacagtatttactggagttccaaccatgtatacacgtctgctgcaagggtatgatagtatggatcctgatcaaaagtcggcctcttcttacgctgcaaagcatctgaggttaatgatgtgtggatcatcagctcttccttccccacttatgaagaggtgggaggaagtgacaggccatcgtcttttggaacgctatggtatgactgagtttgtcatggcactgtctaatccattgcatggtatccgaaaagaaggtacagttggtaaacctcttccacgcattgaggccaagatcattatggaggacggggctgaaactacaactggagttggcgagctctgcattagaagtccatctcttttcaaggagtattggaaaagaccagaggtcaccgcagaatctttcattgatggaggattcttcaagacaggtgatacagtaactgtagatgaggaaggatacttcataattttgggacgcacaaatgccgacattatgaaatttggcggttacaagctgtcagcattagaaattgaggcagtactgttagagcatgatgctgtactggaatgtgctgtccttggcttgcctgatgaagcctatggggaggttatatgtgcaataattgtgcctaaggaggatgcaaagaaaaaggctggacaggactcaaagccagcgctaaccttggaagcattaacaagttggtcgaaagataagcttgctccatacaagattccaacaagactatacttgtgggattctcttcctcggaatgccatgggaaaggttaacaagaaggagctgaagaaattgttaggagcttagccatgtgtatagatgtatttatctcttcatttccttcttaaagtttagcaagtcgggctcattatattgattagcgaataagtgctttcgttaccatggaccaataatcttcgaaacggcctgagttagactgcacacacatttatttatcagaaaagtttctagtcacactgcgcagtatcgatgttatgcattgacttgtaggaagactaataaacctcctctgctggtgaccctgacaagtctaaacaacagtaactaataggctagtaaagttaactagatgttttatactaccacatgcattgaacattcaacctccagaagttcattgtttcagccctacagggctcacaggagtcccagccatacaggactagggctgctccgtgttgtcctcctcttcccactccacgttcttcccctcctcgccatacaaccagcagcaccaagcgaagtacacgaagttcgccacgccgtagcccgtgagcagccagtagtaatagtcgtagcggccgacgttcaagttgtcgacgagccagcccgttcccaccccttgcccgctcgccacctgcaccaccttcacgatgagggcgccggccaggttgcccactccgaaggccatgtacagcagcgacatgctgaagctggccatgctcttgggcagctcggtgtacaagaactcgatctccccgatgacgccgaacgcctcggcgagccccacaagcgcgaactgcggcacgagccagaacgccgagatggtgaccccgcgctgcgccagccgcctccgctcgccctccaccgccgcggagacagccgtcgacgcggtggcgaggagcaggcccccaccgatgcgctgcttcatggtgagcccgtgcgggttgcccgtgtaccgctgcagtgccggcgcgacccacctgtcgtagcaggccgaccacagcgacatggtggccatgttgaagacggccaaggagccgctgggaacgcggaacccgcccgcgccgacgcgccggtccatagcatcggcctgcttaacggcgaagctctggttcatggcaagggcgaggaagatggtggaggaccagatcggcaggacgcggatcgccgacttgagctgctccacctggtccaccgtgcacagcctcgtcccgtcgtggccgtgccgctcggaggccgccgccgccgcgtccgagccgttgcagggcgcgtcgtccttggtggcacggagcaagcacgccttgttcaagaacctgaacgtacgtacgtacgcagctcaaaacgccaacgtgttcgtcacaccacgcatccttctgccagctagctagctgcatgttgggggggacgggacgtgacgtatatacctcagcttgtccgtggggacagcgagcttgcagtccttgaggtgatggtacacgccatcgacggtcttgtccggcaaccgcgccccgtggttcctgatcgccgcggcgacggcggtgcctatcccggcgaacatccgcctctcgcccttctccttgatgtataggctcgatcccagcaagaagctgaccgcggagagcagcatgaggcccatcgggacggcgaacccgacgctccacccgacgttgtcctgcaggtagacgatggccgtgacggcgaccgtgaaggccacgccgatggacgcgtagtaggcgttgaagtaggattgcaggatgctggcccggcgctgcctggggtgcctggagaactggtccgcgccgaacgccatggagcacggccggacgccgccggcgccgagggacaggaacgcgaagccggcgagcagccacgcgaggtgcctcgtccccggcggcgcgcactggtcgccgctgcacggag

SEQ ID NO: 218169 - DNA, 1434 bp, Zea Mays
gtttgtttctcaagaacaaagtttcattccatagtctgcatctcaggtccgctctggatactttgctgctggttttgctgatggttctgtcaggatatatgatgtttgctctcctgatagtaggcctgtctatgtggccaggccgcatgccccaagaacagaaaaggttgtgggcatagggtttcagcctgggtttgatccatacgagattgtaagtgcatctcaagctggagacattcagtttcttgatgttagaatggcagcagaaccctacctgactattgaggcacacaggggttcacttacagcattagcggttcatcggcatgccccagttgttgctagttcagccaagcagatgattaaagtgtttagtcttgaaggagaacagttgaggataattcgctacctgccatcttttatgggccaaagaacaggcagtgtaaattgcctttcttttcacccatacaaatcactcctggctgccggtgctggtcataatgctcttgtctctatctatgctgaggaaaattacaagtaagatcgaggcctatatctcatgctcatgataatgcagacacagtgcgatcgacaggccttacatttttggccaagtgatgctccacagcatggtgcagcttcaagatccaagatgatggtaagctttgtcacagagaaggtgttgatggctccatggctttcggtgcatattgcctgttggacggcgtgtgcaatttgtatgatacagtcaagaactcaagattcattaggcctccttgcattgtgaaccctaccctgatcctgccgttgaacttggaggccccatcaacaaattaatcatacctaagttaaccaaaatgtaaatagccagtgcattcgggttgtactttgtcagcattaatccctttttcaagtgtaaaaaggtctgaaggtgcttgatatgataaacatggcttggtagtggctgctgactgggcaagtggggttgtgcatatgggcctggtcgcacatttctgctcacagatgatgttgaatagatagatgtctgctcacagatgaggttgaatagatagatgtctgctcacagatgttgttgaatagatagatgcatttgtccagctaatatagcgctagatgggggtagcgttggcctgcatgaatgaaggaaagttgtcgagtgaggagtgaccttcattgccattctgtgccgcaacaagtctccatgtgttatcagatggccctgtagataatacatatatttgtagatgtgttttgttcggtgaattgtgctgaccgctgagtaaaatgtattgtgaacgttgttgataaatgctattgtaatgaatttgcaacaagaaaaaattatatgctattgtagtgtatatcacaactctggttgctttttatttttatttttttaaaaaaagatctttc

SEQ ID NO: 218170 - DNA, 3769 bp, Zea Mays
cgctcggcaaagagccggattccggcagtgtacgcgtggcttaggaagtggaaacgctgcagcggtaatcgtgtgagcaattaacgctgcatgcagccgctcttttggatttaatttccaccggctgcatgcaagggcaaggacatccaaaatccccttgaaacgtgccagcaacttcattttagattgttttgaaaaaacggcagaatgactagtaatgggaaccggagggagtaaaacaaatagtcatgcaattttattattccttataaattaccgtagtacaaattacttgacaaagttatgttttgtggatcatgccattacccaaaatacactataatatgactggagggcttatatttcttttattgttttactttgcttacatctcttttttgcaggtactgcttagtcagtcacacagatttagagcgcttgttctgcttggaagatttcttgacatggggccatgggcagttgatttggccctgtctgtcggaatatttccttatgtactcaaactgcttccaacaaatacaatagagttacgtcaaattttagtgtttatatggacaaaaattctctctcttgataagtcttgtcaggttgacttggttaaagatggaggacatacatattttattaggtttcttgacagtttggatgctttcccagaacagcgtgcaatggccgcttttgttatagcagtcatcgtggatgggcataggatgggtcaagaggcttgtatgaatgcagggcttatagatgtttgcctgagacatctgcaacctgagaatcttcatgcacaaacagaacctttgcttttgcagtggctttgtttatgccttgggaaactctgggaagatttccctgaggctcagttacttggtctgcaaacaaatgcaccagaaactgtaatatgcttattgtcggagcctcgacctgaggtcagagctgctgctgtttttgcacttgggaatcttactacattatcaaattgccctgatgatgattctgatgatgatgaaaaggtgaaagctgaaataaatgtagttcgaagccttctccagatatcttcagatggtagtccccttgttagatctgaggttgctatagcgcttactcactttgcgttgggtcacaacaaaaatctcaaatctgttgctgcggagtattggaaacctcaatccaaatcgttgctgaagtcattaccatcattggcaaatataaataatccaagcaatgtttacagtcccaataatattctccaaggcagcattggtcctgtgctgagggttggcagtgatagcggtgccgctggtcgtgatggacacatttctacaagtagcccaattgcagcaagtagcatcatgcatggctctccccagtcagatgattcttcccaacactctgattcaggcatattactgagggagaatgcaagtaatggtggtctcagctacactaggtcgaggcctgttgataatgtcatttattctcaatttatatcaactatgtgttctgtttctaaagatcctgacccaagaattgcaactattggttggagagcactgacccttataggtgttgaacaagtggccatgaaaagtactcgatttaacagtggaggtctacaccgaggagagacatctgcgtcaacctttggaatggcacactcttcttcttggagagatatgaattctggtcccagtaatgcagaactaaagaaacttcccgaatcaacaatttacaactggagttgtggtcacttctctaggccacttttaactgcctctgatgataatgaagaaaccaatgctagaagagaagagagagaacggattgcactagatttcatcactaagtgccagcgctcctcctgcaagattacaagccaaattgctagttgggatacaagatttgagttggggacaaaggcagctttattattgccattttctccgattgtcgtagcagctgatgaaaatgaaaaaataagtgtgtggaactatgacgatgcacaaccagtgaactcttttcacaaccataagttgtccgacagagggctatctaaacttttgcttatcaacgagcttgatgagtgcttgcttttggctgcctcaagtgatggaaatgtacgcatatggaaaaattttgcttgtaagggagggcagaaacttgtaactgctttttcatcagttcagggacatcgagctgctggtcgcagtattgtgattgactggcagcagcaatcttgttatctgtacgcatctggtgacatgtcttccatcttggtatgggatcttgacaaggaacaacttctcaacaccattccgtcatccgctgatagtgccatttctgccctgtctgcatctcaggtccgctctggatactttgctgctggttttgctgatggttctgtcaggatatatgatgtttgctctcctgatagtaggcctgtctatgtggccaggccgcatgccccaagaacagaaaaggttgtgggcatagggtttcagcctgggtttgatccatacgagattgtaagtgcatctcaagctggagacattcagtttcttgatgttagaatggcagcagaaccctacctgactattgaggcacacaggggttcacttacagcattagcggttcatcggcatgccccagttgttgctagttcagccaagcagatgattaaagtgtttagtcttgaaggagaacagttgaggataattcgctacctgccatcttttatgggccaaagaacaggcagtgtaaattgcctttcttttcacccatacaaatcactcctggctgccggtgctggtcataatgctcttgtctctatctatgctgaggaaaattacaagtaagatcgaggcctatatctcatgctcatgataatgcagacacagtgcgatcgacaggccttacatttttggccaagtgatgctccacagcatggtgcagcttcaagatccaagatgatggtaagctttgtcacagagaaggtgttgatggctccatggctttcggtgcatattgcctgttggacggcgtgtgcaatttgtatgatacagtcaagaactcaagattcattaggcctccttgcattgtgaaccctaccctgatcctgccgttgaacttggaggccccatcaacaaattaatcatacctaagttaaccaaaatgtaaatagccagtgcattcgggttgtactttgtcagcattaatccctttttcaagtgtaaaaaggtctgaaggtgcttgatatgataaacatggcttggtagtggctgctgactgggcaagtggggttgtgcatatgggcctggtcgcacatttctgctcacagatgatgttgaatagatagatgtctgctcacagatgaggttgaatagatagatgtctgctcacagatgttgttgaatagatagatgcatttgtccagctaatatagcgctagatgggggtagcgttggcctgcatgaatgaaggaaagttgtcgagtgaggagtgaccttcattgccattctgtgccgcaacaagtctccatgtgttatcagatggccctgtagataatacatatatttgtagatgtgttttgttcggtgaattgtgctgaccgctgagtaaaatgtattgtgaacgttgttgataaatgctattgtaatgaatttgcaacaagaaaaaattatatgctattgtagtgtatatcacaactctggttgctttttatttttatttttttaaaaaaagatctttc

SEQ ID NO: 218171 - DNA, 3680 bp, Zea Mays
ttcctcagttaattgatgatccaaatgctgagtttcagccaagtcctttttttacggaacaactgacggcttttgaagtgtggcttgatcatggctctgaggacaagaaacctcctgaacagttacccatagttcttcaggtactgcttagtcagtcacacagatttagagcgcttgttctgcttggaagatttcttgacatggggccatgggcagttgatttggccctgtctgtcggaatatttccttatgtactcaaactgcttccaacaaatacaatagagttacgtcaaattttagtgtttatatggacaaaaattctctctcttgataagtcttgtcaggttgacttggttaaagatggaggacatacatattttattaggtttcttgacagtttggatgctttcccagaacagcgtgcaatggccgcttttgttatagcagtcatcgtggatgggcataggatgggtcaagaggcttgtatgaatgcagggcttatagatgtttgcctgagacatctgcaacctgagaatcttcatgcacaaacagaacctttgcttttgcagtggctttgtttatgccttgggaaactctgggaagatttccctgaggctcagttacttggtctgcaaacaaatgcaccagaaactgtaatatgcttattgtcggagcctcgacctgaggtcagagctgctgctgtttttgcacttgggaatcttactacattatcaaattgccctgatgatgattctgatgatgatgaaaaggtgaaagctgaaataaatgtagttcgaagccttctccagatatcttcagatggtagtccccttgttagatctgaggttgctatagcgcttactcactttgcgttgggtcacaacaaaaatctcaaatctgttgctgcggagtattggaaacctcaatccaaatcgttgctgaagtcattaccatcattggcaaatataaataatccaagcaatgtttacagtcccaataatattctccaaggcagcattggtcctgtgctgagggttggcagtgatagcggtgccgctggtcgtgatggacacatttctacaagtagcccaattgcagcaagtagcatcatgcatggctctccccagtcagatgattcttcccaacactctgattcaggcatattactgagggagaatgcaagtaatggtggtctcagctacactaggtcgaggcctgttgataatgtcatttattctcaatttatatcaactatgtgttctgtttctaaagatcctgacccaagaattgcaactattggttggagagcactgacccttataggtgttgaacaagtggccatgaaaagtactcgatttaacagtggaggtctacaccgaggagagacatctgcgtcaacctttggaatggcacactcttcttcttggagagatatgaattctggaagcaactcgatgaaatttatgacccctcctgttagccctcctcagcatgattatcttctactaggattgcgccgagtgtgttctatggagtttggacagcatcctataaattcacctgatggctttgctaatctccttttaagctctgctacaggtcccagtaatgcagaactaaagaaacttcccgaatcaacaatttacaactggagttgtggtcacttctctaggccacttttaactgcctctgatgataatgaagaaaccaatgctagaagagaagagagagaacggattgcactagatttcatcactaagtgccagcgctcctcagcctgcaagattacaagccaaattgctagttgggatacaagatttgagttggggacaaaggcagctttattattgccattttctccgattgtcgtagcagctgatgaaaatgaaaaaataagttctgtatcatgccagtgtgtggaactatgacgatgcacaaccagtgaactcttttcacaaccataagttgtccgacagagggctatctaaacttttgcttatcaacgagcttgatgagtgcttgcttttggctgcctcaagtgatggaaatgtacgcatatggaaaaattttgcttgtaagggagggcagaaacttgtaactgctttttcatcagttcagggacatcgagctgctggtcgcagtattgtgattgactggcagcagcaatcttgttatctgtacgcatctggtgacatgtcttccatcttggtatgggatcttgacaaggaacaacttctcaacaccattccgtcatccgctgatagtgccatttctgccctgtctgcatctcaggtccgctctggatactttgctgctggttttgctgatggttctgtcaggatatatgatgtttgctctcctgatagtaggcctgtctatgtggccaggccgcatgccccaagaacagaaaaggttgtgggcatagggtttcagcctgggtttgatccatacgagattgtaagtgcatctcaagctggagacattcagtttcttgatgttagaatggcagcagaaccctacctgactattgaggcacacaggggttcacttacagcattagcggttcatcggcatgccccagttgttgctagttcagccaagcagatgattaaagtgtttagtcttgaaggagaacagttgaggataattcgctacctgccatcttttatgggccaaagaacaggcagtgtaaattgcctttcttttcacccatacaaatcactcctggctgccggtgctggtcataatgctcttgtctctatctatgctgaggaaaattacaagtaagatcgaggcctatatctcatgctcatgataatgcagacacagtgcgatcgacaggccttacatttttggccaagtgatgctccacagcatggtgcagcttcaagatccaagatgatggtaagctttgtcacagagaaggtgttgatggctccatggctttcggtgcatattgcctgttggacggcgtgtgcaatttgtatgatacagtcaagaactcaagattcattaggcctccttgcattgtgaaccctaccctgatcctgccgttgaacttggaggccccatcaacaaattaatcatacctaagttaaccaaaatgtaaatagccagtgcattcgggttgtactttgtcagcattaatccctttttcaagtgtaaaaaggtctgaaggtgcttgatatgataaacatggcttggtagtggctgctgactgggcaagtggggttgtgcatatgggcctggtcgcacatttctgctcacagatgatgttgaatagatagatgtctgctcacagatgaggttgaatagatagatgtctgctcacagatgttgttgaatagatagatgcatttgtccagctaatatagcgctagatgggggtagcgttggcctgcatgaatgaaggaaagttgtcgagtgaggagtgaccttcattgccattctgtgccgcaacaagtctccatgtgttatcagatggccctgtagataatacatatatttgtagatgtgttttgttcggtgaattgtgctgaccgctgagtaaaatgtattgtgaacgttgttgataaatgctattgtaatgaatttgcaacaagaaaaaattatatgctattgtagtgtatatcacaactctggttgctttttatttttatttttttaaaaaaagatctttc

SEQ ID NO: 218172 - DNA, 3540 bp, Zea Mays
cttcctcagttaattgatgatccaaatgctgagtttcagccaagtcctttttttacggaacaactgacggcttttgaagtgtggcttgatcatggctctgaggacaagaaacctcctgaacagttacccatagttcttcaggtactgcttagtcagtcacacagatttagagcgcttgttctgcttggaagatttcttgacatggggccatgggcagttgatttggccctgtctgtcggaatatttccttatgtactcaaactgcttccaacaaatacaatagagttacgtcaaattttagtgtttatatggacaaaaattctctctcttgataagtcttgtcaggttgacttggttaaagatggaggacatacatattttattaggtttcttgacagtttggatgctttcccagaacagcgtgcaatggccgcttttgttatagcagtcatcgtggatgggcataggatgggtcaagaggcttgtatgaatgcagggcttatagatgtttgcctgagacatctgcaacctgagaatcttcatgcacaaacagaacctttgcttttgcagtggctttgtttatgccttgggaaactctgggaagatttccctgaggctcagttacttggtctgcaaacaaatgcaccagaaactgtaatatgcttattgtcggagcctcgacctgaggtcagagctgctgctgtttttgcacttgggaatcttactacattatcaaattgccctgatgatgattctgatgatgatgaaaaggtgaaagctgaaataaatgtagttcgaagccttctccagatatcttcagatggtagtccccttgttagatctgaggttgctatagcgcttactcactttgcgttgggtcacaacaaaaatctcaaatctgttgctgcggagtattggaaacctcaatccaaatcgttgctgaagtcattaccatcattggcaaatataaataatccaagcaatgtttacagtcccaataatattctccaaggcagcattggtcctgtgctgagggttggcagtgatagcggtgccgctggtcgtgatggacacatttctacaagtagcccaattgcagcaagtagcatcatgcatggctctccccagtcagatgattcttcccaacactctgattcaggcatattactgagggagaatgcaagtaatggtggtctcagctacactaggtcgaggcctgttgataatgtcatttattctcaatttatatcaactatgtgttctgtttctaaagatcctgacccaagaattgcaactattggttggagagcactgacccttataggtgttgaacaagtggccatgaaaagtactcgatttaacagtggaggtctacaccgaggagagacatctgcgtcaacctttggaatggcacactcttcttcttggagagatatgaattctggaagcaactcgatgaaatttatgacccctcctgttagccctcctcagcatgattatcttctactaggattgcgccgagtgtgttctatggagtttggacagcatcctataaattcacctgatggctttgctaatctccttttaagctctgctacaggtcccagtaatgcagaactaaagaaacttcccgaatcaacaatttacaactggagttgtggtcacttctctaggccacttttaactgcctctgatgataatgaagaaaccaatgctagaagagaagagagagaacggattgcactagatttcatcactaagtgccagcgctcctcagcctgcaagattacaagccaaattgctagttgggatacaagatttgagttggggacaaaggcagctttattattgccattttctccgattgtcgtagcagctgatgaaaatgaaaaaataaggtgatggaaatgtacgcatatggaaaaattttgcttgtaagggagggcagaaacttgtaactgctttttcatcagttcagggacatcgagctgctggtcgcagtattgtgattgactggcagcagcaatcttgttatctgtacgcatctggtgacatgtcttccatcttggtatgggatcttgacaaggaacaacttctcaacaccattccgtcatccgctgatagtgccatttctgccctgtctgcatctcaggtccgctctggatactttgctgctggttttgctgatggttctgtcaggatatatgatgtttgctctcctgatagtaggcctgtctatgtggccaggccgcatgccccaagaacagaaaaggttgtgggcatagggtttcagcctgggtttgatccatacgagattgtaagtgcatctcaagctggagacattcagtttcttgatgttagaatggcagcagaaccctacctgactattgaggcacacaggggttcacttacagcattagcggttcatcggcatgccccagttgttgctagttcagccaagcagatgattaaagtgtttagtcttgaaggagaacagttgaggataattcgctacctgccatcttttatgggccaaagaacaggcagtgtaaattgcctttcttttcacccatacaaatcactcctggctgccggtgctggtcataatgctcttgtctctatctatgctgaggaaaattacaagtaagatcgaggcctatatctcatgctcatgataatgcagacacagtgcgatcgacaggccttacatttttggccaagtgatgctccacagcatggtgcagcttcaagatccaagatgatggtaagctttgtcacagagaaggtgttgatggctccatggctttcggtgcatattgcctgttggacggcgtgtgcaatttgtatgatacagtcaagaactcaagattcattaggcctccttgcattgtgaaccctaccctgatcctgccgttgaacttggaggccccatcaacaaattaatcatacctaagttaaccaaaatgtaaatagccagtgcattcgggttgtactttgtcagcattaatccctttttcaagtgtaaaaaggtctgaaggtgcttgatatgataaacatggcttggtagtggctgctgactgggcaagtggggttgtgcatatgggcctggtcgcacatttctgctcacagatgatgttgaatagatagatgtctgctcacagatgaggttgaatagatagatgtctgctcacagatgttgttgaatagatagatgcatttgtccagctaatatagcgctagatgggggtagcgttggcctgcatgaatgaaggaaagttgtcgagtgaggagtgaccttcattgccattctgtgccgcaacaagtctccatgtgttatcagatggccctgtagataatacatatatttgtagatgtgttttgttcggtgaattgtgctgaccgctgagtaaaatgtattgtgaacgttgttgataaatgctattgtaatgaatttgcaacaagaaaaaattatatgctattgtagtgtatatcacaactctggttgctttttatttttatttttttaaaaaaagatctttc

SEQ ID NO: 218173 - DNA, 3849 bp, Zea Mays
gcttcctcagttaattgatgatccaaatgctgagtttcagccaagtcctttttttacggaacaactgacggcttttgaagtgtggcttgatcatggctctgaggacaagaaacctcctgaacagttacccatagttcttcaggtaaggcattttgcttatacacttacatacaagtcaatattatctgtaaaatccagtttaactttgtaacctcttcacctttctctaagctgctatggttttaatttggtaaattttatattcgtattcctttatttatcttaatctgctactcactccaatcacaaaaaagactctcattttgggttgtgtgcagtcagcctacaaaaaaaaaacgattgttatttgctctggtgcgcattgagattgggcatttgaaaatattatggctagatttgtcccaaaacatactccctccgattcgttttagtagtcgttttggacatcatttcacataccaaggtactgcttagtcagtcacacagatttagagcgcttgttctgcttggaagatttcttgacatggggccatgggcagttgatttggccctgtctgtcggaatatttccttatgtactcaaactgcttccaacaaatacaatagagttacgtcaaattttagtgtttatatggacaaaaattctctctcttgataagtcttgtcaggttgacttggttaaagatggaggacatacatattttattaggtttcttgacagtttggatgctttcccagaacagcgtgcaatggccgcttttgttatagcagtcatcgtggatgggcataggatgggtcaagaggcttgtatgaatgcagggcttatagatgtttgcctgagacatctgcaacctgagaatcttcatgcacaaacagaacctttgcttttgcagtggctttgtttatgccttgggaaactctgggaagatttccctgaggctcagttacttggtctgcaaacaaatgcaccagaaactgtaatatgcttattgtcggagcctcgacctgaggtcagagctgctgctgtttttgcacttgggaatcttactacattatcaaattgccctgatgatgattctgatgatgatgaaaaggtgaaagctgaaataaatgtagttcgaagccttctccagatatcttcagatggtagtccccttgttagatctgaggttgctatagcgcttactcactttgcgttgggtcacaacaaaaatctcaaatctgttgctgcggagtattggaaacctcaatccaaatcgttgctgaagtcattaccatcattggcaaatataaataatccaagcaatgtttacagtcccaataatattctccaaggcagcattggtcctgtgctgagggttggcagtgatagcggtgccgctggtcgtgatggacacatttctacaagtagcccaattgcagcaagtagcatcatgcatggctctccccagtcagatgattcttcccaacactctgattcaggcatattactgagggagaatgcaagtaatggtggtctcagctacactaggtcgaggcctgttgataatgtcatttattctcaatttatatcaactatgtgttctgtttctaaagatcctgacccaagaattgcaactattggttggagagcactgacccttataggtgttgaacaagtggccatgaaaagtactcgatttaacagtggaggtctacaccgaggagagacatctgcgtcaacctttggaatggcacactcttcttcttggagagatatgaattctggtcccagtaatgcagaactaaagaaacttcccgaatcaacaatttacaactggagttgtggtcacttctctaggccacttttaactgcctctgatgataatgaagaaaccaatgctagaagagaagagagagaacggattgcactagatttcatcactaagtgccagcgctcctcctgcaagattacaagccaaattgctagttgggatacaagatttgagttggggacaaaggcagctttattattgccattttctccgattgtcgtagcagctgatgaaaatgaaaaaataagtgtgtggaactatgacgatgcacaaccagtgaactcttttcacaaccataagttgtccgacagagggctatctaaacttttgcttatcaacgagcttgatgagtgcttgcttttggctgcctcaagtgatggaaatgtacgcatatggaaaaattttgcttgtaagggagggcagaaacttgtaactgctttttcatcagttcagggacatcgagctgctggtcgcagtattgtgattgactggcagcagcaatcttgttatctgtacgcatctggtgacatgtcttccatcttggtatgggatcttgacaaggaacaacttctcaacaccattccgtcatccgctgatagtgccatttctgccctgtctgcatctcaggtccgctctggatactttgctgctggttttgctgatggttctgtcaggatatatgatgtttgctctcctgatagtaggcctgtctatgtggccaggccgcatgccccaagaacagaaaaggttgtgggcatagggtttcagcctgggtttgatccatacgagattgtaagtgcatctcaagctggagacattcagtttcttgatgttagaatggcagcagaaccctacctgactattgaggcacacaggggttcacttacagcattagcggttcatcggcatgccccagttgttgctagttcagccaagcagatgattaaagtgtttagtcttgaaggagaacagttgaggataattcgctacctgccatcttttatgggccaaagaacaggcagtgtaaattgcctttcttttcacccatacaaatcactcctggctgccggtgctggtcataatgctcttgtctctatctatgctgaggaaaattacaagtaagatcgaggcctatatctcatgctcatgataatgcagacacagtgcgatcgacaggccttacatttttggccaagtgatgctccacagcatggtgcagcttcaagatccaagatgatggtaagctttgtcacagagaaggtgttgatggctccatggctttcggtgcatattgcctgttggacggcgtgtgcaatttgtatgatacagtcaagaactcaagattcattaggcctccttgcattgtgaaccctaccctgatcctgccgttgaacttggaggccccatcaacaaattaatcatacctaagttaaccaaaatgtaaatagccagtgcattcgggttgtactttgtcagcattaatccctttttcaagtgtaaaaaggtctgaaggtgcttgatatgataaacatggcttggtagtggctgctgactgggcaagtggggttgtgcatatgggcctggtcgcacatttctgctcacagatgatgttgaatagatagatgtctgctcacagatgaggttgaatagatagatgtctgctcacagatgttgttgaatagatagatgcatttgtccagctaatatagcgctagatgggggtagcgttggcctgcatgaatgaaggaaagttgtcgagtgaggagtgaccttcattgccattctgtgccgcaacaagtctccatgtgttatcagatggccctgtagataatacatatatttgtagatgtgttttgttcggtgaattgtgctgaccgctgagtaaaatgtattgtgaacgttgttgataaatgctattgtaatgaatttgcaacaagaaaaaattatatgctattgtagtgtatatcacaactctggttgctttttatttttatttttttaaaaaaagatctttc

SEQ ID NO: 218174 - DNA, 3810 bp, Zea Mays
agcttcctcagttaattgatgatccaaatgctgagtttcagccaagtcctttttttacggaacaactgacggcttttgaagtgtggcttgatcatggctctgaggacaagaaacctcctgaacagttacccatagttcttcagtcagcctacaaaaaaaaaacgattgttatttgctctggtgcgcattgagattgggcatttgaaaatattatggctagatttgtcccaaaacatactccctccgattcgttttagtagtcgttttggacatcatttcacataccaaggtactgcttagtcagtcacacagatttagagcgcttgttctgcttggaagatttcttgacatggggccatgggcagttgatttggccctgtctgtcggaatatttccttatgtactcaaactgcttccaacaaatacaatagagttacgtcaaattttagtgtttatatggacaaaaattctctctcttgataagtcttgtcaggttgacttggttaaagatggaggacatacatattttattaggtttcttgacagtttggatgctttcccagaacagcgtgcaatggccgcttttgttatagcagtcatcgtggatgggcataggatgggtcaagaggcttgtatgaatgcagggcttatagatgtttgcctgagacatctgcaacctgagaatcttcatgcacaaacagaacctttgcttttgcagtggctttgtttatgccttgggaaactctgggaagatttccctgaggctcagttacttggtctgcaaacaaatgcaccagaaactgtaatatgcttattgtcggagcctcgacctgaggtcagagctgctgctgtttttgcacttgggaatcttactacattatcaaattgccctgatgatgattctgatgatgatgaaaaggtgaaagctgaaataaatgtagttcgaagccttctccagatatcttcagatggtagtccccttgttagatctgaggttgctatagcgcttactcactttgcgttgggtcacaacaaaaatctcaaatctgttgctgcggagtattggaaacctcaatccaaatcgttgctgaagtcattaccatcattggcaaatataaataatccaagcaatgtttacagtcccaataatattctccaaggcagcattggtcctgtgctgagggttggcagtgatagcggtgccgctggtcgtgatggacacatttctacaagtagcccaattgcagcaagtagcatcatgcatggctctccccagtcagatgattcttcccaacactctgattcaggcatattactgagggagaatgcaagtaatggtggtctcagctacactaggtcgaggcctgttgataatgtcatttattctcaatttatatcaactatgtgttctgtttctaaagatcctgacccaagaattgcaactattggttggagagcactgacccttataggtgttgaacaagtggccatgaaaagtactcgatttaacagtggaggtctacaccgaggagagacatctgcgtcaacctttggaatggcacactcttcttcttggagagatatgaattctggaagcaactcgatgaaatttatgacccctcctgttagccctcctcagcatgattatcttctactaggattgcgccgagtgtgttctatggagtttggacagcatcctataaattcacctgatggctttgctaatctccttttaagctctgctacaggtcccagtaatgcagaactaaagaaacttcccgaatcaacaatttacaactggagttgtggtcacttctctaggccacttttaactgcctctgatgataatgaagaaaccaatgctagaagagaagagagagaacggattgcactagatttcatcactaagtgccagcgctcctcctgcaagattacaagccaaattgctagttgggatacaagatttgagttggggacaaaggcagctttattattgccattttctccgattgtcgtagcagctgatgaaaatgaaaaaataagtgtgtggaactatgacgatgcacaaccagtgaactcttttcacaaccataagttgtccgacagagggctatctaaacttttgcttatcaacgagcttgatgagtgcttgcttttggctgcctcaagtgatggaaatgtacgcatatggaaaaattttgcttgtaagggagggcagaaacttgtaactgctttttcatcagttcagggacatcgagctgctggtcgcagtattgtgattgactggcagcagcaatcttgttatctgtacgcatctggtgacatgtcttccatcttggtatgggatcttgacaaggaacaacttctcaacaccattccgtcatccgctgatagtgccatttctgccctgtctgcatctcaggtccgctctggatactttgctgctggttttgctgatggttctgtcaggatatatgatgtttgctctcctgatagtaggcctgtctatgtggccaggccgcatgccccaagaacagaaaaggttgtgggcatagggtttcagcctgggtttgatccatacgagattgtaagtgcatctcaagctggagacattcagtttcttgatgttagaatggcagcagaaccctacctgactattgaggcacacaggggttcacttacagcattagcggttcatcggcatgccccagttgttgctagttcagccaagcagatgattaaagtgtttagtcttgaaggagaacagttgaggataattcgctacctgccatcttttatgggccaaagaacaggcagtgtaaattgcctttcttttcacccatacaaatcactcctggctgccggtgctggtcataatgctcttgtctctatctatgctgaggaaaattacaagtaagatcgaggcctatatctcatgctcatgataatgcagacacagtgcgatcgacaggccttacatttttggccaagtgatgctccacagcatggtgcagcttcaagatccaagatgatggtaagctttgtcacagagaaggtgttgatggctccatggctttcggtgcatattgcctgttggacggcgtgtgcaatttgtatgatacagtcaagaactcaagattcattaggcctccttgcattgtgaaccctaccctgatcctgccgttgaacttggaggccccatcaacaaattaatcatacctaagttaaccaaaatgtaaatagccagtgcattcgggttgtactttgtcagcattaatccctttttcaagtgtaaaaaggtctgaaggtgcttgatatgataaacatggcttggtagtggctgctgactgggcaagtggggttgtgcatatgggcctggtcgcacatttctgctcacagatgatgttgaatagatagatgtctgctcacagatgaggttgaatagatagatgtctgctcacagatgttgttgaatagatagatgcatttgtccagctaatatagcgctagatgggggtagcgttggcctgcatgaatgaaggaaagttgtcgagtgaggagtgaccttcattgccattctgtgccgcaacaagtctccatgtgttatcagatggccctgtagataatacatatatttgtagatgtgttttgttcggtgaattgtgctgaccgctgagtaaaatgtattgtgaacgttgttgataaatgctattgtaatgaatttgcaacaagaaaaaattatatgctattgtagtgtatatcacaactctggttgctttttatttttatttttttaaaaaaagatctttc

SEQ ID NO: 218175 - DNA, 4291 bp, Zea Mays
agcttcctcagttaattgatgatccaaatgctgagtttcagccaagtcctttttttacggaacaactgacggcttttgaagtgtggcttgatcatggctctgaggacaagaaacctcctgaacagttacccatagttcttcaggtaaggcattttgcttatacacttacatacaagtcaatattatctgtaaaatccagtttaactttgtaacctcttcacctttctctaagctgctatggttttaatttggtaaattttatattcgtattcctttatttatcttaatctgctactcactccaatcacaaaaaagactctcattttgggttgtgtgcagtcagcctacaaaaaaaaaacgattgttatttgctctggtgcgcattgagattgggcatttgaaaatattatggctagatttgtcccaaaacatactccctccgattcgttttagtagtcgttttggacatcatttcacataccaaggtgaaggctactttccagtcttacccttattatatacattcagttgtttctttcaacaagctctgtttcctgtttcaactggttatcaacgcttgtcaaggcaccccgtctgatgcggcttgggttcgaaacccttgctgttgtgtgccttaatattttttttgcgatttttgcacgttacttgcatgcgggtttttttgcatgcgcatgcatatgcaccctatctttctgaatcaaggacttgacaacgaagaaccctccggttccttttatcagtcacaagtactgcttagtcagtcacacagatttagagcgcttgttctgcttggaagatttcttgacatggggccatgggcagttgatttggccctgtctgtcggaatatttccttatgtactcaaactgcttccaacaaatacaatagagttacgtcaaattttagtgtttatatggacaaaaattctctctcttgataagtcttgtcaggttgacttggttaaagatggaggacatacatattttattaggtttcttgacagtttggatgctttcccagaacagcgtgcaatggccgcttttgttatagcagtcatcgtggatgggcataggatgggtcaagaggcttgtatgaatgcagggcttatagatgtttgcctgagacatctgcaacctgagaatcttcatgcacaaacagaacctttgcttttgcagtggctttgtttatgccttgggaaactctgggaagatttccctgaggctcagttacttggtctgcaaacaaatgcaccagaaactgtaatatgcttattgtcggagcctcgacctgaggtcagagctgctgctgtttttgcacttgggaatcttactacattatcaaattgccctgatgatgattctgatgatgatgaaaaggtgaaagctgaaataaatgtagttcgaagccttctccagatatcttcagatggtagtccccttgttagatctgaggttgctatagcgcttactcactttgcgttgggtcacaacaaaaatctcaaatctgttgctgcggagtattggaaacctcaatccaaatcgttgctgaagtcattaccatcattggcaaatataaataatccaagcaatgtttacagtcccaataatattctccaaggcagcattggtcctgtgctgagggttggcagtgatagcggtgccgctggtcgtgatggacacatttctacaagtagcccaattgcagcaagtagcatcatgcatggctctccccagtcagatgattcttcccaacactctgattcaggcatattactgagggagaatgcaagtaatggtggtctcagctacactaggtcgaggcctgttgataatgtcatttattctcaatttatatcaactatgtgttctgtttctaaagatcctgacccaagaattgcaactattggttggagagcactgacccttataggtgttgaacaagtggccatgaaaagtactcgatttaacagtggaggtctacaccgaggagagacatctgcgtcaacctttggaatggcacactcttcttcttggagagatatgaattctggaagcaactcgatgaaatttatgacccctcctgttagccctcctcagcatgattatcttctactaggattgcgccgagtgtgttctatggagtttggacagcatcctataaattcacctgatggctttgctaatctccttttaagctctgctacaggtcccagtaatgcagaactaaagaaacttcccgaatcaacaatttacaactggagttgtggtcacttctctaggccacttttaactgcctctgatgataatgaagaaaccaatgctagaagagaagagagagaacggattgcactagatttcatcactaagtgccagcgctcctcagcctgcaagattacaagccaaattgctagttgggatacaagatttgagttggggacaaaggcagctttattattgccattttctccgattgtcgtagcagctgatgaaaatgaaaaaataagtgtgtggaactatgacgatgcacaaccagtgaactcttttcacaaccataagttgtccgacagagggctatctaaacttttgcttatcaacgagcttgatgagtgcttgcttttggctgcctcaagtgatggaaatgtacgcatatggaaaaattttgcttgtaagggagggcagaaacttgtaactgctttttcatcagttcagggacatcgagctgctggtcgcagtattgtgattgactggcagcagcaatcttgttatctgtacgcatctggtgacatgtcttccatcttggtatgggatcttgacaaggaacaacttctcaacaccattccgtcatccgctgatagtgccatttctgccctgtctgcatctcaggtccgctctggatactttgctgctggttttgctgatggttctgtcaggatatatgatgtttgctctcctgatagtaggcctgtctatgtggccaggccgcatgccccaagaacagaaaaggttgtgggcatagggtttcagcctgggtttgatccatacgagattgtaagtgcatctcaagctggagacattcagtttcttgatgttagaatggcagcagaaccctacctgactattgaggcacacaggggttcacttacagcattagcggttcatcggcatgccccagttgttgctagttcagccaagcagatgattaaagtgtttagtcttgaaggagaacagttgaggataattcgctacctgccatcttttatgggccaaagaacaggcagtgtaaattgcctttcttttcacccatacaaatcactcctggctgccggtgctggtcataatgctcttgtctctatctatgctgaggaaaattacaagtaagatcgaggcctatatctcatgctcatgataatgcagacacagtgcgatcgacaggccttacatttttggccaagtgatgctccacagcatggtgcagcttcaagatccaagatgatggtaagctttgtcacagagaaggtgttgatggctccatggctttcggtgcatattgcctgttggacggcgtgtgcaatttgtatgatacagtcaagaactcaagattcattaggcctccttgcattgtgaaccctaccctgatcctgccgttgaacttggaggccccatcaacaaattaatcatacctaagttaaccaaaatgtaaatagccagtgcattcgggttgtactttgtcagcattaatccctttttcaagtgtaaaaaggtctgaaggtgcttgatatgataaacatggcttggtagtggctgctgactgggcaagtggggttgtgcatatgggcctggtcgcacatttctgctcacagatgatgttgaatagatagatgtctgctcacagatgaggttgaatagatagatgtctgctcacagatgttgttgaatagatagatgcatttgtccagctaatatagcgctagatgggggtagcgttggcctgcatgaatgaaggaaagttgtcgagtgaggagtgaccttcattgccattctgtgccgcaacaagtctccatgtgttatcagatggccctgtagataatacatatatttgtagatgtgttttgttcggtgaattgtgctgaccgctgagtaaaatgtattgtgaacgttgttgataaatgctattgtaatgaatttgcaacaagaaaaaattatatgctattgtagtgtatatcacaactctggttgctttttatttttatttttttaaaaaaagatctttc

SEQ ID NO: 218176 - DNA, 3662 bp, Zea Mays
aagcttcctcagttaattgatgatccaaatgctgagtttcagccaagtcctttttttacggaacaactgacggcttttgaagtgtggcttgatcatggctctgaggacaagaaacctcctgaacagttacccatagttcttcaggtactgcttagtcagtcacacagatttagagcgcttgttctgcttggaagatttcttgacatggggccatgggcagttgatttggccctgtctgtcggaatatttccttatgtactcaaactgcttccaacaaatacaatagagttacgtcaaattttagtgtttatatggacaaaaattctctctcttgataagtcttgtcaggttgacttggttaaagatggaggacatacatattttattaggtttcttgacagtttggatgctttcccagaacagcgtgcaatggccgcttttgttatagcagtcatcgtggatgggcataggatgggtcaagaggcttgtatgaatgcagggcttatagatgtttgcctgagacatctgcaacctgagaatcttcatgcacaaacagaacctttgcttttgcagtggctttgtttatgccttgggaaactctgggaagatttccctgaggctcagttacttggtctgcaaacaaatgcaccagaaactgtaatatgcttattgtcggagcctcgacctgaggtcagagctgctgctgtttttgcacttgggaatcttactacattatcaaattgccctgatgatgattctgatgatgatgaaaaggtgaaagctgaaataaatgtagttcgaagccttctccagatatcttcagatggtagtccccttgttagatctgaggttgctatagcgcttactcactttgcgttgggtcacaacaaaaatctcaaatctgttgctgcggagtattggaaacctcaatccaaatcgttgctgaagtcattaccatcattggcaaatataaataatccaagcaatgtttacagtcccaataatattctccaaggcagcattggtcctgtgctgagggttggcagtgatagcggtgccgctggtcgtgatggacacatttctacaagtagcccaattgcagcaagtagcatcatgcatggctctccccagtcagatgattcttcccaacactctgattcaggcatattactgagggagaatgcaagtaatggtggtctcagctacactaggtcgaggcctgttgataatgtcatttattctcaatttatatcaactatgtgttctgtttctaaagatcctgacccaagaattgcaactattggttggagagcactgacccttataggtgttgaacaagtggccatgaaaagtactcgatttaacagtggaggtctacaccgaggagagacatctgcgtcaacctttggaatggcacactcttcttcttggagagatatgaattctggaagcaactcgatgaaatttatgacccctcctgttagccctcctcagcatgattatcttctactaggattgcgccgagtgtgttctatggagtttggacagcatcctataaattcacctgatggctttgctaatctccttttaagctctgctacaggtcccagtaatgcagaactaaagaaacttcccgaatcaacaatttacaactggagttgtggtcacttctctaggccacttttaactgcctctgatgataatgaagaaaccaatgctagaagagaagagagagaacggattgcactagatttcatcactaagtgccagcgctcctcctgcaagattacaagccaaattgctagttgggatacaagatttgagttggggacaaaggcagctttattattgccattttctccgattgtcgtagcagctgatgaaaatgaaaaaataagtgtgtggaactatgacgatgcacaaccagtgaactcttttcacaaccataagttgtccgacagagggctatctaaacttttgcttatcaacgagcttgatgagtgcttgcttttggctgcctcaagtgatggaaatgtacgcatatggaaaaattttgcttgtaagggagggcagaaacttgtaactgctttttcatcagttcagggacatcgagctgctggtcgcagtattgtgattgactggcagcagcaatcttgttatctgtacgcatctggtgacatgtcttccatcttggtatgggatcttgacaaggaacaacttctcaacaccattccgtcatccgctgatagtgccatttctgccctgtctgcatctcaggtccgctctggatactttgctgctggttttgctgatggttctgtcaggatatatgatgtttgctctcctgataggcctgtctatgtggccaggccgcatgccccaagaacagaaaaggttgtgggcatagggtttcagcctgggtttgatccatacgagattgtaagtgcatctcaagctggagacattcagtttcttgatgttagaatggcagcagaaccctacctgactattgaggcacacaggggttcacttacagcattagcggttcatcggcatgccccagttgttgctagttcagccaagcagatgattaaagtgtttagtcttgaaggagaacagttgaggataattcgctacctgccatcttttatgggccaaagaacaggcagtgtaaattgcctttcttttcacccatacaaatcactcctggctgccggtgctggtcataatgctcttgtctctatctatgctgaggaaaattacaagtaagatcgaggcctatatctcatgctcatgataatgcagacacagtgcgatcgacaggccttacatttttggccaagtgatgctccacagcatggtgcagcttcaagatccaagatgatggtaagctttgtcacagagaaggtgttgatggctccatggctttcggtgcatattgcctgttggacggcgtgtgcaatttgtatgatacagtcaagaactcaagattcattaggcctccttgcattgtgaaccctaccctgatcctgccgttgaacttggaggccccatcaacaaattaatcatacctaagttaaccaaaatgtaaatagccagtgcattcgggttgtactttgtcagcattaatccctttttcaagtgtaaaaaggtctgaaggtgcttgatatgataaacatggcttggtagtggctgctgactgggcaagtggggttgtgcatatgggcctggtcgcacatttctgctcacagatgatgttgaatagatagatgtctgctcacagatgaggttgaatagatagatgtctgctcacagatgttgttgaatagatagatgcatttgtccagctaatatagcgctagatgggggtagcgttggcctgcatgaatgaaggaaagttgtcgagtgaggagtgaccttcattgccattctgtgccgcaacaagtctccatgtgttatcagatggccctgtagataatacatatatttgtagatgtgttttgttcggtgaattgtgctgaccgctgagtaaaatgtattgtgaacgttgttgataaatgctattgtaatgaatttgcaacaagaaaaaattatatgctattgtagtgtatatcacaactctggttgctttttatttttatttttttaaaaaaagatctttc

SEQ ID NO: 218177 - DNA, 5109 bp, Zea Mays
  misc_feature (1)..(1): n is a, c, g, or t
naagcttcctcagttaattgatgatccaaatgctgagtttcagccaagtcctttttttacggaacaactgacggcttttgaagtgtggcttgatcatggctctgaggacaagaaacctcctgaacagttacccatagttcttcaggtaaggcattttgcttatacacttacatacaagtcaatattatctgtaaaatccagtttaactttgtaacctcttcacctttctctaagctgctatggttttaatttggtaaattttatattcgtattcctttatttatcttaatctgctactcactccaatcacaaaaaagactctcattttgggttgtgtgcagtcagcctacaaaaaaaaaacgattgttatttgctctggtgcgcattgagattgggcatttgaaaatattatggctagatttgtcccaaaacatactccctccgattcgttttagtagtcgttttggacatcatttcacataccaaggtgaaggctactttccagtcttacccttattatatacattcagttgtttctttcaacaagctctgtttcctgtttcaactggttatcaacgcttgtcaaggcaccccgtctgatgcggcttgggttcgaaacccttgctgttgtgtgccttaatattttttttgcgatttttgcacgttacttgcatgcgggtttttttgcatgcgcatgcatatgcaccctatctttctgaatcaaggacttgacaacgaagaaccctccggttccttttatcagtcacaagtaagtttattttttgaaccggccacatataacttgacaatttttcttgatttagttttattaaccaaataaaaaaactaacattttcttgatttagatggtggtgctactaggaggaaacgaagcgcgtgtgtggtgccaaggcttgctggcatggctgtatgcatgcaaacactcggcatagttaacggccatcaactatagacggctgctgacggtcctttgccgagggtcacgtttcgccaagtgtttgacgctcggcaaagactcctttgccgagcgtcagcttatgccgagtgtttggcactcgacaaagggggtctgtgccgagtgccgttcgtcgccgatagtggccctcaacaaagcttgttttgctgagtgcccaataaaatgcacttggcaaagaacttgacgctcggcaaagagccggattccggcagtgtacgcgtggcttaggaagtggaaacgctgcagcggtaatcgtgtgagcaattaacgctgcatgcagccgctcttttggatttaatttccaccggctgcatgcaagggcaaggacatccaaaatccccttgaaacgtgccagcaacttcattttagattgttttgaaaaaacggcagaatgactagtaatgggaaccggagggagtaaaacaaatagtcatgcaattttattattccttataaattaccgtagtacaaattacttgacaaagttatgttttgtggatcatgccattacccaaaatacactataatatgactggagggcttatatttcttttattgttttactttgcttacatctcttttttgcaggtactgcttagtcagtcacacagatttagagcgcttgttctgcttggaagatttcttgacatggggccatgggcagttgatttggccctgtctgtcggaatatttccttatgtactcaaactgcttccaacaaatacaatagagttacgtcaaattttagtgtttatatggacaaaaattctctctcttgataagtcttgtcaggttgacttggttaaagatggaggacatacatattttattaggtttcttgacagtttggatgctttcccagaacagcgtgcaatggccgcttttgttatagcagtcatcgtggatgggcataggatgggtcaagaggcttgtatgaatgcagggcttatagatgtttgcctgagacatctgcaacctgagaatcttcatgcacaaacagaacctttgcttttgcagtggctttgtttatgccttgggaaactctgggaagatttccctgaggctcagttacttggtctgcaaacaaatgcaccagaaactgtaatatgcttattgtcggagcctcgacctgaggtcagagctgctgctgtttttgcacttgggaatcttactacattatcaaattgccctgatgatgattctgatgatgatgaaaaggtgaaagctgaaataaatgtagttcgaagccttctccagatatcttcagatggtagtccccttgttagatctgaggttgctatagcgcttactcactttgcgttgggtcacaacaaaaatctcaaatctgttgctgcggagtattggaaacctcaatccaaatcgttgctgaagtcattaccatcattggcaaatataaataatccaagcaatgtttacagtcccaataatattctccaaggcagcattggtcctgtgctgagggttggcagtgatagcggtgccgctggtcgtgatggacacatttctacaagtagcccaattgcagcaagtagcatcatgcatggctctccccagtcagatgattcttcccaacactctgattcaggcatattactgagggagaatgcaagtaatggtggtctcagctacactaggtcgaggcctgttgataatgtcatttattctcaatttatatcaactatgtgttctgtttctaaagatcctgacccaagaattgcaactattggttggagagcactgacccttataggtgttgaacaagtggccatgaaaagtactcgatttaacagtggaggtctacaccgaggagagacatctgcgtcaacctttggaatggcacactcttcttcttggagagatatgaattctggaagcaactcgatgaaatttatgacccctcctgttagccctcctcagcatgattatcttctactaggattgcgccgagtgtgttctatggagtttggacagcatcctataaattcacctgatggctttgctaatctccttttaagctctgctacaggtcccagtaatgcagaactaaagaaacttcccgaatcaacaatttacaactggagttgtggtcacttctctaggccacttttaactgcctctgatgataatgaagaaaccaatgctagaagagaagagagagaacggattgcactagatttcatcactaagtgccagcgctcctcagcctgcaagattacaagccaaattgctagttgggatacaagatttgagttggggacaaaggcagctttattattgccattttctccgattgtcgtagcagctgatgaaaatgaaaaaataagtgtgtggaactatgacgatgcacaaccagtgaactcttttcacaaccataagttgtccgacagagggctatctaaacttttgcttatcaacgagcttgatgagtgcttgcttttggctgcctcaagtgatggaaatgtacgcatatggaaaaattttgcttgtaagggagggcagaaacttgtaactgctttttcatcagttcagggacatcgagctgctggtcgcagtattgtgattgactggcagcagcaatcttgttatctgtacgcatctggtgacatgtcttccatcttggtatgggatcttgacaaggaacaacttctcaacaccattccgtcatccgctgatagtgccatttctgccctgtctgcatctcaggtccgctctggatactttgctgctggttttgctgatggttctgtcaggatatatgatgtttgctctcctgatagtaggcctgtctatgtggccaggccgcatgccccaagaacagaaaaggttgtgggcatagggtttcagcctgggtttgatccatacgagattgtaagtgcatctcaagctggagacattcagtttcttgatgttagaatggcagcagaaccctacctgactattgaggcacacaggggttcacttacagcattagcggttcatcggcatgccccagttgttgctagttcagccaagcagatgattaaagtgtttagtcttgaaggagaacagttgaggataattcgctacctgccatcttttatgggccaaagaacaggcagtgtaaattgcctttcttttcacccatacaaatcactcctggctgccggtgctggtcataatgctcttgtctctatctatgctgaggaaaattacaagtaagatcgaggcctatatctcatgctcatgataatgcagacacagtgcgatcgacaggccttacatttttggccaagtgatgctccacagcatggtgcagcttcaagatccaagatgatggtaagctttgtcacagagaaggtgttgatggctccatggctttcggtgcatattgcctgttggacggcgtgtgcaatttgtatgatacagtcaagaactcaagattcattaggcctccttgcattgtgaaccctaccctgatcctgccgttgaacttggaggccccatcaacaaattaatcatacctaagttaaccaaaatgtaaatagccagtgcattcgggttgtactttgtcagcattaatccctttttcaagtgtaaaaaggtctgaaggtgcttgatatgataaacatggcttggtagtggctgctgactgggcaagtggggttgtgcatatgggcctggtcgcacatttctgctcacagatgatgttgaatagatagatgtctgctcacagatgaggttgaatagatagatgtctgctcacagatgttgttgaatagatagatgcatttgtccagctaatatagcgctagatgggggtagcgttggcctgcatgaatgaaggaaagttgtcgagtgaggagtgaccttcattgccattctgtgccgcaacaagtctccatgtgttatcagatggccctgtagataatacatatatttgtagatgtgttttgttcggtgaattgtgctgaccgctgagtaaaatgtattgtgaacgttgttgataaatgctattgtaatgaatttgcaacaagaaaaaattatatgctattgtagtgtatatcacaactctggttgctttttatttttatttttttaaaaaaagatctttc

SEQ ID NO: 218178 - DNA, 3669 bp, Zea Mays
  misc_feature (1)..(1): n is a, c, g, or t
naagcttcctcagttaattgatgatccaaatgctgagtttcagccaagtcctttttttacggaacaactgacggcttttgaagtgtggcttgatcatggctctgaggacaagaaacctcctgaacagttacccatagttcttcaggtactgcttagtcagtcacacagatttagagcgcttgttctgcttggaagatttcttgacatggggccatgggcagttgatttggccctgtctgtcggaatatttccttatgtactcaaactgcttccaacaaatacaatagagttacgtcaaattttagtgtttatatggacaaaaattctctctcttgataagtcttgtcaggttgacttggttaaagatggaggacatacatattttattaggtttcttgacagtttggatgctttcccagaacagcgtgcaatggccgcttttgttatagcagtcatcgtggatgggcataggatgggtcaagaggcttgtatgaatgcagggcttatagatgtttgcctgagacatctgcaacctgagaatcttcatgcacaaacagaacctttgcttttgcagtggctttgtttatgccttgggaaactctgggaagatttccctgaggctcagttacttggtctgcaaacaaatgcaccagaaactgtaatatgcttattgtcggagcctcgacctgaggtcagagctgctgctgtttttgcacttgggaatcttactacattatcaaattgccctgatgatgattctgatgatgatgaaaaggtgaaagctgaaataaatgtagttcgaagccttctccagatatcttcagatggtagtccccttgttagatctgaggttgctatagcgcttactcactttgcgttgggtcacaacaaaaatctcaaatctgttgctgcggagtattggaaacctcaatccaaatcgttgctgaagtcattaccatcattggcaaatataaataatccaagcaatgtttacagtcccaataatattctccaaggcagcattggtcctgtgctgagggttggcagtgatagcggtgccgctggtcgtgatggacacatttctacaagtagcccaattgcagcaagtagcatcatgcatggctctccccagtcagatgattcttcccaacactctgattcaggcatattactgagggagaatgcaagtaatggtggtctcagctacactaggtcgaggcctgttgataatgtcatttattctcaatttatatcaactatgtgttctgtttctaaagatcctgacccaagaattgcaactattggttggagagcactgacccttataggtgttgaacaagtggccatgaaaagtactcgatttaacagtggaggtctacaccgaggagagacatctgcgtcaacctttggaatggcacactcttcttcttggagagatatgaattctggaagcaactcgatgaaatttatgacccctcctgttagccctcctcagcatgattatcttctactaggattgcgccgagtgtgttctatggagtttggacagcatcctataaattcacctgatggctttgctaatctccttttaagctctgctacaggtcccagtaatgcagaactaaagaaacttcccgaatcaacaatttacaactggagttgtggtcacttctctaggccacttttaactgcctctgatgataatgaagaaaccaatgctagaagagaagagagagaacggattgcactagatttcatcactaagtgccagcgctcctcagcctgcaagattacaagccaaattgctagttgggatacaagatttgagttggggacaaaggcagctttattattgccattttctccgattgtcgtagcagctgatgaaaatgaaaaaataagtgtgtggaactatgacgatgcacaaccagtgaactcttttcacaaccataagttgtccgacagagggctatctaaacttttgcttatcaacgagcttgatgagtgcttgcttttggctgcctcaagtgatggaaatgtacgcatatggaaaaattttgcttgtaagggagggcagaaacttgtaactgctttttcatcagttcagggacatcgagctgctggtcgcagtattgtgattgactggcagcagcaatcttgttatctgtacgcatctggtgacatgtcttccatcttggtatgggatcttgacaaggaacaacttctcaacaccattccgtcatccgctgatagtgccatttctgccctgtctgcatctcaggtccgctctggatactttgctgctggttttgctgatggttctgtcaggatatatgatgtttgctctcctgatagtaggcctgtctatgtggccaggccgcatgccccaagaacagaaaaggttgtgggcatagggtttcagcctgggtttgatccatacgagattgtaagtgcatctcaagctggagacattcagtttcttgatgttagaatggcagcagaaccctacctgactattgaggcacacaggggttcacttacagcattagcggttcatcggcatgccccagttgttgctagttcagccaagcagatgattaaagtgtttagtcttgaaggagaacagttgaggataattcgctacctgccatcttttatgggccaaagaacaggcagtgtaaattgcctttcttttcacccatacaaatcactcctggctgccggtgctggtcataatgctcttgtctctatctatgctgaggaaaattacaagtaagatcgaggcctatatctcatgctcatgataatgcagacacagtgcgatcgacaggccttacatttttggccaagtgatgctccacagcatggtgcagcttcaagatccaagatgatggtaagctttgtcacagagaaggtgttgatggctccatggctttcggtgcatattgcctgttggacggcgtgtgcaatttgtatgatacagtcaagaactcaagattcattaggcctccttgcattgtgaaccctaccctgatcctgccgttgaacttggaggccccatcaacaaattaatcatacctaagttaaccaaaatgtaaatagccagtgcattcgggttgtactttgtcagcattaatccctttttcaagtgtaaaaaggtctgaaggtgcttgatatgataaacatggcttggtagtggctgctgactgggcaagtggggttgtgcatatgggcctggtcgcacatttctgctcacagatgatgttgaatagatagatgtctgctcacagatgaggttgaatagatagatgtctgctcacagatgttgttgaatagatagatgcatttgtccagctaatatagcgctagatgggggtagcgttggcctgcatgaatgaaggaaagttgtcgagtgaggagtgaccttcattgccattctgtgccgcaacaagtctccatgtgttatcagatggccctgtagataatacatatatttgtagatgtgttttgttcggtgaattgtgctgaccgctgagtaaaatgtattgtgaacgttgttgataaatgctattgtaatgaatttgcaacaagaaaaaattatatgctattgtagtgtatatcacaactctggttgctttttatttttatttttttaaaaaaagatctttc

SEQ ID NO: 218179 - DNA, 3666 bp, Zea Mays
  misc_feature (1)..(1): n is a, c, g, or t
naagcttcctcagttaattgatgatccaaatgctgagtttcagccaagtcctttttttacggaacaactgacggcttttgaagtgtggcttgatcatggctctgaggacaagaaacctcctgaacagttacccatagttcttcaggtactgcttagtcagtcacacagatttagagcgcttgttctgcttggaagatttcttgacatggggccatgggcagttgatttggccctgtctgtcggaatatttccttatgtactcaaactgcttccaacaaatacaatagagttacgtcaaattttagtgtttatatggacaaaaattctctctcttgataagtcttgtcaggttgacttggttaaagatggaggacatacatattttattaggtttcttgacagtttggatgctttcccagaacagcgtgcaatggccgcttttgttatagcagtcatcgtggatgggcataggatgggtcaagaggcttgtatgaatgcagggcttatagatgtttgcctgagacatctgcaacctgagaatcttcatgcacaaacagaacctttgcttttgcagtggctttgtttatgccttgggaaactctgggaagatttccctgaggctcagttacttggtctgcaaacaaatgcaccagaaactgtaatatgcttattgtcggagcctcgacctgaggtcagagctgctgctgtttttgcacttgggaatcttactacattatcaaattgccctgatgatgattctgatgatgatgaaaaggtgaaagctgaaataaatgtagttcgaagccttctccagatatcttcagatggtagtccccttgttagatctgaggttgctatagcgcttactcactttgcgttgggtcacaacaaaaatctcaaatctgttgctgcggagtattggaaacctcaatccaaatcgttgctgaagtcattaccatcattggcaaatataaataatccaagcaatgtttacagtcccaataatattctccaaggcagcattggtcctgtgctgagggttggcagtgatagcggtgccgctggtcgtgatggacacatttctacaagtagcccaattgcagcaagtagcatcatgcatggctctccccagtcagatgattcttcccaacactctgattcaggcatattactgagggagaatgcaagtaatggtggtctcagctacactaggtcgaggcctgttgataatgtcatttattctcaatttatatcaactatgtgttctgtttctaaagatcctgacccaagaattgcaactattggttggagagcactgacccttataggtgttgaacaagtggccatgaaaagtactcgatttaacagtggaggtctacaccgaggagagacatctgcgtcaacctttggaatggcacactcttcttcttggagagatatgaattctggaagcaactcgatgaaatttatgacccctcctgttagccctcctcagcatgattatcttctactaggattgcgccgagtgtgttctatggagtttggacagcatcctataaattcacctgatggctttgctaatctccttttaagctctgctacaggtcccagtaatgcagaactaaagaaacttcccgaatcaacaatttacaactggagttgtggtcacttctctaggccacttttaactgcctctgatgataatgaagaaaccaatgctagaagagaagagagagaacggattgcactagatttcatcactaagtgccagcgctcctcctgcaagattacaagccaaattgctagttgggatacaagatttgagttggggacaaaggcagctttattattgccattttctccgattgtcgtagcagctgatgaaaatgaaaaaataagtgtgtggaactatgacgatgcacaaccagtgaactcttttcacaaccataagttgtccgacagagggctatctaaacttttgcttatcaacgagcttgatgagtgcttgcttttggctgcctcaagtgatggaaatgtacgcatatggaaaaattttgcttgtaagggagggcagaaacttgtaactgctttttcatcagttcagggacatcgagctgctggtcgcagtattgtgattgactggcagcagcaatcttgttatctgtacgcatctggtgacatgtcttccatcttggtatgggatcttgacaaggaacaacttctcaacaccattccgtcatccgctgatagtgccatttctgccctgtctgcatctcaggtccgctctggatactttgctgctggttttgctgatggttctgtcaggatatatgatgtttgctctcctgatagtaggcctgtctatgtggccaggccgcatgccccaagaacagaaaaggttgtgggcatagggtttcagcctgggtttgatccatacgagattgtaagtgcatctcaagctggagacattcagtttcttgatgttagaatggcagcagaaccctacctgactattgaggcacacaggggttcacttacagcattagcggttcatcggcatgccccagttgttgctagttcagccaagcagatgattaaagtgtttagtcttgaaggagaacagttgaggataattcgctacctgccatcttttatgggccaaagaacaggcagtgtaaattgcctttcttttcacccatacaaatcactcctggctgccggtgctggtcataatgctcttgtctctatctatgctgaggaaaattacaagtaagatcgaggcctatatctcatgctcatgataatgcagacacagtgcgatcgacaggccttacatttttggccaagtgatgctccacagcatggtgcagcttcaagatccaagatgatggtaagctttgtcacagagaaggtgttgatggctccatggctttcggtgcatattgcctgttggacggcgtgtgcaatttgtatgatacagtcaagaactcaagattcattaggcctccttgcattgtgaaccctaccctgatcctgccgttgaacttggaggccccatcaacaaattaatcatacctaagttaaccaaaatgtaaatagccagtgcattcgggttgtactttgtcagcattaatccctttttcaagtgtaaaaaggtctgaaggtgcttgatatgataaacatggcttggtagtggctgctgactgggcaagtggggttgtgcatatgggcctggtcgcacatttctgctcacagatgatgttgaatagatagatgtctgctcacagatgaggttgaatagatagatgtctgctcacagatgttgttgaatagatagatgcatttgtccagctaatatagcgctagatgggggtagcgttggcctgcatgaatgaaggaaagttgtcgagtgaggagtgaccttcattgccattctgtgccgcaacaagtctccatgtgttatcagatggccctgtagataatacatatatttgtagatgtgttttgttcggtgaattgtgctgaccgctgagtaaaatgtattgtgaacgttgttgataaatgctattgtaatgaatttgcaacaagaaaaaattatatgctattgtagtgtatatcacaactctggttgctttttatttttatttttttaaaaaaagatctttc

SEQ ID NO: 218180 - DNA, 3967 bp, Zea Mays
  misc_feature (1)..(1): n is a, c, g, or t
naagcttcctcagttaattgatgatccaaatgctgagtttcagccaagtcctttttttacggaacaactgacggcttttgaagtgtggcttgatcatggctctgaggacaagaaacctcctgaacagttacccatagttcttcaggtaaggcattttgcttatacacttacatacaagtcaatattatctgtaaaatccagtttaactttgtaacctcttcacctttctctaagctgctatggttttaatttggtaaattttatattcgtattcctttatttatcttaatctgctactcactccaatcacaaaaaagactctcattttgggttgtgtgcagtcagcctacaaaaaaaaaacgattgttatttgctctggtgcgcattgagattgggcatttgaaaatattatggctagatttgtcccaaaacatactccctccgattcgttttagtagtcgttttggacatcatttcacataccaaggtactgcttagtcagtcacacagatttagagcgcttgttctgcttggaagatttcttgacatggggccatgggcagttgatttggccctgtctgtcggaatatttccttatgtactcaaactgcttccaacaaatacaatagagttacgtcaaattttagtgtttatatggacaaaaattctctctcttgataagtcttgtcaggttgacttggttaaagatggaggacatacatattttattaggtttcttgacagtttggatgctttcccagaacagcgtgcaatggccgcttttgttatagcagtcatcgtggatgggcataggatgggtcaagaggcttgtatgaatgcagggcttatagatgtttgcctgagacatctgcaacctgagaatcttcatgcacaaacagaacctttgcttttgcagtggctttgtttatgccttgggaaactctgggaagatttccctgaggctcagttacttggtctgcaaacaaatgcaccagaaactgtaatatgcttattgtcggagcctcgacctgaggtcagagctgctgctgtttttgcacttgggaatcttactacattatcaaattgccctgatgatgattctgatgatgatgaaaaggtgaaagctgaaataaatgtagttcgaagccttctccagatatcttcagatggtagtccccttgttagatctgaggttgctatagcgcttactcactttgcgttgggtcacaacaaaaatctcaaatctgttgctgcggagtattggaaacctcaatccaaatcgttgctgaagtcattaccatcattggcaaatataaataatccaagcaatgtttacagtcccaataatattctccaaggcagcattggtcctgtgctgagggttggcagtgatagcggtgccgctggtcgtgatggacacatttctacaagtagcccaattgcagcaagtagcatcatgcatggctctccccagtcagatgattcttcccaacactctgattcaggcatattactgagggagaatgcaagtaatggtggtctcagctacactaggtcgaggcctgttgataatgtcatttattctcaatttatatcaactatgtgttctgtttctaaagatcctgacccaagaattgcaactattggttggagagcactgacccttataggtgttgaacaagtggccatgaaaagtactcgatttaacagtggaggtctacaccgaggagagacatctgcgtcaacctttggaatggcacactcttcttcttggagagatatgaattctggaagcaactcgatgaaatttatgacccctcctgttagccctcctcagcatgattatcttctactaggattgcgccgagtgtgttctatggagtttggacagcatcctataaattcacctgatggctttgctaatctccttttaagctctgctacaggtcccagtaatgcagaactaaagaaacttcccgaatcaacaatttacaactggagttgtggtcacttctctaggccacttttaactgcctctgatgataatgaagaaaccaatgctagaagagaagagagagaacggattgcactagatttcatcactaagtgccagcgctcctcctgcaagattacaagccaaattgctagttgggatacaagatttgagttggggacaaaggcagctttattattgccattttctccgattgtcgtagcagctgatgaaaatgaaaaaataagtgtgtggaactatgacgatgcacaaccagtgaactcttttcacaaccataagttgtccgacagagggctatctaaacttttgcttatcaacgagcttgatgagtgcttgcttttggctgcctcaaggagggcagaaacttgtaactgctttttcatcagttcagggacatcgagctgctggtcgcagtattgtgattgactggcagcagcaatcttgttatctgtacgcatctggtgacatgtcttccatcttggtatgggatcttgacaaggaacaacttctcaacaccattccgtcatccgctgatagtgccatttctgccctgtctgcatctcaggtccgctctggatactttgctgctggttttgctgatggttctgtcaggatatatgatgtttgctctcctgatagtaggcctgtctatgtggccaggccgcatgccccaagaacagaaaaggttgtgggcatagggtttcagcctgggtttgatccatacgagattgtaagtgcatctcaagctggagacattcagtttcttgatgttagaatggcagcagaaccctacctgactattgaggcacacaggggttcacttacagcattagcggttcatcggcatgccccagttgttgctagttcagccaagcagatgattaaagtgtttagtcttgaaggagaacagttgaggataattcgctacctgccatcttttatgggccaaagaacaggcagtgtaaattgcctttcttttcacccatacaaatcactcctggctgccggtgctggtcataatgctcttgtctctatctatgctgaggaaaattacaagtaagatcgaggcctatatctcatgctcatgataatgcagacacagtgcgatcgacaggccttacatttttggccaagtgatgctccacagcatggtgcagcttcaagatccaagatgatggtaagctttgtcacagagaaggtgttgatggctccatggctttcggtgcatattgcctgttggacggcgtgtgcaatttgtatgatacagtcaagaactcaagattcattaggcctccttgcattgtgaaccctaccctgatcctgccgttgaacttggaggccccatcaacaaattaatcatacctaagttaaccaaaatgtaaatagccagtgcattcgggttgtactttgtcagcattaatccctttttcaagtgtaaaaaggtctgaaggtgcttgatatgataaacatggcttggtagtggctgctgactgggcaagtggggttgtgcatatgggcctggtcgcacatttctgctcacagatgatgttgaatagatagatgtctgctcacagatgaggttgaatagatagatgtctgctcacagatgttgttgaatagatagatgcatttgtccagctaatatagcgctagatgggggtagcgttggcctgcatgaatgaaggaaagttgtcgagtgaggagtgaccttcattgccattctgtgccgcaacaagtctccatgtgttatcagatggccctgtagataatacatatatttgtagatgtgttttgttcggtgaattgtgctgaccgctgagtaaaatgtattgtgaacgttgttgataaatgctattgtaatgaatttgcaacaagaaaaaattatatgctattgtagtgtatatcacaactctggttgctttttatttttatttttttaaaaaaagatctttc

SEQ ID NO: 218181 - DNA, 4953 bp, Zea Mays
  misc_feature (1)..(1): n is a, c, g, or t
naagcttcctcagttaattgatgatccaaatgctgagtttcagccaagtcctttttttacggaacaactgacggcttttgaagtgtggcttgatcatggctctgaggacaagaaacctcctgaacagttacccatagttcttcaggtaaggcattttgcttatacacttacatacaagtcaatattatctgtaaaatccagtttaactttgtaacctcttcacctttctctaagctgctatggttttaatttggtaaattttatattcgtattcctttatttatcttaatctgctactcactccaatcacaaaaaagactctcattttgggttgtgtgcagtcagcctacaaaaaaaaaacgattgttatttgctctggtgcgcattgagattgggcatttgaaaatattatggctagatttgtcccaaaacatactccctccgattcgttttagtagtcgttttggacatcatttcacataccaaggtgaaggctactttccagtcttacccttattatatacattcagttgtttctttcaacaagctctgtttcctgtttcaactggttatcaacgcttgtcaaggcaccccgtctgatgcggcttgggttcgaaacccttgctgttgtgtgccttaatattttttttgcgatttttgcacgttacttgcatgcgggtttttttgcatgcgcatgcatatgcaccctatctttctgaatcaaggacttgacaacgaagaaccctccggttccttttatcagtcacaagtaagtttattttttgaaccggccacatataacttgacaatttttcttgatttagttttattaaccaaataaaaaaactaacattttcttgatttagatggtggtgctactaggaggaaacgaagcgcgtgtgtggtgccaaggcttgctggcatggctgtatgcatgcaaacactcggcatagttaacggccatcaactatagacggctgctgacggtcctttgccgagggtcacgtttcgccaagtgtttgacgctcggcaaagactcctttgccgagcgtcagcttatgccgagtgtttggcactcgacaaagggggtctgtgccgagtgccgttcgtcgccgatagtggccctcaacaaagcttgttttgctgagtgcccaataaaatgcacttggcaaagaacttgacgctcggcaaagagccggattccggcagtgtacgcgtggcttaggaagtggaaacgctgcagcggtaatcgtgtgagcaattaacgctgcatgcagccgctcttttggatttaatttccaccggctgcatgcaagggcaaggacatccaaaatccccttgaaacgtgccagcaacttcattttagattgttttgaaaaaacggcagaatgactagtaatgggaaccggagggagtaaaacaaatagtcatgcaattttattattccttataaattaccgtagtacaaattacttgacaaagttatgttttgtggatcatgccattacccaaaatacactataatatgactggagggcttatatttcttttattgttttactttgcttacatctcttttttgcaggtactgcttagtcagtcacacagatttagagcgcttgttctgcttggaagatttcttgacatggggccatgggcagttgatttggccctgtctgtcggaatatttccttatgtactcaaactgcttccaacaaatacaatagagttacgtcaaattttagtgtttatatggacaaaaattctctctcttgataagtcttgtcaggttgacttggttaaagatggaggacatacatattttattaggtttcttgacagtttggatgctttcccagaacagcgtgcaatggccgcttttgttatagcagtcatcgtggatgggcataggatgggtcaagaggcttgtatgaatgcagggcttatagatgtttgcctgagacatctgcaacctgagaatcttcatgcacaaacagaacctttgcttttgcagtggctttgtttatgccttgggaaactctgggaagatttccctgaggctcagttacttggtctgcaaacaaatgcaccagaaactgtaatatgcttattgtcggagcctcgacctgaggtcagagctgctgctgtttttgcacttgggaatcttactacattatcaaattgccctgatgatgattctgatgatgatgaaaaggtgaaagctgaaataaatgtagttcgaagccttctccagatatcttcagatggtagtccccttgttagatctgaggttgctatagcgcttactcactttgcgttgggtcacaacaaaaatctcaaatctgttgctgcggagtattggaaacctcaatccaaatcgttgctgaagtcattaccatcattggcaaatataaataatccaagcaatgtttacagtcccaataatattctccaaggcagcattggtcctgtgctgagggttggcagtgatagcggtgccgctggtcgtgatggacacatttctacaagtagcccaattgcagcaagtagcatcatgcatggctctccccagtcagatgattcttcccaacactctgattcaggcatattactgagggagaatgcaagtaatggtggtctcagctacactaggtcgaggcctgttgataatgtcatttattctcaatttatatcaactatgtgttctgtttctaaagatcctgacccaagaattgcaactattggttggagagcactgacccttataggtgttgaacaagtggccatgaaaagtactcgatttaacagtggaggtctacaccgaggagagacatctgcgtcaacctttggaatggcacactcttcttcttggagagatatgaattctggtcccagtaatgcagaactaaagaaacttcccgaatcaacaatttacaactggagttgtggtcacttctctaggccacttttaactgcctctgatgataatgaagaaaccaatgctagaagagaagagagagaacggattgcactagatttcatcactaagtgccagcgctcctcagcctgcaagattacaagccaaattgctagttgggatacaagatttgagttggggacaaaggcagctttattattgccattttctccgattgtcgtagcagctgatgaaaatgaaaaaataagtgtgtggaactatgacgatgcacaaccagtgaactcttttcacaaccataagttgtccgacagagggctatctaaacttttgcttatcaacgagcttgatgagtgcttgcttttggctgcctcaagtgatggaaatgtacgcatatggaaaaattttgcttgtaagggagggcagaaacttgtaactgctttttcatcagttcagggacatcgagctgctggtcgcagtattgtgattgactggcagcagcaatcttgttatctgtacgcatctggtgacatgtcttccatcttggtatgggatcttgacaaggaacaacttctcaacaccattccgtcatccgctgatagtgccatttctgccctgtctgcatctcaggtccgctctggatactttgctgctggttttgctgatggttctgtcaggatatatgatgtttgctctcctgatagtaggcctgtctatgtggccaggccgcatgccccaagaacagaaaaggttgtgggcatagggtttcagcctgggtttgatccatacgagattgtaagtgcatctcaagctggagacattcagtttcttgatgttagaatggcagcagaaccctacctgactattgaggcacacaggggttcacttacagcattagcggttcatcggcatgccccagttgttgctagttcagccaagcagatgattaaagtgtttagtcttgaaggagaacagttgaggataattcgctacctgccatcttttatgggccaaagaacaggcagtgtaaattgcctttcttttcacccatacaaatcactcctggctgccggtgctggtcataatgctcttgtctctatctatgctgaggaaaattacaagtaagatcgaggcctatatctcatgctcatgataatgcagacacagtgcgatcgacaggccttacatttttggccaagtgatgctccacagcatggtgcagcttcaagatccaagatgatggtaagctttgtcacagagaaggtgttgatggctccatggctttcggtgcatattgcctgttggacggcgtgtgcaatttgtatgatacagtcaagaactcaagattcattaggcctccttgcattgtgaaccctaccctgatcctgccgttgaacttggaggccccatcaacaaattaatcatacctaagttaaccaaaatgtaaatagccagtgcattcgggttgtactttgtcagcattaatccctttttcaagtgtaaaaaggtctgaaggtgcttgatatgataaacatggcttggtagtggctgctgactgggcaagtggggttgtgcatatgggcctggtcgcacatttctgctcacagatgatgttgaatagatagatgtctgctcacagatgaggttgaatagatagatgtctgctcacagatgttgttgaatagatagatgcatttgtccagctaatatagcgctagatgggggtagcgttggcctgcatgaatgaaggaaagttgtcgagtgaggagtgaccttcattgccattctgtgccgcaacaagtctccatgtgttatcagatggccctgtagataatacatatatttgtagatgtgttttgttcggtgaattgtgctgaccgctgagtaaaatgtattgtgaacgttgttgataaatgctattgtaatgaatttgcaacaagaaaaaattatatgctattgtagtgtatatcacaactctggttgctttttatttttatttttttaaaaaaagatctttc

SEQ ID NO: 218182 - DNA, 7414 bp, Zea Mays
  misc_feature (3718)..(3725): n is a, c, g, or t
ccggcgaccgccaccccacaccgcatctcccgactcccgctgctgtagtgctgtgcactagccaagccagcttgcatattccttctcccccacgctttcccgtgcttccattccaccaccagggccgcggaacgccccgccccgcccggcccccgcgcctcccctttccacctgttcgtcgcgtgcgcattcgttcgcgcagccagcgagccagccaccaccggcccccaccatcgatcgatatcctcctcctgtctctcttgctgctagctctcgcagttccgtccgatcgactatactgatccagctcctgctatgcgcggcggctagctcctcgacgacgagctgatcaatccgacaatccgagtccgccggcgcggatcgtcgatcgatcggccaccagaccatggggactccggtgaacatcatcgtcggctcgcacgtgtggctggaggaccccggcgaggcgtgggtcgacggcgtcgtcaccgagatcaaaggcggcgacgccaccatcgccaccaccaacggcaaaacggtcgtggcgagccttggcagcgtataccccaaggacacggaggcgccgccggcaggagtggacgacatgaccaagctagcctacctccacgagccgggcgtcctgcacaacctctcctgccggtacggcctcaacgagatatacacgtacaccgggaacatcttgatcgcggtgaaccccttccagaggctgccgcatctgtacgacgtgcacatgatggagcagtacaagggcgccagcttcggggagctcagccctcatctcttcgccatcgcggacgcctgctacagggcgctcatcaatgaccaggcgagccaagcgatcctggtgagcggcgagagtggcgctggcaagacggagaccaccaagatgctcatgaggtacctcgcattcatgggaggacggtccggcaccgagggacgcaccgttgagcagcaggttctagagtctaacccggtacttgaagcatttggtaacgccaagacagtgaagaacaacaactcaagtcgattcggcaagttcgtggagatccagttcgacaagcatggcaagatatccggggctgccgttcgcacgtatctcctcgagcgatcgcgagtgtgtcaggtctccgatcctgagaggaactaccactgcttctacatgctctgctccgcgccccccgaggacgtgaagaggttcaaggtgggagacccaaggtcgttccattacctgaaccagacgaactgctatgaggtggccaacgtggacgacgcgagagagtacatagaaactagaaacgctatggatatcgttggcatcgatcaagaggaacaggacgcgatcttcagagtagtagcggcgatcctccacctaggaaacatcaacttttccaaagggcaggagatcgactcgtccaagctgagagacgataaatcggtccatcaccttaaaacagttgcggaactgctaatgtgtgacgagaaggccctcgaagactccctctgccagcgtgttattgttacgcctgatgggaacatcacgaagccccttgatccaggctctgcggcgttaagccgtgatgccttggcaaagacagtgtattcacgactgtttgactggatcgtagacaagatcaataactcgattggccaggatccagatgcgaccaatataataggcgtgcttgatatctatggatttgagagcttcaagatcaacagtttcgagcaattatgcatcaatttgacaaacgagaagctgcagcagcacttcaatcagcatgtgtttaagatggagcaagaagaatacacaagggaggaaatagactggagctatgttgaatttgtagacaatcaggatgtgctggacctgattgaaaagaaacctggaggaataattgcactcctggatgaggcatgcatgtttccaaagtctacacatgagacatttgctcaaaagatgtaccaaacgtataaggtccataagcgcttcagcaagcccaagctagctcggacagcctttacgatcaaccattatgcaggggatgtgacgtatcaagcggatcagttccttgataagaacaaagactatgtggtagccgaacaccaggccctactaaattcttcaagcaacaactgcaatccctcatggaaacactgaatactacagaacctcactacatcagatgtgtcaagcctaatgctgtactcaaacccggcattttcgagaactacaacgtcttgaatcagttgagatgtgggggtgtcctggaagcaattcggatcagctgtgctggttatccaacgaagaggacatttgatgagttcattgatcggtttggaatgcttgcaccggagcttgtcgacagcgatgagaaggccgcctgtgcagcgatatgtgatagaatgggtttgaaaggatatcagatagggaaaactaaggtattcctaagagctggtcagatggcagagctggatgctcgaagagcagaaattttggctaatgctgcgcgactaatccaaaggcgtattaagacacatcttatgcgaaaggaattcatcaaattaagaaaagcctcagttcaatctcagaagttctggagagcacgactagctaaaaagatttttgagtatatgaggagagacgctgcttcaattaggatacaaaagcacgtgcgtgcgcattctgccagaaaagcgtacctgcaagtatatgaatcagctacagcaatacaaacaggattacgagcaatggcagctcgcaacgaacacagattccgaagagagaccagggcatccataattatccagactcggtggcgccaacacagagcttatactgcttacaaacagcaacagaaagcttctttgattctccaatgcttgtggagggcacgcattgcaagaaaggaacttcggaaactgagaatggaagcaagagagaccggcgcactgaaagaagcaaaagacaagctagaaaagagagtagaagaactcacatggcggttagacgtcgagaagcgtttgagggctgaccttgaagaagcaaagagccatgaaattgaaaagttgcaatctgcactacaaaaaatgcaagaaaatctcgaggaagcccatgcagcaatagtaaatgagaaagaggctgcaaagttagcgattgaacaggcaccaccaaagatagtagaagtgccggttattgacaatgcgaaacttgaggagttgacaactcaaaataaagaacttgaggatgaactaagtacgtttaaacagaaggctgaggatcttgaaaataagcttattgagttccaaaaacagtctgatgaactgtcacaagagacacaagaacaagcatccaaagttactgaacttcaagagctggtcgaaaggcttgaagcaagtttatccaatatggaatctgaatacccttttctacgacacatactcatgtcctatgagaaagtctcataaactaaaaataataatacatttagcttggaaagcaagatcgccaccttggagtcagagatagagttgctccacagcaattctgcactagctattcaggccgtggttactcctgaaatgaatcagacaacagtaatcgaggaatttgacaagggacaccagcttgaagaagtaaaacggtcaatgtatttgctattatttttacctggcaaacatttatacagtttaagataannnnnnnngcttccacaggaaaaccacgacgccctgattaaaagtatggtagaagacaggagatttgacgacaaaaaatccgctgcagcatgcattgtctacaaatcactcctacactggcattcatttgaagcggagaagactaacatatttgatcgaatcatccaaataattaggtcatcagttgagggagcagaaagttctggagagctagcctattggttgtcgacaacatcaactctcctctacttgttacaaaacactctcaaagctagcagttcattaagtaaaggaacaaatcgcagccggaccacaacaggcagtctgttcagtagaatggtgcagagtgcccggacatcatcaggcttaggcatagctagtggatacagtggaatggtgggaaggcctgacactgatgcatcgatggtagaggcaaaatatccagcacttcggttcaagcaacacttgacagcatatgtcgagaagatatacgggataatcagagataacctgaagaaggaaataagtccgttcttgacaatgtgcatacaggctccaagagctaaccgtgtgaggccatcacggggatcactaaaaagcatacactctaatgcactagctaggcaagcatcaagtctgcattggcaaaacattgtcaagtgcctggatcatacactggaaacgatgaaaaaaaactatgtagctccggtgataatcaggaaaacatttaaccaagtatttgcatacttgaatgtgcaactcttcaacagcttactgcttcgtcgggaatgctgctcttttagcaatggggagttcttaaaggctggtttacaagacctggagcagtggtgctctaggacaactgaagagtatgtagggacgtcctgggatgaactgcaacacattaggcaggcagtcgggttcctggttttgcatcagaaatcacacaaaatcctggaggaaattacgaatgagatttgccctgttttgagcataactcaaatataccgcatagcaacgatgttctgggacgacaagtacggtgcacaaggcgtatctcaagaggtcattggaaggatgagaacgatgacaacggacgactcagtaactactccaaacagttcgttcttgctggacgacgactcaagcataccgatatcgttggatgacatagctcggctgatgcttcacatcgatccgtccgatgtggaaccgcccccgctactgaggcagaattctcagtttcactttcttctgcagcagcacacggactgatatcttctacagataaagagcagaatgaatggtacagttacttgtggagttacagggaactgaagatttttttttaggagtgcacagattgagttgtgattttttttcccttccttttttttatggttttgggtgggaaatggctacaaagaaagggaaatatagggtatatcgtgatatcattcatttgattggtttgattgtttggaacagagagatttgtaattatttgaatatgtatataaattatagaagcatctgatcacactgcggcctgtgctacgtggcgacacacgattgggcacctcacgtggaccgtcttctacggtgccctgtgaggtggaggtccggcacgggtcagaacactctggcgactaacacgtacgctcatcgccgggcacggacagaacctatataactcctgggcctgccgtcggaggatcgatcagcaacagcaaaggcacagctcgcaagtgacaagacgaactgaacatccatccgatcgagacaaaggtcatccagcgatgccgccgaagcccagtattctggctctcgttctggtctctcttctttgctcggggtacctgtgcggggcggctgatggcgcggaggcgtggaagaggaggaaggcggcgtcgagtccggtgatcggcatcaacctgggcaccacgtactcgtgcgtcggggtgtaccggaacgggcacgtggacatcgtcgccaacgaccagggcaaccggatcacgccgtcctgggtggcgttcaccgacgacgagcgcctcgtcggcgaggccgccaagaaccaggcgccgctcaacccgcagcgcaccatcttcgatatcaagcgcctcatcggccggaggttcgacgacgaggaggtgcagcgggacgtcaggtacctaccgtacaaggtggtgaacaagggcggcaagccgtacgtggaggtgccgatgaagggcggcgagcggagggcgttcagccccgaggagatcagcgccatgatcctgtccaagatgcgggagacggccgagtcctacctcggccagcgcgtcgccgacgccgtcttcaccgtgccggcccacttcaacgacgcgcagcggctggcaaccaaggaagccggcaccatcgcggggctcaacgtgctgcggatcatcaacgagcccatggccgcggcgatcgcgtacgggctggacagggagggcgcggaggtgaacgtgctcgtgtacgacctcggcggcagcaccttcgacgtcaccgtgctcagcatcgacggcggcgtcttcgaggtgctggccaccagcggcgacacgcacctcggcggcgaggacttcgaccagcgcgtcatggaccatttcatccgcctcatcaggcggaagcacggcagggacatcagcaaggacggccgcgcgctgggcaagctgcggcgcgagtgcgagcgtgcccaggacgcgctcagaagccagcaccaggtgcgcgtcgaggtcgagtccctattcgacggcgtcgacttcgcggagcagctgaccagggccaagttcgaggagctcaacgtggacctgttcaggaagacgctgggccccgtcaacaaggccatcggcgacgccaagctcaataagtctgacatcgacgagattctgctcgtcggcggcagcaccaggatccccaaggtgcaggagctccttagggagatgttcgacggcaaggagcctagcaagggcatcaaccccgacgaggccgtggcctacggagccgccgtccagggcagcatcttcagcgacgagagaggcgccgagaccgaagacaccctgttcgacttcgacatgggacggacacggatgacgctgggggtcgagacggctggcggcgtgatgacgaagctgatcccgcggaacacgttgatcccagtgaagaagtcgcaggtgttcacgacctccgaggaccaccagacgactgtctcgatcaaggtgttcgagagcgagcgcagcctgaccaaggactgccgcgagctggggcggttcaacctgacgggcatcccgcccgcaccccgcggcgtgccgcagattgaggtgaccttcgagttggacgagaaccacatcctccacgtgacggcggcggacaaggcgggcgggcggtccaggtcgatcgccatcaccaacgacatggggcggctcagcaacagccaggaggagatcgaccggatggtgcgcgaggccgaggggttcgcggaggataaccgccgcgtccgggagctcgtcgacgagcggaactgttggctacgcctattctaagaacaaggattcagggaagaagaaacaggaggaagtaggccatagcagttttctgatttcttgatgccgagcacagcgtctgtcttcccttttaccaaacacaaagtagcccatactgcattacatgtacgttacgc

SEQ ID NO: 218183 - DNA, 7502 bp, Zea Mays
  misc_feature (3806)..(3813): n is a, c, g, or t
ccggcgaccgccaccccacaccgcatctcccgactcccgctgctgtagtgctgtgcactagccaagccagcttgcatattccttctcccccacgctttcccgtgcttccattccaccaccagggccgcggaacgccccgccccgcccggcccccgcgcctcccctttccacctgttcgtcgcgtgcgcattcgttcgcgcagccagcgagccagccaccaccggcccccaccatcgatcgatatcctcctcctgtctctcttgctgctagctctcgcagttccgtccgatcgactatactgatccagctcctgctatgcgcggcggctagctcctcgacgacgagctgatcaatccgacaatccgagtccgccggcgcggatcgtcgatcgatcggccaccagaccatggggactccggtgaacatcatcgtcggctcgcacgtgtggctggaggaccccggcgaggcgtgggtcgacggcgtcgtcaccgagatcaaaggcggcgacgccaccatcgccaccaccaacggcaaaacggtcgtggcgagccttggcagcgtataccccaaggacacggaggcgccgccggcaggagtggacgacatgaccaagctagcctacctccacgagccgggcgtcctgcacaacctctcctgccggtacggcctcaacgagatatacacgtacaccgggaacatcttgatcgcggtgaaccccttccagaggctgccgcatctgtacgacgtgcacatgatggagcagtacaagggcgccagcttcggggagctcagccctcatctcttcgccatcgcggacgcctgctacagggcgctcatcaatgaccaggcgagccaagcgatcctggtgagcggcgagagtggcgctggcaagacggagaccaccaagatgctcatgaggtacctcgcattcatgggaggacggtccggcaccgagggacgcaccgttgagcagcaggttctagagtctaacccggtacttgaagcatttggtaacgccaagacagtgaagaacaacaactcaagtcgattcggcaagttcgtggagatccagttcgacaagcatggcaagatatccggggctgccgttcgcacgtatctcctcgagcgatcgcgagtgtgtcaggtctccgatcctgagaggaactaccactgcttctacatgctctgctccgcgccccccgaggacgtgaagaggttcaaggtgggagacccaaggtcgttccattacctgaaccagacgaactgctatgaggtggccaacgtggacgacgcgagagagtacatagaaactagaaacgctatggatatcgttggcatcgatcaagaggaacaggacgcgatcttcagagtagtagcggcgatcctccacctaggaaacatcaacttttccaaagggcaggagatcgactcgtccaagctgagagacgataaatcggtccatcaccttaaaacagttgcggaactgctaatgtgtgacgagaaggccctcgaagactccctctgccagcgtgttattgttacgcctgatgggaacatcacgaagccccttgatccaggctctgcggcgttaagccgtgatgccttggcaaagacagtgtattcacgactgtttgactggatcgtagacaagatcaataactcgattggccaggatccagatgcgaccaatataataggcgtgcttgatatctatggatttgagagcttcaagatcaacagtttcgagcaattatgcatcaatttgacaaacgagaagctgcagcagcacttcaatcagcatgtgtttaagatggagcaagaagaatacacaagggaggaaatagactggagctatgttgaatttgtagacaatcaggatgtgctggacctgattgaaaagaaacctggaggaataattgcactcctggatgaggcatgcatgtttccaaagtctacacatgagacatttgctcaaaagatgtaccaaacgtataaggtccataagcgcttcagcaagcccaagctagctcggacagcctttacgatcaaccattatgcaggggatgtgacgtatcaagcggatcagttccttgataagaacaaagactatgtggtagccgaacaccaggccctactaaattcttcaaggtgcccttttgttgcaaacctcttccctccattacctgaggaaacctctaaacagtccaaattctcttcaattggtactcgctttaagcaacaactgcaatccctcatggaaacactgaatactacagaacctcactacatcagatgtgtcaagcctaatgctgtactcaaacccggcattttcgagaactacaacgtcttgaatcagttgagatgtgggggtgtcctggaagcaattcggatcagctgtgctggttatccaacgaagaggacatttgatgagttcattgatcggtttggaatgcttgcaccggagcttgtcgacagcgatgagaaggccgcctgtgcagcgatatgtgatagaatgggtttgaaaggatatcagatagggaaaactaaggtattcctaagagctggtcagatggcagagctggatgctcgaagagcagaaattttggctaatgctgcgcgactaatccaaaggcgtattaagacacatcttatgcgaaaggaattcatcaaattaagaaaagcctcagttcaatctcagaagttctggagagcacgactagctaaaaagatttttgagtatatgaggagagacgctgcttcaattaggatacaaaagcacgtgcgtgcgcattctgccagaaaagcgtacctgcaagtatatgaatcagctacagcaatacaaacaggattacgagcaatggcagctcgcaacgaacacagattccgaagagagaccagggcatccataattatccagactcggtggcgccaacacagagcttatactgcttacaaacagcaacagaaagcttctttgattctccaatgcttgtggagggcacgcattgcaagaaaggaacttcggaaactgagaatggaagcaagagagaccggcgcactgaaagaagcaaaagacaagctagaaaagagagtagaagaactcacatggcggttagacgtcgagaagcgtttgagggctgaccttgaagaagcaaagagccatgaaattgaaaagttgcaatctgcactacaaaaaatgcaagaaaatctcgaggaagcccatgcagcaatagtaaatgagaaagaggctgcaaagttagcgattgaacaggcaccaccaaagatagtagaagtgccggttattgacaatgcgaaacttgaggagttgacaactcaaaataaagaacttgaggatgaactaagtacgtttaaacagaaggctgaggatcttgaaaataagcttattgagttccaaaaacagtctgatgaactgtcacaagagacacaagaacaagcatccaaagttactgaacttcaagagctggtcgaaaggcttgaagcaagtttatccaatatggaatctgaatacccttttctacgacacatactcatgtcctatgagaaagtctcataaactaaaaataataatacatttagcttggaaagcaagatcgccaccttggagtcagagatagagttgctccacagcaattctgcactagctattcaggccgtggttactcctgaaatgaatcagacaacagtaatcgaggaatttgacaagggacaccagcttgaagaagtaaaacggtcaatgtatttgctattatttttacctggcaaacatttatacagtttaagataannnnnnnngcttccacaggaaaaccacgacgccctgattaaaagtatggtagaagacaggagatttgacgacaaaaaatccgctgcagcatgcattgtctacaaatcactcctacactggcattcatttgaagcggagaagactaacatatttgatcgaatcatccaaataattaggtcatcagttgagggagcagaaagttctggagagctagcctattggttgtcgacaacatcaactctcctctacttgttacaaaacactctcaaagctagcagttcattaagtaaaggaacaaatcgcagccggaccacaacaggcagtctgttcagtagaatggtgcagagtgcccggacatcatcaggcttaggcatagctagtggatacagtggaatggtgggaaggcctgacactgatgcatcgatggtagaggcaaaatatccagcacttcggttcaagcaacacttgacagcatatgtcgagaagatatacgggataatcagagataacctgaagaaggaaataagtccgttcttgacaatgtgcatacaggctccaagagctaaccgtgtgaggccatcacggggatcactaaaaagcatacactctaatgcactagctaggcaagcatcaagtctgcattggcaaaacattgtcaagtgcctggatcatacactggaaacgatgaaaaaaaactatgtagctccggtgataatcaggaaaacatttaaccaagtatttgcatacttgaatgtgcaactcttcaacagcttactgcttcgtcgggaatgctgctcttttagcaatggggagttcttaaaggctggtttacaagacctggagcagtggtgctctaggacaactgaagagtatgtagggacgtcctgggatgaactgcaacacattaggcaggcagtcgggttcctggttttgcatcagaaatcacacaaaatcctggaggaaattacgaatgagatttgccctgttttgagcataactcaaatataccgcatagcaacgatgttctgggacgacaagtacggtgcacaaggcgtatctcaagaggtcattggaaggatgagaacgatgacaacggacgactcagtaactactccaaacagttcgttcttgctggacgacgactcaagcataccgatatcgttggatgacatagctcggctgatgcttcacatcgatccgtccgatgtggaaccgcccccgctactgaggcagaattctcagtttcactttcttctgcagcagcacacggactgatatcttctacagataaagagcagaatgaatggtacagttacttgtggagttacagggaactgaagatttttttttaggagtgcacagattgagttgtgattttttttcccttccttttttttatggttttgggtgggaaatggctacaaagaaagggaaatatagggtatatcgtgatatcattcatttgattggtttgattgtttggaacagagagatttgtaattatttgaatatgtatataaattatagaagcatctgatcacactgcggcctgtgctacgtggcgacacacgattgggcacctcacgtggaccgtcttctacggtgccctgtgaggtggaggtccggcacgggtcagaacactctggcgactaacacgtacgctcatcgccgggcacggacagaacctatataactcctgggcctgccgtcggaggatcgatcagcaacagcaaaggcacagctcgcaagtgacaagacgaactgaacatccatccgatcgagacaaaggtcatccagcgatgccgccgaagcccagtattctggctctcgttctggtctctcttctttgctcggggtacctgtgcggggcggctgatggcgcggaggcgtggaagaggaggaaggcggcgtcgagtccggtgatcggcatcaacctgggcaccacgtactcgtgcgtcggggtgtaccggaacgggcacgtggacatcgtcgccaacgaccagggcaaccggatcacgccgtcctgggtggcgttcaccgacgacgagcgcctcgtcggcgaggccgccaagaaccaggcgccgctcaacccgcagcgcaccatcttcgatatcaagcgcctcatcggccggaggttcgacgacgaggaggtgcagcgggacgtcaggtacctaccgtacaaggtggtgaacaagggcggcaagccgtacgtggaggtgccgatgaagggcggcgagcggagggcgttcagccccgaggagatcagcgccatgatcctgtccaagatgcgggagacggccgagtcctacctcggccagcgcgtcgccgacgccgtcttcaccgtgccggcccacttcaacgacgcgcagcggctggcaaccaaggaagccggcaccatcgcggggctcaacgtgctgcggatcatcaacgagcccatggccgcggcgatcgcgtacgggctggacagggagggcgcggaggtgaacgtgctcgtgtacgacctcggcggcagcaccttcgacgtcaccgtgctcagcatcgacggcggcgtcttcgaggtgctggccaccagcggcgacacgcacctcggcggcgaggacttcgaccagcgcgtcatggaccatttcatccgcctcatcaggcggaagcacggcagggacatcagcaaggacggccgcgcgctgggcaagctgcggcgcgagtgcgagcgtgcccaggacgcgctcagaagccagcaccaggtgcgcgtcgaggtcgagtccctattcgacggcgtcgacttcgcggagcagctgaccagggccaagttcgaggagctcaacgtggacctgttcaggaagacgctgggccccgtcaacaaggccatcggcgacgccaagctcaataagtctgacatcgacgagattctgctcgtcggcggcagcaccaggatccccaaggtgcaggagctccttagggagatgttcgacggcaaggagcctagcaagggcatcaaccccgacgaggccgtggcctacggagccgccgtccagggcagcatcttcagcgacgagagaggcgccgagaccgaagacaccctgttcgacttcgacatgggacggacacggatgacgctgggggtcgagacggctggcggcgtgatgacgaagctgatcccgcggaacacgttgatcccagtgaagaagtcgcaggtgttcacgacctccgaggaccaccagacgactgtctcgatcaaggtgttcgagagcgagcgcagcctgaccaaggactgccgcgagctggggcggttcaacctgacgggcatcccgcccgcaccccgcggcgtgccgcagattgaggtgaccttcgagttggacgagaaccacatcctccacgtgacggcggcggacaaggcgggcgggcggtccaggtcgatcgccatcaccaacgacatggggcggctcagcaacagccaggaggagatcgaccggatggtgcgcgaggccgaggggttcgcggaggataaccgccgcgtccgggagctcgtcgacgagcggaactgttggctacgcctattctaagaacaaggattcagggaagaagaaacaggaggaagtaggccatagcagttttctgatttcttgatgccgagcacagcgtctgtcttcccttttaccaaacacaaagtagcccatactgcattacatgtacgttacgc

SEQ ID NO: 218184 - DNA, 1053 bp, Zea Mays
caactggaggccaatagaatcgctcgcttgcgttatcttgttcgcctcgtcagttgttgtttcctcccttcccatcccccactgctcagcagtcagtcagcactcgccacccacacgcctccgctccgcccacggttccactccaactctccgatctccaggaatccgcggctgaggcgccggcgatggcggctcccatggtcgacgccgaatacctgcgccaggtcgacagggcgcgccgccacctccgcgccctcatctccaacaagggatgcgccccgatcatgctccgcctcgcatggcatgatgctggaacttatgacctgaagacaaaaactggtggtgcaaatggttcgattagatatgaagaagagtgcaccacatctgagggacatcttttatcggatgggcttatcggacaaagatattgtagctctatcagggggacatactctgggaagggctcaccctgagaggtctggattcgatggtgcctggacaaaggagcctcttaagtttgataactcatactttcttgagctgttgaatgaggaatctgagggacttttaaagctcccaactgacaaggcactgttatcagatcctgaatttaggcgctatgtggagctctatgcaaaggatgaagatgcgttcttcaaagattatgctgaatcacacaagaaactctctgagcttggcttcacgcctcgcagcacagcaccatccaaatcagatcttccaaccgccgccgtgcttgcacagagtgcctttggggtagcagttgctgcagccgtagttatcgctggctacttgtacgaggcttccaagaaggccaagtagagggcgaagttcttctccacatggctttgctttagtaagtctgaagatcgaataacaggaccatatctgaagatcgaataacggatcatataaatgagttactcggaaaatgttctgaaatccttacgaacagaacgttgccttcatgtttacactgtactcatgagtcacagtgatatggagatggcatagcctactattggaagtaaaaca

SEQ ID NO: 218185 - DNA, 3985 bp, Zea Mays
gttaaatctctattttgccctttgtggaagaaatgatggctgtctcggaagccgtgaagacagataaaaaaagaaaaagaaggcaagtaaacaaagcagcaaggaccaaggaggacgaaagcgagcgagacacacaacagtgacaccagcacaagcaaggagaggcatagggaggagagcagccagcagcaggaaagctgagcagccgtcagctgagagctagagcaagagcatccaccagtggcggcagcagctagcgacaaaggctgaatccgagagtgcgcgccgcagccgtggctgccgtcccaggcgccgctgccgcttgtgagaggcgctcgtcttgtattcacgaggagggcgacgatctcccgcgcggcaaaggaactaaccactggccccgccctgtgatggctgctgtccgtgccccggcggcgaagggaggtgtaggtgctccggaggcggcggcgtggagtggcagtggtctccgcgcgaaccaggccgggcgcgccagctgccgcggcgcctagagcgagcgcctggacgtggtctctctcgcagtccgagttggagcttgggttttggcgcggagggacgccggggttctggttctggcaacgcggctggaggaaggggggaaacggagatggcggtcggggacgcgctgcgacggctgtgcgaggagatcgggtggtcctacgccgtcttctggaaggccatcggcgccgccgaccccgtgcatttggtgcgggaggacggttactgtggccacacttcatgccctgtcggatctgagccttctgaatctctgcctctgcccagcgacgctgggtgctctgttcctgcagctgacaccatctgctggcttgttaacaacgatatggcgtcgcaggttcatgtcgtcggacaagggatcgtgggccgtgccgcgttcagtggcaatcaccaatggatcgtccacggtactgccaatggtcacgggctctcctccgaggttgctgctgaggtgaacaatcagttcagagttggtattaagactattgcgatcattcctgtgctgccacggggtgtcctacagttaggctctactggtttggttatggaaaacacaaattttgttatgtttgcaaagaagttgtgttctcagctaaacaaccgttcaagcatggctgcatctgcttcggttaagaacacttctagtcagcatggtcagtcacgtcctgatactgcaactgtgtcaactagtacaccaccaaatgcattgctgagtgcatctttgcttaaggttgcgcaacagaatggtcaccctgttagagagcacagtgtctatgctgagcgtgatcttaggtttatacaacaagcatccatctgtgagagtcaatttggaagtaatttacagagtggtgttatgaactcatgtttgacctccccaagcttcgcatcagttaaaaagcagtcacttttgatgaacagcattgggcagttacagttcagtaataatgtgcattcatcagcagatttggcaagggagatcatattaaaatcccttgggcgccaggactcttctgtctgcgaaaatacaaacatgaatatgcatcgtggaagatatgtagtatccaatgatataaatggttctaggaattttgattttcttcctattggtgcgaaagaaagcagagccaacttatcaatccctgcgtcgagtcaaattttggaccacatgccaggaacattgcagcagaaacagtctctagtcccattcagggttacccaatcttctgaattttctaagaaagtggagaaccctgaaagtggatcatttcaaattccttcagttacaacttctgattctggtggtcaggtttctaacagtttcaacatggtccaagagaatcgattgagtatgtcaaacaatgtccgacaagtccaaaagattgacagatttagtgatccaagtgctaatgtcagcactcagagaatgaagaacagagatgaatgcgagccaggaatgcccattgagagagcctcctcgttcctagtcgaacctggtgcagataatgacttgtttgatatgtttggttctgaatttcatcagtcctcccacaacgttggtgctgatttggtcacctggagtggtacagagtctcagaactcagatagagatgtccctgaatcgtcaatatgtttcaatagttcaccacttttcagttcgctagacaacgagcttcactattcaggtatcttatcgctgactgatactgatcaactattggatgctgtcatatcaaatgtcaatccaagtggtaaacagtgtcctgataatagtgcttcttgcaagactgcactgatggatgttcctagcacatctcatctttgttcaatagatttgaagagatgtgagtctcccagcgttccttccctgctaattaagcacgaattggcacagtttgctaaacagccatgtctcgttgataaatctgaggatggttgtctttcccagaataatggaatgcacaaatctcagatacggctttggattgagagtggtcagaacatgaaatgtgagagtgcttcagcttctaatagcaaaggtcttgatgtgccaagcaaggcaaatcgcaagagatctcgaccaggagaaagccctaagccacgacctaaggaccggcagctgatacaggaccgtattaaagagcttcgtgagcttgtaccgaatggggcaaagcattgatggtttgttggagaagacagttaagcacatgcttttcttacaaagtgtgacgaaaaatgcagacaagctcaaggactctactgagtctaagatacttggtagcgaaaatggccccctttggaaagactacttcgaaggtggggctacctgggcttttgatgtcggctctcagtctatgacatgtccgatcattgtcgaggatcttgaccgacctcgtcaaatgcttgtggagatgctctgcgaggatagaggaatcttcttggagatagctgatttcatcaaaggacttggactgactatcttgaggggtgtgatggaaacacgcaaaagtaaaatctgggcacgattcactgttgaggcgaaccgggacgtaaccagaatggagatattcctatcgcttgtgcgcttattggagccaaattgtgacggcagtggagcggcggacaacactaacaacatgaacatgcatcttggtttggtgcaccaacctgtcatcccagcaacaggtctcatccaatgagattaagactaagaggaaaccctcaagcatcttccaagtgctaagagcaggaggagctcagctaactcctgccatgactagcatcaccaatacgccatgcagtgcaccacctgctttcccgagacaccttaatctgtgcaaaagtgacgtccttcttgagaccaggtcgcagaaatggaagaaggaaaacaacgcaagagtgatcatcaggcagtgttttgttcgtatgatctttagattgtttgttagttagcgctgtttggtcgtatattagtggttttttttgggtactgttatccagaatggaagttcttgggttggtttatttcacacacacaaaaagatggaatgccacctttgttataagtctcttcacattagaaccagtgagcatagctagtgaaaaattgtttgagaagactcttgagtcattgctctgatcagattatttgttattactcactgctgctgcctgccaacatccagaagtagatcactggattctagctgaagccacaatgtcatccagcagcacatggtgctgccaatgagttgcaatgtgatatgtttactttaagcaaaacagatactaataatactagtaggcaatttttgtaaaatgtttgggtatcaactagttacttatcaccatcctatactagataggtgcccgtgcgatgccacggaacataaatctcgatttgtatatcagctatgcttcctatggagcaaggaag

SEQ ID NO: 218186 - DNA, 1181 bp, Zea Mays
aaaaaaggaggggctcgcacgagagacgtggtccacctgcccaccgggcgcctactgggggcggttgttgttggtatatttgcggtggccggggacgggtcagcaccgccttcttctcaccagcccctctcgcctcacgaaaaggcgcaggccaaggccaaggccaagccgccccctccctcctctcctctcctctcctctcctttcctctccactctctggcagccaaaggcgaggccgagatcctgcgcgcggaggatgccttccaggtccatgagccggctgtccgtcgagtccgcctcgggcagcggcggcggcggctgccgggaggccgagccggtgctctgcgcgcctcggccgcgcagggcccagcagcagctggtccacgtccacccccgcggcgccgacctcatcctcggcccgccgcccttccttctcaacgagcgaggagggtcggtgcagctgggcggcgttcggcggcgggtcgccgccggcgcgcgcgggcaacccgctggtgcacgaccccagcttcctgctgagccagcgccaccccgcggcggacccgccgctggagctcggcttcttcgaccacctgatccgcaccagcagctacgttcaccggccgacgccgacgacgtcgtataccagcaccagcagcagcggcagtagcagcaagagtagttttggcccgtcgtcgttcgcgcccgccgtgaggatccaggggttcgacgtcgccgcgtgccggagctcccacagcggcggcggcggcgcgggcggccgcgttctgtccgccgcccgcgcgtgagctagcggtcgagctccatggtgtggaggggcaggaaatcaaagagggaggaggaagaaccttgtgtacagattatctgtctgatgagtcgtgttcgtgtccgctgtactaattgtgaacaccaccacgtagcatagcatagcatatagcatagcatatcaaagacaactaggtcggtcggacggtcagcgctcgtgttcttgtagcagtcgagctagcgactaggctaccgcgcgccatgtaacgtacggtcctgcaaacaatactgcacgtataaagatggaaaccgtgtacatacctatacatgttcgtacgttcgatcgatccatcgatcgagacgctggatgctcggtggcaaggatagagtgatggcgcg

SEQ ID NO: 218187 - DNA, 1625 bp, Zea Mays
cggccgccacgccacttcgctgatcacacgcgggcgcgcgcattactccgcttcactcctttccgtcaccgtcgcccgccgccctggtctcccgcttcctctgatcctccgacctccgcctcttaaccttcacagcccttgtctttggcacgaaccaattcgctggcatggcgcggcggttacctgccgctgactcgctctagtggtgaggacctgctgcagtggacgtctgccgtggacgtggtggcggagaggggtgctggcggcgagcgacggcggagcagccatggaagcggtgcagacgaattgaatcactctctgttgatgggcagcctgagcgctccgccagtgctgtcgccgctcgtttctgggctcatcttttcatctgacagagtcctcaaatctagagggttaactaccagtagcgtgatgaagtcatgtaggctatccgagctcagcaatgctgaggttagcagcctcaaggctcgtcctcgcatcgattcctcgtccatgtccatatttggcacggtgaatccaattgttgagggtgtctgtgtcagaggtgatgcagcagataagcagtaccaggtgaaaaactgcagatggaggccaacttttgccttggagactgatgggccatctaacactgatggccaagactttgatgaggacagtggttttcttggtaggactagactgggaagactcatccaagctgctgcaagggagctacttgacaagctgaactctgcgagaaccaattcgccaacaaagatattccttgtcctccttggtttttacacagccaatgccttggcaacaatactagggcagaccggtgactgggatgttcttgttgctggtgttgtagtggctgccattgagggaattggcatgctcatgtacagaaaaccaattgccaggcctcctggtaggttccaatctttgatttcaatggtgaactactggaaagccggtgtatgcctgggcctttttgtggatgccttcaagctgggtagctgagtttatacaatcatctgctgctatctgcctatggtaattttttgggtatattgggatcacaataacgccatgatatggttccatgatggccattgctcgttgctcgaattctaatagctgcatttggctctaattctgggagcattggctgctgaggtatcagatttcttcaaagttaatgaagatgtttggagcagatattattctgaggtgactattcatttttccataatcgaaggccatgtttgtcaaccattgtttggcccgtaaactgtagatatgctgtagtttttccacctccatgtcatttagccctaatatgcatttatgcgtactgagagaagtaaaaaaaaaaaaagatgtgctgctttaagggcatgtttgggagcaaggggatattgaatagcaatgggattttagccccttcaatccccttgctccttagataggatgtatttcttctacggatatatggtacttgtacgtgcgtgtcagcatgtgatgagttgaatacttctttcatccaggattattctatatcttgcactatatgtcattgttaccaaaaatgttttctctcttcaaccatatgaaaaagaaaa

SEQ ID NO: 218188 - DNA, 1593 bp, Zea Mays
cgccacgccacttcgctgatcacacgcgggcgcgcgcattactccgcttcactcctttccgtcaccgtcgcccgccgccctggtctcccgcttcctctgatcctccgacctccgcctcttaaccttcacagcccttgtctttggcacgaaccaattcgctggcatggcgcggcggttacctgccgctgactcgctctagtggtgaggacctgctgcagtggacgtctgccgtggacgtggtggcggagaggggtgctggcggcgagcgacggcggagcagccatggaagcggtgcagacgcctgagcgctccgccagtgctgtcgccgctcgtttctgggctcatcttttcatctgacagagtcctcaaatctagagggttaactaccagtagcgtgatgaagtcatgtaggctatccgagctcagcaatgctgaggttagcagcctcaaggctcgtcctcgcatcgattcctcgtccatgtccatatttggcacggtgaatccaattgttgagggtgtctgtgtcagaggtgatgcagcagataagcagtaccaggtgaaaaactgcagatggaggccaacttttgccttggagactgatgggccatctaacactgatggccaagactttgatgaggacagtggttttcttggtaggactagactgggaagactcatccaagctgctgcaagggagctacttgacaagctgaactctgcgagaaccaattcgccaacaaagatattccttgtcctccttggtttttacacagccaatgccttggcaacaatactagggcagaccggtgactgggatgttcttgttgctggtgttgtagtggctgccattgagggaattggcatgctcatgtacagaaaaccaattgccaggcctcctggtaggttccaatctttgatttcaatggtgaactactggaaagccggtgtatgcctgggcctttttgtggatgccttcaagctgggtagctgagtttatacaatcatctgctgctatctgcctatggtaattttttgggtatattgggatcacaataacgccatgatatggttccatgatggccattgctcgttgctcgaattctaatagctgcatttggctctaattctgggagcattggctgctgaggtatcagatttcttcaaagttaatgaagatgtttggagcagatattattctgaggtgactattcatttttccataatcgaaggccatgtttgtcaaccattgtttggcccgtaaactgtagatatgctgtagtttttccacctccatgtcatttagccctaatatgcatttatgcgtactgagagaagtaaaaaaaaaaaaagatgtgctgctttaagggcatgtttgggagcaaggggatattgaatagcaatgggattttagccccttcaatccccttgctccttagataggatgtatttcttctacggatatatggtacttgtacgtgcgtgtcagcatgtgatgagttgaatacttctttcatccaggattattctatatcttgcactatatgtcattgttaccaaaaatgttttctctcttcaaccatatgaaaaagaaaa

SEQ ID NO: 218189 - DNA, 1482 bp, Zea Mays
cgcattactccgcttcactcctttccgtcaccgtcgcccgccgccctggtctcccgcttcctctgatcctccgacctccgcctcttaaccttcacagcccttgtctttggcacgaaccaattcgctggcatggcgcggcggttacctgccgctgactcgctctagtggtgaggacctgctgcagtggacgtctgccgtggacgtggtggcggagaggggtgctggcggcgagcgacggcggagcagccatggaagcggtgcagacgggttaactaccagtagcgtgatgaagtcatgtaggctatccgagctcagcaatgctgaggttagcagcctcaaggctcgtcctcgcatcgattcctcgtccatgtccatatttggcacggtgaatccaattgttgagggtgtctgtgtcagaggtgatgcagcagataagcagtaccaggtgaaaaactgcagatggaggccaacttttgccttggagactgatgggccatctaacactgatggccaagactttgatgaggacagtggttttcttggtaggactagactgggaagactcatccaagctgctgcaagggagctacttgacaagctgaactctgcgagaaccaattcgccaacaaagatattccttgtcctccttggtttttacacagccaatgccttggcaacaatactagggcagaccggtgactgggatgttcttgttgctggtgttgtagtggctgccattgagggaattggcatgctcatgtacagaaaaccaattgccaggcctcctggtaggttccaatctttgatttcaatggtgaactactggaaagccggtgtatgcctgggcctttttgtggatgccttcaagctgggtagctgagtttatacaatcatctgctgctatctgcctatggtaattttttgggtatattgggatcacaataacgccatgatatggttccatgatggccattgctcgttgctcgaattctaatagctgcatttggctctaattctgggagcattggctgctgaggtatcagatttcttcaaagttaatgaagatgtttggagcagatattattctgaggtgactattcatttttccataatcgaaggccatgtttgtcaaccattgtttggcccgtaaactgtagatatgctgtagtttttccacctccatgtcatttagccctaatatgcatttatgcgtactgagagaagtaaaaaaaaaaaaagatgtgctgctttaagggcatgtttgggagcaaggggatattgaatagcaatgggattttagccccttcaatccccttgctccttagataggatgtatttcttctacggatatatggtacttgtacgtgcgtgtcagcatgtgatgagttgaatacttctttcatccaggattattctatatcttgcactatatgtcattgttaccaaaaatgttttctctcttcaaccatatgaaaaagaaaa

SEQ ID NO: 218190 - DNA, 1681 bp, Zea Mays
cgcattactccgcttcactcctttccgtcaccgtcgcccgccgccctggtctcccgcttcctctgatcctccgacctccgcctcttaaccttcacagcccttgtctttggcacgaaccaattcgctggcatggcgcggcggttacctgccgctgactcgctctagtggtgaggacctgctgcagtggacgtctgccgtggacgtggtggcggagaggggtgctggcggcgagcgacggcggagcagccatggaagcggtgcagacgctactttccgtcgctggctagagtcctactctttgtcaaattctaggtgcgctggacgctggacgaaccctaccacgcgcaccgtcacgttgtgaattgaatcactctctgttgatgggcagcctgagcgctccgccagtgctgtcgccgctcgtttctgggctcatcttttcatctgacagagtcctcaaatctagagggttaactaccagtagcgtgatgaagtcatgtaggctatccgagctcagcaatgctgaggttagcagcctcaaggctcgtcctcgcatcgattcctcgtccatgtccatatttggcacggtgaatccaattgttgagggtgtctgtgtcagaggtgatgcagcagataagcagtaccaggtgaaaaactgcagatggaggccaacttttgccttggagactgatgggccatctaacactgatggccaagactttgatgaggacagtggttttcttggtaggactagactgggaagactcatccaagctgctgcaagggagctacttgacaagctgaactctgcgagaaccaattcgccaacaaagatattccttgtcctccttggtttttacacagccaatgccttggcaacaatactagggcagaccggtgactgggatgttcttgttgctggtgttgtagtggctgccattgagggaattggcatgctcatgtacagaaaaccaattgccaggcctcctggtaggttccaatctttgatttcaatggtgaactactggaaagccggtgtatgcctgggcctttttgtggatgccttcaagctgggtagctgagtttatacaatcatctgctgctatctgcctatggtaattttttgggtatattgggatcacaataacgccatgatatggttccatgatggccattgctcgttgctcgaattctaatagctgcatttggctctaattctgggagcattggctgctgaggtatcagatttcttcaaagttaatgaagatgtttggagcagatattattctgaggtgactattcatttttccataatcgaaggccatgtttgtcaaccattgtttggcccgtaaactgtagatatgctgtagtttttccacctccatgtcatttagccctaatatgcatttatgcgtactgagagaagtaaaaaaaaaaaaagatgtgctgctttaagggcatgtttgggagcaaggggatattgaatagcaatgggattttagccccttcaatccccttgctccttagataggatgtatttcttctacggatatatggtacttgtacgtgcgtgtcagcatgtgatgagttgaatacttctttcatccaggattattctatatcttgcactatatgtcattgttaccaaaaatgttttctctcttcaaccatatgaaaaagaaaa

SEQ ID NO: 218191 - DNA, 1573 bp, Zea Mays
ctgatcctccgacctccgcctcttaaccttcacagcccttgtctttggcacgaaccaattcgctggcatggcgcggcggttacctgccgctgactcgctctagtggtgaggacctgctgcagtggacgtctgccgtggacgtggtggcggagaggggtgctggcggcgagcgacggcggagcagccatggaagcggtgcagacggtgcgctggacgctggacgaaccctaccacgcgcaccgtcacgttgtgaattgaatcactctctgttgatgggcagcctgagcgctccgccagtgctgtcgccgctcgtttctgggctcatcttttcatctgacagagtcctcaaatctagagggttaactaccagtagcgtgatgaagtcatgtaggctatccgagctcagcaatgctgaggttagcagcctcaaggctcgtcctcgcatcgattcctcgtccatgtccatatttggcacggtgaatccaattgttgagggtgtctgtgtcagaggtgatgcagcagataagcagtaccaggtgaaaaactgcagatggaggccaacttttgccttggagactgatgggccatctaacactgatggccaagactttgatgaggacagtggttttcttggtaggactagactgggaagactcatccaagctgctgcaagggagctacttgacaagctgaactctgcgagaaccaattcgccaacaaagatattccttgtcctccttggtttttacacagccaatgccttggcaacaatactagggcagaccggtgactgggatgttcttgttgctggtgttgtagtggctgccattgagggaattggcatgctcatgtacagaaaaccaattgccaggcctcctggtaggttccaatctttgatttcaatggtgaactactggaaagccggtgtatgcctgggcctttttgtggatgccttcaagctgggtagctgagtttatacaatcatctgctgctatctgcctatggtaattttttgggtatattgggatcacaataacgccatgatatggttccatgatggccattgctcgttgctcgaattctaatagctgcatttggctctaattctgggagcattggctgctgaggtatcagatttcttcaaagttaatgaagatgtttggagcagatattattctgaggtgactattcatttttccataatcgaaggccatgtttgtcaaccattgtttggcccgtaaactgtagatatgctgtagtttttccacctccatgtcatttagccctaatatgcatttatgcgtactgagagaagtaaaaaaaaaaaaagatgtgctgctttaagggcatgtttgggagcaaggggatattgaatagcaatgggattttagccccttcaatccccttgctccttagataggatgtatttcttctacggatatatggtacttgtacgtgcgtgtcagcatgtgatgagttgaatacttctttcatccaggattattctatatcttgcactatatgtcattgttaccaaaaatgttttctctcttcaaccatatgaaaaagaaaa

SEQ ID NO: 218192 - DNA, 3341 bp, Zea Mays
gccgaccacaccggcacacccccgcaaccactgttcccgccgattcgtttcgtcccaccgcgccaaactgcgacgacggcggtcgcagagttgccttccctccaaccgtaccgccgccgccgccgctgtcatgaggatgctagcaataagatatctgcataggactgttgctgcaaaagcccgacacagtggtgagaagcctttacactgagccaaaggtcctgggttcgacgcagcctctttgcggccgatacgattatggcgctgaagctatgcaggaggctatcaggatttattgttggtgcgaattctagatgttgtaggctaagtgatgttgataagtttgctttactgttccaaaactgcacagatgtgaggtctctgaagaagctccatgctcgtgttctgacacttggacttggcagggatgttattcttggctctgaaattttgatttgttatgctagtttaggtgtcctgtgcaagacaagactttgtttccaaggcttcttaaataatgatcttgctgagtggaattcagtcatggttgacatttttagggctggttatcctgaggaagctattcttttgtacagaggattgaagttgcgtcagattgacttagatgagaaaactgttacttttggcttgaagagctgcattgaacttcggaatttgttattgggcaaaggaatgcatgcagactcagtaaagcttggcctcagtagggataaatttgttggttcttctcttgttgggttatactctaagcttgccagaatggatgattcacagaaggcatttgaagagattctggacaaggacatcgtttcttacacctcgatgatcactggttattctgaaaatatggattctacttcatggaatgcatttaaaattgttagtgacatgtcgtggagcaacttggaagtaaatcgtgtgactctggttagcttactgcaagttgcgggtaatctgggagcaattagagaagggaaatcagtacattgctattcaataaggagagatattggtatctcagatgaagttctagagaccagccttgttcacatgtacatgcaatgtggagcttgccaattagcatctgctgtcttgaaaaattcggcgcaatctgtggcttcctggaatgcaatgcttgctggtcttgttcgaaccggacagagtggaaatgcaatacactatctttatatcatgctatatgagcataaggtagttccagattctgtaacctatgcaaatgtgatatctgcttgtgctgagctatgcaattcaggctatgctgccagtgttcatgcctacataattagaaggtctattcctctagatgtagttttggccacagctcttatcaaagtatacttgaaatgcactagaattacgatatccaagcgtctctttaatcaattggtggttaaagatacagtctcctataacgccatgatctatggttatctccaaaatggcatggtcaatgaagctattgcgttgctcaaagaaatggtgacagaatgtgttgcaccaaattttgtgaccattcttagtctgcttgcagctatcgctgatcacaaagattttgctagagggaggtggattcacgggttttcaattagacatggtttttgttccaatgtcgacattgcaaatcaaatcatacgtatgtattctggttgtggaaagattgcatcagcaaggattgtatttgcttcatttgaaaacaaaaatttaatttcatggactaccatgatgatgggatgcttattctgtggacatggaggtcaaacagttgaattatttcaattattaatgcaacaacacgacaataaacctgattctatcgctgttatgactgcaattcaggctgtttctgagtttggacatttgaaaggtgtaaagcaagttcattgctttgtctaccgtgccttgttggagaaagatacgaagaccatgaattctttgataactgcatatgccaaatgtggcaggttggatttatcagtaagtttgttcttgagtttggaacacagagatctagattcatggaattctatgatcagcgcttatgggatgcatggattttatactaaggtacttgaaatgtttaagctgatggaagaaggaaatattaatcctgatgggttaacattttcttcagtgctttctgcatgcagtcatgctggtctaattaaggagggtctgcatatttttcagtcaatgacctcaatgtattcagttcgtccacaggaagagcattatggttgctttgttgatttaatgagtcgagcgggacatcttgaagaaggatacaagttcataaagttatctaccttaaatgacaaatctagtgtactttgtgctttactttctgcatgcagaacttatggaaatacaatgcttgggcaggttattagcaatgagctccttgaggttggacaacagaatccaggtacttatgctttgatttcagaagtatttgctcagaaaggacaatggaataaatcagctagtataaggaatagagcaaaagaaaatgggttgagaaaacttcctggttctagcttgatcgaatcagtggagcaagttagcaaggtgtgttagacaggtgtaagagcatcacatgtaattggtgcctttatcatgtgcttgaaccaccattcaatctcaatatgaagcaaaattttgttatgctctgaaagcctgaaccattttgaaggaaaatgcaaagttcacagtgcctttaccaacacgcatacacactatcggcttcttatgaagaaaaaggagataaatatcatgtttgaacatgctgattgttttgttccttcaaggatcaaggcagatgtttgagaggcacaagtagcagacagtgatggacctaaacacttggagagtaggtgagagctcaggtgcacgccaagacaaacggtggggaactatagcttctcgttatgcgtgtcacatcccgctacaggacgagggtatttatagcctgttcaggggtaggtggttcaaagtacgaccctacccccagccaccaactatatccaggggatattccatgtaacagagtaattacagtgccgttcgtacaacatacaacacgcactagattacacacccgcacgctacgctgactagtgggcctcctggcgcgtcttctggtgggccgacgttggactgatcaacgtgtagccttcaccgacatccttggagccttcgcgccaggtacccttcgttcgatctggatgagcgaagggtgacgagtggtccgcgtccgaggcgtagcgaagggtgattttacccctcgttatattaagtaattg

SEQ ID NO: 218193 - DNA, 945 bp, Zea Mays
ccgagtactgtttttatgcagatttttgaagggtcaagccatgtaaacgtcagtcatgttatccacgagctctcatttggcccaaagtatccaggaattgacaacccactggatgatacttcaaggatacttcatgacacaagtggaaccttcaaatactatatcaaggttgttccgactgagtacaaatatctgtcaaagaaaatattgccaacaaatcagtattctgtcacggagtattttcttcccattcgcccaactgagagggcctggccagcggtgtacttcctgtatgatctctcaccaattacagtcaccatcaaagaggaaagaaggaacttccttcattttataactcgcctttgtgcagttcttggtggcacatttgccatgacaggaatgcttgaccgatggatgtaccggcttgtcgagtcagtcaccaactcgaagaccagaagtgtactgcggtaactgcacaattcatgataggcggaaaacagctggtagatgcatgccctgcgatgcttcaaggctgtccgggggagtagcagtatttgaggaaaggtcgatgaaatgaagtagtagcgaggaaagatgtcatgcttcaactgccaaggatcagaagagttcgtgagtcgttactgttgtgaagcacgtcgctgttgtagtgctgtatgatttatttctccgtcacgagtcatgattaacacaaacgaggtacagagactttttttaattcctctgaacattgatcattgtgatatagagcttctccatatatatagagagctattatatatatagtgctgtcaaggacgaacatttgtataaacgggactgggattagaatccctcatttcctctttttttattataaaaaatagagtttgtatttttttattttatgatatttcttggaggattactatgatatgcatattttat

SEQ ID NO: 218194 - DNA, 999 bp, Zea Mays
gagtactgtttttatgcagatttttgaagggtcaagccatgtaaacgtcagtcatgttatccacgagctctcatttggcccaaagtatccaggaattgacaacccactggatgatacttcaaggatacttcatgacacaagtggaaccttcaaatactatatcaaggttgttccgactgagtacaaatatctgtcaaagaaaatattgccaacaaatcagtattctgtcacggagtattttcttcccattcgcccaactgagagggcctggccagcggtgtacttcctgtatgatctctcaccaattacagtcaccatcaaagaggaaagaaggaacttccttcattttataactcgcctttgtgcagttcttggtggcacatttgccatgacaggaatgcttgaccgatggatgtaccggcttgtcgagtcagtcaccaactcgaagaccagaagtgtactgcggtaactgcacaattcatgataggcggaaaacagctggacgactttcgtcgcatgtgacatgtgttgcgagctgcattcgctcctgtcctcaggtagatgcatgccctgcgatgcttcaaggctgtccgggggagtagcagtatttgaggaaaggtcgatgaaatgaagtagtagcgaggaaagatgtcatgcttcaactgccaaggatcagaagagttcgtgagtcgttactgttgtgaagcacgtcgctgttgtagtgctgtatgatttatttctccgtcacgagtcatgattaacacaaacgaggtacagagactttttttaattcctctgaacattgatcattgtgatatagagcttctccatatatatagagagctattatatatatagtgctgtcaaggacgaacatttgtataaacgggactgggattagaatccctcatttcctctttttttattataaaaaatagagtttgtatttttttattttatgatatttcttggaggattactatgatatgcatattttat

SEQ ID NO: 218195 - DNA, 2191 bp, Zea Mays
taaacatctatttgtcttcagaaaagggaaagtagtatgaaagattttgaaacggtgttcataattattcacatgctatgtccttagctgaaacaataatgccttcgatgtttatcgcatctaaatcagatatatgcactcagggagtgtttggtttaaataatcactacatccaaattgagtccaaattgaggtggtgagaactgagaagatagtgagaagatgatggactaattcattgctcacaccaaacatcctatcagtaaagttggaaggaagatgacaacacaagtagcaagtaaatggaatccaaacagcttcgacgtctggggccagaggagagcatagcctcgatcgcgtcctctccttcgacaaggccgctatgtcgtcctcgctggagttgaagccccaaggaacttcgccttttctggcgcgcggctgaggagctccttcttgagctgagcgagcgtctgcgtcagcatgccctcaggagaagatgagcaggagcccatgctcgaacgcctcccgctgtgcggccgtgggtggagcagcgccgtcgcggacgggctctcccttcgccgccgccgggtactcggcgctccatccaggcactccagccacccccaccccttcctccgccgccgggtactcggcgctccatccaggcgtccccgccccgcggccgcctgctactcgttcgggcgctccatccagcgttctccctccagctccagtctccggcgcgatgaagatcgcggtggaggggtgcatgcatggggagctggacatagtctatgacacgctgcgaaggctcgaggaggccgagggcgtcaagattgacctcctcctctgctgcggcgatttccaggctgttaggaatgagaacgatttacagtgtgttagcgttccacaaaagtatcgtaccatgaacacattttggaagtactactcaggagaagcagttgctccgtacccaaccatctttattggtggaaaccacgaagcatccaattatctgtgggaattgtactatggaggatgggcagcacctaacatatactttttggggtttgctggtgttgttaagtttggaaacatacgaattggtggattgtcaggaatacataacaaacaccattatcatttaggacactatgagaggcctccatacaataaagatactatacggtctgtgtaccatgtaaggcattatgatgttctcaagctcatgcatttgaaggagccgctagatgtattcttgtcacatgattggcctctgggcattaccgagtatggaaactggcagaagctcattagtgtgaagaagaactttgaagatgaggttaacaatagaacactaggcagcaaacctgcagctgaattactgaacaagctaaaaccaccatactggttttcggcgcaccttcactgtaagtttcctgctgttatccagcatggcaagaatggacctacaacgaagtttcttgcacttgataagtgcattcctgggcgcaattttttgcagggatgagcagctcgacactcaagaagaccggcaatgggtcaggagcaagttgaatactagaggagctaagccttttgattttgttcagactgcaccatctttcaatccttccagtacaacatctaaacagtccataacagtttgctgcaggaatccacaaactgagtcttttcttcagcttctggaactcccatatctgctggactcatctaaatctgagatgtttggtagaaatgagtcaacttctcagacaggaaacacacttgataatgaagatatagagctaccagatgaagatgaggatgctttagaagatgacgagtgaaggacagcacttttagacaagtaccattgcacctatcatgttggttgcagggtttgcgatagatttcattgtcttttgtagattgcaatctatatatctagacgaggaactaacatgtactagattgtattgtcatagctgcttttttgttggaggacgtttgtggatctagagggtgatctgttgatcacaatgccaactctttggtgtttagttcatacagttttttgaactaactacaattaatcagtagactagatgcatccggtggaaagtgttaacaaaaatatcatctactagcaaggtagagatcagctatatatataaaacatatatttgaa

SEQ ID NO: 218196 - DNA, 2926 bp, Zea Mays
taaacatctatttgtcttcagaaaagggaaagtagtatgaaagattttgaaacggtgttcataattattcacatgctatgtccttagctgaaacaataatgccttcgatgtttatcgcatctaaatcagatatatgcactcagggagtgtttggtttaaataatcactacatccaaattgagtccaaattgaggtggtgagaactgagaagatagtgagaagatgatggactaattcattgctcacaccaaacatcctatcagtaaagttggaaggaagatgacaacacaagtagcaagtaaatggaatccaaacagcttcgacgtctggggccagaggagagcatagcctcgatcgcgtcctctccttcgacaaggccgctatgtcgtcctcgctggagttgaagccccaaggaacttcgccttttctggcgcgcggctgaggagctccttcttgagctgagcgagcgtctgcgtcagcatgccctcaggagaagatgagcaggagcccatgctcgaacgcctcccgctgtgcggccgtgggtggagcagcgccgtcgcggacgggctctcccttcgccgccgccgggtactcggcgctccatccaggcactccagccacccccaccccttcctccgccgccgggtactcggcgctccatccaggcgtccccgccccgcggccgcctgctactcgttcgggcgctccatccagcgttctccctccagctccagtctccggcgcgatgaagatcgcggtggaggggtgcatgcatggggagctggacatagtctatgacacgctgcgaaggctcgaggaggccgagggcgtcaagattgacctcctcctctgctgcggcgatttccaggctgttaggaatgagaacgatttacagtgtgttagcgttccacaaaagtatcgtaccatgaacacattttggaagtactactcaggagaagcagttgctccgtacccaaccatctttattggtggaaaccacgaagcatccaattatctgtgggaattgtactatggaggatgggcagcacctaacatatactttttggggtttgctggtgttgttaagtttggaaacatacgaattggtggattgtcaggaatacataacaaacaccattatcatttaggacactatgagaggcctccatacaataaagatactatacggtctgtgtaccatgtaaggcattatgatgttctcaagctcatgcatttgaaggagccgctagatgtattcttgtcacatgattggcctctgggcattaccgagtatggaaactggcagaagctcattagtgtgaagaagaactttgaagatgaggtgatgtacacactcatgagattggcttattttaaagcttaatgccatgatgtcattgcttcccctataccatatacttcatcaaaatttatcgtgacattcaattttaatgtgctagaacactgcatgattcatttggagacttaaccaaagaagtgacattaacaactggtgtcagtgtgtcacagtttccacagataacaatcttttaaatatcacaagatcagaacccctattagttttagaacatgtattgctccttccattttacaaagaataaatcttgctaagacttaggtgaaacctggcctgttgttttcttcagactcttggatcttaacttccttggctaggggttccctttagattctcgagtcttgattttcttactagggccgactatctaatctgttcctccctcctgtaaatgcccttgtccttgcagtgcttccaaattgtgcaccacctttggatccaactttgttgtctgtttttattttgtacctagaaaaatatccttgtacatgatgaccactgtgcagatctgtaggctgtagcctgtagggttactgtcgttaggtttccttgttttagtttggcacatgcacgtgtttgacagtttgagtgaatttactttcttaccacgaacatcttttattcttctgtaactcttattcatatatcttctggaatgcaaatgttatattatcatcaatccttatttattttttctaggttaacaatagaacactaggcagcaaacctgcagctgaattactgaacaagctaaaaccaccatactggttttcggcgcaccttcactgtaagtttcctgctgttatccagcatggcaagaatggacctacaacgaagtttcttgcacttgataagtgcattcctgggcgcaattttttgcagggatgagcagctcgacactcaagaagaccggcaatgggtcaggagcaagttgaatactagaggagctaagccttttgattttgttcagactgcaccatctttcaatccttccagtacaacatctaaacagtccataacagtttgctgcaggaatccacaaactgagtcttttcttcagcttctggaactcccatatctgctggactcatctaaatctgagatgtttggtagaaatgagtcaacttctcagacaggaaacacacttgataatgaagatatagagctaccagatgaagatgaggatgctttagaagatgacgagtgaaggacagcacttttagacaagtaccattgcacctatcatgttggttgcagggtttgcgatagatttcattgtcttttgtagattgcaatctatatatctagacgaggaactaacatgtactagattgtattgtcatagctgcttttttgttggaggacgtttgtggatctagagggtgatctgttgatcacaatgccaactctttggtgtttagttcatacagttttttgaactaactacaattaatcagtagactagatgcatccggtggaaagtgttaacaaaaatatcatctactagcaaggtagagatcagctatatatataaaacatatatttgaa

SEQ ID NO: 218197 - DNA, 2188 bp, Zea Mays
taaacatctatttgtcttcagaaaagggaaagtagtatgaaagattttgaaacggtgttcataattattcacatgctatgtccttagctgaaacaataatgccttcgatgtttatcgcatctaaatcagatatatgcactcagggagtgtttggtttaaataatcactacatccaaattgagtccaaattgaggtggtgagaactgagaagatagtgagaagatgatggactaattcattgctcacaccaaacatcctatcagtaaagttggaaggaagatgacaacacaagtagcaagtaaatggaatccaaacagcttcgacgtctggggccagaggagagcatagcctcgatcgcgtcctctccttcgacaaggccgctatgtcgtcctcgctggagttgaagccccaaggaacttcgccttttctggcgcgcggctgaggagctccttcttgagctgagcgagcgtctgcgtcagcatgccctcaggagaagatgagcaggagcccatgctcgaacgcctcccgctgtgcggccgtgggtggagcagcgccgtcgcggacgggctctcccttcgccgccgccgggtactcggcgctccatccaggcactccagccacccccaccccttcctccgccgccgggtactcggcgctccatccaggcgtccccgccccgcggccgcctgctactcgttcgggcgctccatccagcgttctccctccagctccagtctccggcgcgatgaagatcgcggtggaggggtgcatgcatggggagctggacatagtctatgacacgctgcgaaggctcgaggaggccgagggcgtcaagattgacctcctcctctgctgcggcgatttccaggctgttaggaatgagaacgatttacagtgtgttagcgttccacaaaagtatcgtaccatgaacacattttggaagtactactcaggagaagcagttgctccgtacccaaccatctttattggtggaaaccacgaagcatccaattatctgtgggaattgacactatgagaggcctccatacaataaagatactatacggtctgtgtaccatgtaaggcattatgatgttctcaagctcatgcatttgaaggagccgctagatgtattcttgtcacatgattggcctctgggcattaccgagtatggaaactggcagaagctcattagtgtgaagaagaactttgaagatgaggttaacaatagaacactaggcagcaaacctgcagctgaattactgaacaagctaaaaccaccatactggttttcggcgcaccttcactgtaagtttcctgctgttatccagcatggcaagaatggacctacaacgaagtttcttgcacttgataagtgcattcctgggcgcaattttttgcaggttatagacattccatccaatccaggaccatatgaaatccagtatgatgaagaatggcttgcaataacacgaaaattcaacagtgttttccctttagcacggacacagtttactatgcgggatgagcagctcgacactcaagaagaccggcaatgggtcaggagcaagttgaatactagaggagctaagccttttgattttgttcagactgcaccatctttcaatccttccagtacaacatctaaacagtccataacagtttgctgcaggaatccacaaactgagtcttttcttcagcttctggaactcccatatctgctggactcatctaaatctgagatgtttggtagaaatgagtcaacttctcagacaggaaacacacttgataatgaagatatagagctaccagatgaagatgaggatgctttagaagatgacgagtgaaggacagcacttttagacaagtaccattgcacctatcatgttggttgcagggtttgcgatagatttcattgtcttttgtagattgcaatctatatatctagacgaggaactaacatgtactagattgtattgtcatagctgcttttttgttggaggacgtttgtggatctagagggtgatctgttgatcacaatgccaactctttggtgtttagttcatacagttttttgaactaactacaattaatcagtagactagatgcatccggtggaaagtgttaacaaaaatatcatctactagcaaggtagagatcagctatatatataaaacatatatttgaa

SEQ ID NO: 218198 - DNA, 2024 bp, Zea Mays
gcggtttcgtctgtggtagatcgtagttcaaggagattgcatttgtggatgctctaatggagtcgaaaggtggcaagaagtctagtagtagtagtagtaatttcatgtacgaagctccccttggctacaagatcgaggacgttcgcccagccggaggaatcaagaagttccagactgctgcttattccaactgcgtccgccagccatcctgatatcgcctcacatgcaattcgcggtagagtaggattttaattcagttttcctcttgtgtcggtagttttccgttggctctggctgccttcctctgcttctgagattccaacttgtcttgcccatctctccttttcctctctcatcctctctttcttgcaacacgtcatccagtggcgatgtcttcagcagattcttgtgtctcttctcctgcctcccctattggctttgagggctatgagaagcgcctcgagatcacgttctctgacgcgcctgtctttgaggacccttgtggtcgtggcctgcgcgccctctcccgtgagcagatcgactcgtttctggatctcgcacggtgcaccatagtgtcacagctctccaacgagagcttcgactcatatgttctgtccgagtccagcctctttgtgtatccccacaaggttgttctgaagacctgtgggacgacgaagctgctgctcgccattcctcgcatccttgagcttgctgcagggctgtcactgcctcttctttcagcgaagtactctcgtgggaccttcatcttccccggcgcgcagcccgcgccacaccgcagcttctcggaggaggtatctgtgctgaacgctttctttggtaacctcaagtccggtggcaatgcctacctgatcggtgaaccgttcaagcccaacaagaagtggcatgtctactacgccacagaggagcctgagcgtcctatggtgacgcttgagatgtgcatgacagagcttgacgttaagaaagctgctgtgttcttcaagaactccactggtggcagctgcacttcagctaaagagatgacgaagctctcggggattcatgagatcattcccgagatggagatctgtgactttgagtttgacccctgtgggtactcgatgaatggcgtcttcgggcctgcagcctccaccatccacgtgacacccgaggaaggtttcagctacgcaagctacgaagctatgaacttcgaccccagctcactggtctacagcgatgtgatcaggagggtcctggcaggcttctctccttcggacttctcggtcgcagttaccatctttggtggccgtgggttcgccaaatcatgggcgacgggtgcagacatcgattcctacatgtgcggtgatcctgtagagcaagagcttcctggtggcggtctgctgatgtaccagagctttactgctgttccctctggctctgtatcgccgaggtcgaccttgcagacggatggctggagcagcgatggaatggagatggcctcaaatgacgagatgtgtattggctgctggaatgcggtgaagaaggtggtgaagaaagatttggatgcttaaagatttggataacttaggtggttcttcacctaagttatgaagaagtctgagacctctgtctctctgttcttttggtttcagttaagcagttagctgggctaccggcaatttgtttgcttaatatttttcctgttcaataagtactctggatggcttgctgcgtctgccatagtgagctgcatattgttgtttagtcatattgtttctgctgccgatgcccttgtggggagaatgatcttgtaacagacttgcctattcccgcaatatattggaaattttggttaataatctattggttgtcactcccgctgttgtgattagcacatgtagcacatttcatacttcttttttttttaaatatcttgatattatttttgttgttagtcagtgggtcttcaacgactgatgttattcttgttctcaacagaagccatcaacacgacatgatattattct

SEQ ID NO: 218199 - DNA, 382 bp, Zea Mays
ccgccatcggttcgccattgctgcctccaccgcccccgctccgaggagggccacgaagagaggacagtgcagtggcaatgacattagctcacagcaagcaagaagaggaagcgaagaagctcatggatagcacagacaaaattaagaaaaggttggcagccaaagaagttgaggtgcaggaggccaagagcaccctcgacgccaaggtcatgacgatttgcaacatcgtgtatgagtctatgccattcagtgacgacgaggcaaacaataaaattgtacgggcatttggagagaagagagtagaggataatttgaagaaccatgtggacctttgcaggatgcttgatattgtcgcattggaaaaggacatcttatgatcaag

SEQ ID NO: 218200 - DNA, 3681 bp, Zea Mays
ctcgccaacaccaaccatatacacccgctaaagtaaatggctaaaaatgactacccatactgccatacacccgctaacaccaaccaaccaaactttacatcactgatcactgtgacagtttcagcctttcggtcccggcgacagccatggcggacgcgggggtgacgggggtgctggccaagctgggtgagctggcggcggaggaggcgacggcgctgctgcgcgtggacgccgagatccgggcgttgcggcggaagctggcctacctgcaggcgctcgtacgcggggccgaccgccagcgccgcggccgcgcaagcgagctgctcctgctctggctgcgcgagaccagagaggttgctttcgaggttgaggacgccgtcgatgagttccacctccgcgtcgaggcctgccgccccggggcccggtggcgccggcgccgcagatggtggtggggctggcaccgcgacgccgtcagcctcgtccaggacctcgccacgcagttttttgtacgtcatgggctgtcaaatcaaatatctaagatcaatgaaaggattgatgagcttaaccagaacaaggaaacatatcaaattgaaagttctccttctgaaatttggagttcttcatcggttgaaatggatcctgagtggtacgaagataaatatgttataggctctagagaacgtgaatttgctatccttaaggacctaatcatcaacaaagagggagatatgcctcaccgggctgtcatctctatttttggggagcgtggcattggaaagactacacttgcaaaacaactgtacaatgacccagatatcataaaacactttgaggtccatgcatgggtatgtcttccaccacatgtcaggttcagggactatgttgagattatgcacatgcaggtcaacccacagattccagaagcttctgagaaaaatgataatacaacatttgcactcggtaacgaagaaaccactgatatggaattcaaccttcggcagaaccttgagaacaggaggtacctagttgttcttgatggtttagtcagcattagtgactggaactcattatttgctgtgctgccacataccaatgccaatggcagccggatcttacttaccacacatctcaatgtgaaggaaatcaatcacatcgacccacagatagctcctgtcaagcttccttatcttgacgaaaaacatggagaggagttattttgtcaaagagtttttgggacaatagaacctccacaaatttataggagcaaggtttactataaaaaagttcacaatatatcaacaggtctacccctggcaattactgtgcttgcaggaatattacgatcaaagtttatccccatggagtgggatgtcatattcgaacaactcgagtccaatggccagccaaaaccggttagaagcatatggtctttggcttttgatgacttgccacactacctcaagtcatgtttcctatacttggcgtccgtttcagaaaatgttattctttacccagatcgtttggtgcgtctgtggattgctgaaggttttgttatgcccaagaaagcagaaacactggaggacgttgggtttgactatctaaaagaactggtcgcgagagggttagtccaggtcgtgcagaaggatgctggtggatccatcaagctggtagccatccacaatctgctccatgcttttgtggagtctgaagcacaggactctagtttccttgaaatccaccatcatgctaatgttgtaaacccaaatgcagtgcggcgccttgccatacaaaactatgtggatgcatatgtccacattcctaatgtgttccccaagctgcgttcgcttctctgtgattttgcagaagaccaacaacgcggtagctcaagctctggagagctgcaacctcagtcgttatggggcaatcttgcagagttgtgttcaagagcctgtggcacttcggagaatgttggctcaagcacattgcatgggctccacttcttacagggctccaggtacctacgagttgttgacctgtatggtcttaagacgcgaaagctgccagatgagatcggcagcataatccacttgaggtaccttggcatcaggaacagcaacctggtggaactcccctcatccatctacaagcttgacagtctccagacgttggatgtaaggaaaacaaacgtggcgaaagccgtcgatgagttctgggacatcgaagcactacggcatgtgctcgccgagaaaatgattttgcccgattgctcagtagttcccttgaataatttgatgacactcaacggtgtggtgccttgtggtccgtgggatgaaaagagctgccccttgaacagtatgatttatctccgatccttgtccctgtctgacatttcagcagcccataccgccgcgctttcagcagctctgaggaaaatggaattccttttgtacctgaacctgtcaggtgaatttctcccgtccagcatgttcaccagctcaagcatgcgccgtctccagaccctcatcctgcatggtaagttacaagggattaatgatctgccgagcgacgaccgctatgtcctaccaaaccttaccatgctctatttgcatggatctgaggtgtctcagcagtttgtgcacaagcttggtacgcttccgtgccttgttgagatggagctgtcagctgtttcgtacagtgagggtgagatgaaactgttcttggacggattcccaagcctagcaaggctgaagctcaagaacgtgtctatgttacaggaggtagagatacgtggaggggccatgccaatgctttccatcctagccatgtatgattgcgacagcttgaagaccttcaagaacctgaatagcttggaacaccttcaagaagtggcgatctacaatacgccgccggagattgttgataacataaagcttgaggacgagaagcttttcagcaagatcaaactcctgactaaccccatgatgacagcagaccgagactttccaggtcatgttgtcagaatgagaattaaaatgttggatgaaccggctcatgatctacgtgtcgcagtggcctctgaaccacattgcagtgacatggagggtgattatcatggtgaaaggaaagcaacagaccaagtacactacggccctggtctgttataaataaatattggagttggtcaataattcaggaaaaatctgcagtgttttgcagcacataataattgtttgtgagtagcagccagtgatcggcggccgggagagcagcgaccccccgaaaaaaaaagtcactagtaagaaatgttatgctatcgtggcataacatgttgttatcattttccttttcgttctgaacttgttaaatgtttcctgccctcaagtttgtttcgaataagatcactggtggtgccctgtatcccagttttcaggttctagtttggatattacagtcttaattatcttttcagtttggacattgtaataagaatcatgaacttgtcaactttgaaaggctctgatcactggtggtgctctgtatcccatgttgaactattagacattttctagattaattttcgaatataaatcatgaccgtcaaatcatatgatgcgtactgatcagacatactggtagacgacgtgggtgggtggttcttcacactttctcctctcttccatg

SEQ ID NO: 218201 - DNA, 2774 bp, Zea Mays
ctcacacactccactgctcccctcctttttccttcaaatcctcccaacaccacccagggagacaaccacccccgccgcaatggacaagattgagacgacgacgaggaggaggaggaaagggagaagcagcagccgccgccgccgccagggggcacggggaccggcgggcctcgtagccacggccttggccctcctctgcgcctgcgccttctccacgcctgccgccacggctctcaccccggacggcgaggcgttgctggagctcaagctggccttcaacgccaccgtgcatcatcggctcaccagctggcggcgcagcgaccccaacccctgtgtctgggagggcatctcctgctccgtccccgacctcagggtacaatccataaatctcccatacatgcagcttgggggcatcatttcgcccagcatcgggaggctggacaagctgcagagacagctctgcaccagaacagcttgcacggcccaatccccgcagagatcaagaactgcaccgagctcagggcaatttacctgagagccaactacctgcaaggaggtatcccttcggagattggcgagctcgtgcacctcaccatcttggacctgtcaagcaatctgttgaggggaacgataccggcctccatcggaagcctcactcaccttcgcttcctacccaggcccgttgtgtgcattgaccatgaacgagtatgcgattggttgcctgtgccatccgaacgcagcctgcacgcgcggaaacaggccaggcgttttttcagccctcagcctgcacgcgcggagacacagaaaagacgcttctccggtcgcccaggccggcgtgggcgtggctcgcattggcactgcaaccaatcacgtagtatgtatctcccaggaacctgtctactaatttcttctccggagagatcccaaatgtcggtgtcctcggagccttcaaaagcagctcgttcgttggaaatctggagctctgtggcctgtccatccagaaagcttgccgtggaaccctcggctttcctgccgtgctgccccactccgatccgctctcttcagctggcggtgtctctccaatcagtaacaacaacaagaagacatcgcgctttctgaatggcgtcgtgatcggctcgatgtcaaccttggctcttgccctgatcgctgtgctcggattcctgtggatctgcttgctgtccaggaagaagagcgtcggtggaaactacgtaaagatggacaagaaaactgttcctgacggcgcgaagcttgtgacgtaccagtggaaccttccgtactcgtcgagtgagatcattagaaggctggagctgcttgacgaagaggatgtggttggctgcgggggcttcggcacggtgtacagaatggtgatggacgatggcacgtcgttcgccgtcaagaggattgatctcagccgccaaagccgcgacaggaccatggagaaggagctcgagttcctgggcagcatcaggcacataaatcttgtcactttgcgaggctactgccggctgctccctgcagcaaagctactcgtatacgatttcgttgagctgggcagcttggactgctaccttcatggagatggacaagaggaccagccgttgaactggaacgcgcgtatgaagatcgcccttggctcggctcgaggcctggcatatctgcaccatgattgctcgcctgggatcgtgcacagggacatcaaggccagcaatatcctgctggacagaagcttggagcctcgtgtctctgattttggacttgcaaagctgcttgtagacaatgccgccgcccatgttaccactgttgtggcgggcacctttggatacctagcaccagagtacttgcaaaacgggcatgctactgagaaatcagacgtgtatagctttggagtgcttttgctggagctagtgacgggaaagaggccaaccgattcatgcttcatcaagaagggactgaacattgttggctggctgaacaccctgacgggggagcaccggctggaggatatcgttgacgagcgatgcggcgacgtcgaggtggaagccgtggaagccatcctggacatcgcagcgatgtgcaccgacgcagacccggcgcagcggccgtccatgagcgctgtcctcaagatgctggaggaagagatcctgtccccctgcatgagcgagctgtgctacgagcagcacctggagctctgagccgaggaagcctgacctgactacgatgcagtgcatgatggatgagactgtgtaggaaacaaaagttttgtagatatgacgatgatgaaccgcgtacgtagtgtaggtgtttgtgagcagctcaaaagtaggacaagtgcagaaccaacaacctgatcggcacgttacatacatagatcttctctctgtctgtcttctaatcctttttggcctttttgttctcagttttctttggacggccgtattctgtagatgagctgggaaacagtgaacggcattgagacctgagaatgaataccagagcaggacaaaataacaacagcagagggtgtttcggtataaaaagaaagacggtttaaagaaaactgatttttacaatgtccaaaccgaaaggacagttaagactgcaatatctaaactagaacctgataactgggatacagagcaccaccagtgaccagagcattgcaaagttgacgagtgaaggtaatacttgtccatacatgatgtaccagcatgtgagccttgcaaagttgacaagttcatgattcttattacaat

SEQ ID NO: 218202 - DNA, 2810 bp, Zea Mays
ctacttgccattgggataaaggccaactcggtcactgcgctccttctccttccttctctcacacactccactgctcccctcctttttccttcaaatcctcccaacaccacccagggagacaaccacccccgccgcaatggacaagattgagacgacgacgaggaggaggaggaaagggagaagcagcagccgccgccgccgccagggggcacggggaccggcgggcctcgtagccacggccttggccctcctctgcgcctgcgccttctccacgcctgccgccacggctctcaccccggacggcgaggcgttgctggagctcaagctggccttcaacgccaccgtgcatcatcggctcaccagctggcggcgcagcgaccccaacccctgtgtctgggagggcatctcctgctccgtccccgacctcagggtacaatccataaatctcccatacatgcagcttgggggcatcatttcgcccagcatcgggaggctggacaagctgcagagactagctctgcaccagaacagcttgcacggcccaatccccgcagagatcaagaactgcaccgagctcagggcaatgaggtatcccttcggagattggcgagctcgtgcacctcaccatcttggacctgtcaagcaatctgttgaggggaacgataccggcctccatcggaagcctcactcaccttcgcttcctccagacccaggcccgttgtgtgcattgaccatgaacgagtatgcgattggttgcctgtgccatccgaacgcagcctgcacgcgcggaaacaggccaggcgttttttcagccctcagcctgcacgcgcggagacacagaaaagacgcttctccggtcgcccaggccggcgtgggcgtggctcgcattggcactgcaaccaatcacgtagtatgtatctcccaggaacctgtctactaatttcttctccggagagatcccaaatgtcggtgtcctcggagccttcaaaagcagctcgttcgttggaaatctggagctctgtggcctgtccatccagaaagcttgccgtggaaccctcggctttcctgccgtgctgccccactccgatccgctctcttcagctggcggtgtctctccaatcagtaacaacaacaagaagacatcgcgctttctgaatggcgtcgtgatcggctcgatgtcaaccttggctcttgccctgatcgctgtgctcggattcctgtggatctgcttgctgtccaggaagaagagcgtcggtggaaactacgtaaagatggacaagaaaactgttcctgacggcgcgaagcttgtgacgtaccagtggaaccttccgtactcgtcgagtgagatcattagaaggctggagctgcttgacgaagaggatgtggttggctgcgggggcttcggcacggtgtacagaatggtgatggacgatggcacgtcgttcgccgtcaagaggattgatctcagccgccaaagccgcgacaggaccatggagaaggagctcgagttcctgggcagcatcaggcacataaatcttgtcactttgcgaggctactgccggctgctccctgcagcaaagctactcgtatacgatttcgttgagctgggcagcttggactgctaccttcatggagatggacaagaggaccagccgttgaactggaacgcgcgtatgaagatcgcccttggctcggctcgaggcctggcatatctgcaccatgattgctcgcctgggatcgtgcacagggacatcaaggccagcaatatcctgctggacagaagcttggagcctcgtgtctctgattttggacttgcaaagctgcttgtagacaatgccgccgcccatgttaccactgttgtggcgggcacctttggatacctagcaccagagtacttgcaaaacgggcatgctactgagaaatcagacgtgtatagctttggagtgcttttgctggagctagtgacgggaaagaggccaaccgattcatgcttcatcaagaagggactgaacattgttggctggctgaacaccctgacgggggagcaccggctggaggatatcgttgacgagcgatgcggcgacgtcgaggtggaagccgtggaagccatcctggacatcgcagcgatgtgcaccgacgcagacccggcgcagcggccgtccatgagcgctgtcctcaagatgctggaggaagagatcctgtccccctgcatgagcgagctgtgctacgagcagcacctggagctctgagccgaggaagcctgacctgactacgatgcagtgcatgatggatgagactgtgtaggaaacaaaagttttgtagatatgacgatgatgaaccgcgtacgtagtgtaggtgtttgtgagcagctcaaaagtaggacaagtgcagaaccaacaacctgatcggcacgttacatacatagatcttctctctgtctgtcttctaatcctttttggcctttttgttctcagttttctttggacggccgtattctgtagatgagctgggaaacagtgaacggcattgagacctgagaatgaataccagagcaggacaaaataacaacagcagagggtgtttcggtataaaaagaaagacggtttaaagaaaactgatttttacaatgtccaaaccgaaaggacagttaagactgcaatatctaaactagaacctgataactgggatacagagcaccaccagtgaccagagcattgcaaagttgacgagtgaaggtaatacttgtccatacatgatgtaccagcatgtgagccttgcaaagttgacaagttcatgattcttattacaat

SEQ ID NO: 218203 - DNA, 3857 bp, Zea Mays
gagccagaggtagtaaatttcggtttctaccaccacttttgctcacctttgttgttgccttgtgtgcgggtgttggtggtgctacttgtttcagtactgttcttcattatgggtgacatagtggtcttcatatttatatccaggttgctttccttatataccgcccagtgatgcggctttttaagagcactaatggaggtgacacttgttggcctcttgatgataacgaggaaggagaatctgtatcatctgatgatcttatcttacatcttgactcgtttcaggaaccaatcatgtggtcagatcttcttaacgcagtccagtcaattttgccagcaaaagcttggaacagtctttcaccagacctatatgctgctttctggggcttaacactctatgatcttcactttccaaaagaccgttatgatacagaaatcaagaagctgcacgagaatctcaaacaattggaggacaactcagataattctagcattgcaatttcaagacgtaagaaggacaaggagagaatccaagatttacttgacagactgaacagtgaatctcagaagcaccagcagcacgttgcatctgtggtccaaaggttagctcgtgaaaaggataagtggttgagctccagtccggatgcaatgaaaatcaacatggaattcttgcagcgctgcatattcccacgatgtgtttttagtatgcaagatgcagtgtattgtgctacatttgtccaaacactacactcccttgggactcccttctttaacacagtcaatcatatcgatgttcttgtctgtaaaaccctacagccaatgatatgctgttgcacagaatttgaagctggcaggcttggaagattttttcatgatacgttgaagatggcctactattggaagagtgatgaatctgtctatgagcgtgaatgtgcgaacaaacctggttttgcagtgtacttcagatacccaaacagccagcgtgtgtcctacagtcagtttgttcgggttcattggaagtggagttcaagaatcaccaaagcacttaatcaatgtatggaatcaaaagaatacatggaaattcgaaatgcccttattgtccttacgaagatttctagtgtcttcccggtgattcgtaaaagtggtgtcaatcttgagaaacgggtggctaaactaaaaggggatgaaagagaagatcttaaagttctagccactggtgtagctgctgctttagctgctcgcaagagttcttggctatctgaagaagagtttggcgggggtcacattgatctgaagccagcaacagcaagatctgtgcttggaaaccagtcagcagatctctcgatggcaaaagatcaaaatgcccgtgcaaagtctgtagagaataggcatgaaaggtcagagggtgctatgaagcctgacgttcagcaaaagaagagcactgtggcttcaaatggatctgatattctaatacaatcttcctccgtacaagggaaatcttcagtggttgcacgtgcaatggatgagcctccaaaacctgtgtctgatgagggggttaaagtttctacaaaatctacttcagaatttgagacaagggcaacacaaaagcgtgctggcaatgctgggaaggtaatgaagcatgatgttgcaaaggaagatgcaaaagctgggaaacctacaagctggaatgtaaatcaacaagtctccactgttgatagagaagtgtctcatgcagctgatgctgcccaagaaaccagtaccactattagcaatggtaacttgcatccagcgccgcataaggtttcatcatcttctcaaagaaatgcagttacacataatggagcagccaatccctctgttgagtctactgatatgattgactctcctgtgagacagcaaaaaagaccgccggttgaggagcaagatagatcaggtaaacggaggaagggagaaaatgaacccgatttgagtgaacaccatgtagacaaggaaaagagtttggactcacgtggtggagataagtttcgttcagtggatcatgagaagagtgctaatgaggaacaaaatttaagagcgggcaaaataaaagaaaaatctgatgataaatatgacagagatcctagggaaaaattagatcggggtgaaaggcgtcgtggggaagatgccattgagagatcaacagatagattgtcggacaggagagaacgttccattgaaaggatgcaagagagaggtacagataaagcccttgaaaaaggtagagaggatagaaataaggatgagaggaataaagttaaatatgctgaaccttcggtggaccggacacattcttctgatgaacgattccgagggcaaagtttgccaccgcccccacctcttcccgcaagttttgtaccccaatcagttggcgccaaccgacgtgaagaagatgctgaccgaaggggtgggagctccaggcatgttcaaaggtcatctcctaggcacgatgagaaagaaaggaggcagtcagaggagaatatttcgtcatttcaggatgatgggaagcacagaagagaggaagatattcgtgatagaaagcgtgaggacagggatactttatcaaacaaggtagatgacagggatagggaaaaggggacttctttgaaagaagacagtgatcctagtaatgtttctaaacggagaaagatcaagcgagaacagactttagaagctggggaatatgcaccttctgctccacagcctccctcccatggatctggcagctcacaattgtctgacatacgagaaagagaaaggaaaggggtaatttcacagcatcgtatttcacacgctgatgaccttcctaggacacatggcaaggacatgacaagcaagtcaagtcgtcgagagtctgaccaataggaataaggtgaaaaatcatacccagaaccataccattctgagctgttgggcggtacatcatcatcatccactggctgcagtagcacttgatgtttggagagtgggtcatgatcataagagcacctgcggaggcaacagagagattaaggatgtgaagcagatggagcaggatcaatgggggtagagctgggcattggttggggatcagttggggaaagagggtctctccgcccaggataatgatgcaggggaggacgattgtgcatgctcattgtcatggatggctcggggtgagggaggcgaaggtggccaggagaaaagcacactggatcctgctgtggtgcaaaatgaagcccctggtccatggaaatgacatgggtgccccaacacagtatgggtgttttcttgtcctgttggagcccgagaaacatttctcaggggagaaacaatatctacctatcttctttaactgtttttccacgtcagcaaaacatctatatggcaagataatcaatgttatggaaactaccatcgacacttttgggactgtcctaagaagcctcaaactaggccaatatgacaagttcttgtacagaagatttgcaaagaaagaacaaaaactatgaccaacgatccacatatccaactcattatcaaatgccctcgagaactttggctcttgccatacaccatagatggcctcatctctaatgtttaggtgttaagactagggctgtgatgagaccttgatgaacttctcactaaaatgatgtatctttagccaaatgttggttgctgtagtagttttggtaggaaattgcccaattttccatctaccatggcaatgatgagtggggccttgactggtggtaaccgcatgtcatgcggtgtttttggcaagccctggctttgtcgttactcgtactagatttgaaagcaaacccctctgcaacagca

SEQ ID NO: 218204 - DNA, 2743 bp, Zea Mays
catatttatatccaggttgctttccttatataccgcccagtgatgcggctttttaagagcactaatggaggtgacacttgttggcctcttgatgataacgaggaaggagaatctgtatcatctgatgatcttatcttacatcttgactcgtttcaggaaccaatcatgtggtcagatcttcttaacgcagtccagtcaattttgccagcaaaagcttggaacagtctttcaccagacctatatgctgctttctggggcttaacactctatgatcttcactttccaaaagaccgttatgatacagaaatcaagaagctgcacgagaatctcaaacaattggaggacaactcagataattctagcattgcaatttcaagacgtaagaaggacaaggagagaatccaagatttacttgacagactgaacagtgaatctcagaagcaccagcagcacgttgcatctgtggtccaaaggttagctcgtgaaaaggataagtggttgagctccagtccggatgcaatgaaaatcaacatggaattcttgcagcgctgcatattcccacgatgtgtttttagtatgcaagatgcagtgtattgtgctacatttgtccaaacactacactcccttgggactcccttctttaacacagtcaatcatatcgatgttcttgtctgtaaaaccctacagccaatgatatgctgttgcacagaatttgaagctggcaggcttggaagattttttcatgatacgttgaagatggcctactattggaagagtgatgaatctgtctatgagcgtgaatgtgcgaacaaacctggttttgcagtgtacttcagatacccaaacagccagcgtgtgtcctacagtcagtttgttcgggttcattggaagtggagttcaagaatcaccaaagcacttaatcaatgtatggaatcaaaagaatacatggaaattcgaaatgcccttattgtccttacgaagatttctagtgtcttcccggtgattcgtaaaagtggtgtcaatcttgagaaacgggtggctaaactaaaaggggatgaaagagaagatcttaaagttctagccactggtgtagctgctgctttagctgctcgcaagagttcttggctatctgaagaagagtttggcgggggtcacattgatctgaagccagcaacagcaagatctgtgcttggaaaccagtcagcagatctctcgatggcaaaagatcaaaatgcccgtgcaaagtctgtagagaataggcatgaaagtggttgcacgtgcaatggatgagcctccaaaacctgtgtctgatgagggggttaaagtttctacaaaatctacttcagaatttgagacaagggcaacacaaaagcgtgctggcaatgctgggaaggtaatgaagcatgatgttgcaaaggaagatgcaaaagctgggaaacctacaagctggaatgtaaatcaacaagtctccactgttgatagagaagtgtctcatgcagctgatgctgcccaagaaaccagtaccactattagcaatgcaaaaaagaccgccggttgaggagcaagatagatcaggtaaacggaggaagggagaaaatgaacccgatttgagtgaacaccatgtagacaaggaaaagagtttggactcacgtggtggagataagtttcgttcagtggatcatgagaagagtgctaatgaggaacaaaatttaagagcgggcaaaataaaagaaaaatctgatgataaatatgacagagatcctagggaaaaattagatcggggtgaaaggcgtcgtggggaagatgccattgagagatcaacagatagattgtcggacaggagagaacgttccattgaaaggatgcaagagagaggtacagataaagcccttgaaaaaggtagagaggatagaaataaggatgagaggaataaagttaaatatgctgaaccttcggtggaccggacacattcttctgatgaacgattccgagggcaaagtttgccaccgcccccacctcttcccgcaagttttgtaccccaatcagttggcgccaaccgacgtgaagaagatgctgaccgaaggggtgggagctccaggcatgttcaaaggtcatctcctaggcacgatgagaaagaaaggaggcagtcagaggagaatatttcgtcatttcaggatgatgggaagcacagaagagaggaagatattcgtgatagaaagcgtgaggacagggatactttatcaaacaaggtagatgacagggatagggaaaaggggacttctttgaaagaagacagtgatcctagtaatgtttctaaacggagaaagatcaagcgagaacagactttagaagctggggaatatgcaccttctgctccacagcctccctcccatggatctggcagctcacaattgtctgacatacgagaaagagaaaggaaaggggtaatttcacagcatcgtatttcacacgctgatgaccttcctaggacacatggcaaggacatgacaagcaagtcaagtcgtcgagagtctgaccagtgagtttaataaagaatattttttttgttcaaatgtgcactgcgcagttcctaacaaaaatcttttccactttgcgatttgctctttgttttctgttttcttggtttgttggattttgttgacaaaatcaaagtcataatatcttagctttgattacattctcacaaaaaaactcgaactgggggataagaaagcaccccaga

SEQ ID NO: 218205 - DNA, 623 bp, Zea Mays
gtccaattaatatgtgatgattctaacatattcaagtggactgctcttatcaagggcccttctgaaacaccttatgaaggtggtgtgtttcaacttgcattcgcaattccagagcagtatcctctgctgcctcctcaagttcgatttttgaccaaaactttccacccaaatgtgcatttcaaggtgagatttgtctggatatattgaagaatgcatggagccctgcatggacccttcagtctgtttgtagagcgataattgctctgatggcccaccctgaaccagacaacccacttaattgtgattcaggcaatctcctgcggtccggtgatattagaggctatcaatcaatggcccgcatgtatacaaggctggcggccatgccaaagaaaggttagctgtagaacatgtgccaagccaagagcctattgtccatgcatggctacatgttgtcaggtctgccttgtgctgtctgtatgaactttgtggttcttgattcatgaaatcctaaccgttcgtgtgttgcgtgtgtgtctggggtaatgagaggacactcgggttcttgatggtgttggtctgtgatgtatttagtaataagaaaataaaaaatgatttctcgataa

SEQ ID NO: 218206 - DNA, 2052 bp, Zea Mays
aaaaatgttgccgcgtgctcgctctctccatctcaggtctcagctcagcgcatcgaatctggagtccaagcccgacccgcagcccgcagcccgtctcgcctcgcgctcgcgaaggcttcctttcctccccctttccgtccaaagtctccaagatggagtacccccaccagcaggcgggcccttcctccacgaccatcaccctcatctgtccgtacgcgactcgccgcaggaagagggccgcgggcgacgacctctcgtcggcggtggacatggatgtcgacgccgacgcgcagcgcgccacggacaagctgaaagcagtgtcagaggcacttgggcatgagatccgggttttttcaagtgagaactttgcttcacaaaccagcaagttgcctagtgcagatcatgaggaagatgacgacttttatgagcttcagcctgctgattactacaacttgatttcaaacaggatgggagagcactttaaaatgctgaagactcgcaagatgcgggaagcagaacttgctgctcagcgagcaaagagaacaaaaacagtaatgagggtgcgtttcccggatggctacatccttgaggctgactttattccatcagagaggatacatagtctagtggacctgctcttgaaagtacttgctagaccagatctgccattctatctttatacagtacctccaaagaagcgaatactggacacatcacaggacttctatacagctggttttgtccctggggctaatgttcatttttcttatgatctccctgaaggtatgcatcatcataatgactcatgccaagttaagaaataaacaacaattacctctcagctgtatgtttcaaatatatggtgtaatttaacagaggtcaattccagtgccatgcttttctcctcaccccatccgcacacgcagaaatacatgcaaatacatgaaataatttgtcactggtggtgcctatgtcaaattatttatttcgcccctgttagtctgatactatacaagagtatcatggttgtcactttgttagacatttagatactcatgagttcttgacttcttgcaatgagttgtatcaaatgttttggacctgcagtttcgttgttaaatgcagatgatctaaaagcaggaccctttctccgcgaagaaattctaagtttggatggattgtcacttctgctgaaacctgctagtcaacctgatgattctagaatgaactcttcttctcttcaatctgatgcatctcaatctgttcctgtaccaacaacaacaaataagaagcctggcagaccaaagtggctgaaaaggtgataccactccaggtgtcaagtgtgtgccatcaacacagaatcactctgttaggcttctaaacactattaatggccgaacaagctcaaatctgaacaggctacactgctgtagtacaagaattggatcctctgcttacagaagctgcaggggcattagaaatagaatcccaccttttttttctaggtgggagccaagtagcatgtaaatttgaatgtgtcgcgactcatcaagtcatcagaacagtgctccgctgtggctaagcactttgtcatcttacatttcgtgtgaaccccataggaagctagaaacggcggagataatagtccagtgctgttaacgcttcacggtgcaatgccatgcctgtcttcactattcagtcttgacaacaatatatttcagaaaactgaaagtgcccgaggtagctggaatataccaagtgagtgtggcttccaccatggcaactttattcgggtctcatacccatctctctcgatgcgattactatcacattacgtggtagtcccttggtaaaaggatctgccatatttttatctgttgaaatataagtcacacttataactccggagtttctcaactttctgacagacttcaatcgtcttttgacatgtcttgatgactttccattatccttagaactcgtcactttagcgatcactgtctgattgtcacagttcataaggatagctggtattggtttctcaaccaccgg

SEQ ID NO: 218207 - DNA, 1659 bp, Zea Mays
gtctcagctcagcgcatcgaatctggagtccaagcccgacccgcagcccgcagcccgtctcgcctcgcgctcgcgaaggcttcctttcctccccctttccgtccaaagtctccaagatggagtacccccaccagcaggcgggcccttcctccacgaccatcaccctcatctgtccgtacgcgactcgccgcaggaagagggccgcgggcgacgacctctcgtcggcggtggacatggatgtcgacgccgacgcgcagcgcgccacggacaagctgaaagcagtgtcagaggcacttgggcatgagatccgggttttttcaagtgagaactttgcttcacaaaccagcaagttgcctagtgcagatcatgaggaagatgacgacttttatgagcttcagcctgctgattactacaacttgatttcaaacaggatgggagagcactttaaaatgctgaagactcgcaagatgcgggaagcagaacttgctgctcagcgagcaaagagaacaaaaacagtaatgagggtgcgtttcccggatggctacatccttgaggctgactttattccatcagagaggatacatagtctagtggacctgctcttgaaagtacttgctagaccagatctgccattctatctttatacagtacctccaaagaagcgaatactggacacatcacaggacttctatacagctggttttgtccctggggctaatgttcatttttcttatgatctccctgaaggaccctttctccgcgaagaaattctaagtttggatggattgtcacttctgctgaaacctgctagtcaacctgatgattctagaatgaactcttcttctcttcaatctgatgcatctcaatctgttcctgtaccaacaacaacaaataagaagcctggcagaccaaagtggctgaaaaggtgataccactccaggtgtcaagtgtgtgccatcaacacagaatcactctgttaggcttctaaacactattaatggccgaacaagctcaaatctgaacaggctacactgctgtagtacaagaattggatcctctgcttacagaagctgcaggggcattagaaatagaatcccaccttttttttctaggtgggagccaagtagcatgtaaatttgaatgtgtcgcgactcatcaagtcatcagaacagtgctccgctgtggctaagcactttgtcatcttacatttcgtgtgaaccccataggaagctagaaacggcggagataatagtccagtgctgttaacgcttcacggtgcaatgccatgcctgtcttcactattcagtcttgacaacaatatatttcagaaaactgaaagtgcccgaggtagctggaatataccaagtgagtgtggcttccaccatggcaactttattcgggtctcatacccatctctctcgatgcgattactatcacattacgtggtagtcccttggtaaaaggatctgccatatttttatctgttgaaatataagtcacacttataactccggagtttctcaactttctgacagacttcaatcgtcttttgacatgtcttgatgactttccattatccttagaactcgtcactttagcgatcactgtctgattgtcacagttcataaggatagctggtattggtttctcaaccaccgg

SEQ ID NO: 218208 - DNA, 1496 bp, Zea Mays
cttgggcagggttcttggataatttcgggttcgcgccggccctagggtccggagttccgaatttgtgtgtgacaagctgaaagcagtgtcagaggcacttgggcatgagatccgggttttttcaagtgagaactttgcttcacaaaccagcaagttgcctagtgcagatcatgaggaagatgacgacttttatgagcttcagcctgctgattactacaacttgatttcaaacaggatgggagagcactttaaaatgctgaagactcgcaagatgcgggaagcagaacttgctgctcagcgagcaaagagaacaaaaacagtaatgagggtgcgtttcccggatggctacatccttgaggctgactttattccatcagagaggatacatagtctagtggacctgctcttgaaagtacttgctagaccagatctgccattctatctttatacagtacctccaaagaagcgaatactggacacatcacaggacttctatacagctggttttgtccctggggctaatgttcatttttcttatgatctccctgaagtttcgttgttaaatgcagatgatctaaaagcaggaccctttctccgcgaagaaattctaagtttggatggattgtcacttctgctgaaacctgctagtcaacctgatgattctagaatgaactcttcttctcttcaatctgatgcatctcaatctgttcctgtaccaacaacaacaaataagaagcctggcagaccaaagtggctgaaaaggtgataccactccaggtgtcaagtgtgtgccatcaacacagaatcactctgttaggcttctaaacactattaatggccgaacaagctcaaatctgaacaggctacactgctgtagtacaagaattggatcctctgcttacagaagctgcaggggcattagaaatagaatcccaccttttttttctaggtgggagccaagtagcatgtaaatttgaatgtgtcgcgactcatcaagtcatcagaacagtgctccgctgtggctaagcactttgtcatcttacatttcgtgtgaaccccataggaagctagaaacggcggagataatagtccagtgctgttaacgcttcacggtgcaatgccatgcctgtcttcactattcagtcttgacaacaatatatttcagaaaactgaaagtgcccgaggtagctggaatataccaagtgagtgtggcttccaccatggcaactttattcgggtctcatacccatctctctcgatgcgattactatcacattacgtggtagtcccttggtaaaaggatctgccatatttttatctgttgaaatataagtcacacttataactccggagtttctcaactttctgacagacttcaatcgtcttttgacatgtcttgatgactttccattatccttagaactcgtcactttagcgatcactgtctgattgtcacagttcataaggatagctggtattggtttctcaaccaccgg

SEQ ID NO: 218209 - DNA, 979 bp, Zea Mays
gatgaagtaatattttattgtttattttagaaatatatcgagataaatctcaatcaatatattgattatttctaggaaacacatgccgctatgagggcaccattatcgagtacatctcatatgtaatctaaaagatggcacctccaacgatgggttgctgccacaacaaggcagggttcatcaaagagaactggttgtatggcagcaattgttgctgctgtaggaaggcaacgaccaatgggttagccaccgctagtggattaagtaactgttgtcgctgttgtaggtacgcagcagagttcgacacagtcagttggttgaatggaagcagctgttgcaagtaggcagcagggtttgccacagctagctgagtcagagctggtacaatctgttgcagcaactgttgttgcaggtatgtaggtgcattaaccacagcgagagggctagatgaaatcagttgttgctgttgtaggtaggcggcagggttcaccatggctagttgactgagcgctggtagaaactgttgcaattgttgttgttgttggtatgcaactatgtttgccagagcaagtgggttggatgcaagcaactgctgttgcaagtaggcgacagggttcaccacagctagttggctcagtgctggtagaaattgttgttgctgttgcgttgcgatggtttgtatggttagatgtgccaaggattgttgttgtaattgggcaattggttgttgtaagacgctcgccgcaagcgcttgttgtagcctgtaggcttgcacagctgggtgttcgaagcccattgaagtaactggagggaggaactgtggaataatggcactaggagcaagtgagcattgtggaataatgaacgcatttgttgcgctcacaaaaagggcaagaagcgcaaggagggataatatcttggtagccattgttgttaggtcgttgctagtgcgcttccctaggtgtgtttctgaatgctc

SEQ ID NO: 218210 - DNA, 1215 bp, Zea Mays
ctttgatttaagctcatgggactcacccaattgccctctgagcttatccggctcatttctgctttcccttatacaggtggcggaggacacacttacctctccgagcctctatggtgggcgggaatgaccacaatgctgcttggggaggtcgcaaacttcattgcttacatatttgcgccggctgtactcgtgactccacttggggcgttaagcataatcgtaagttcagtgttggcgcactttgtgctcaaggagcggcttgagaagctcggggtccttggctgtgtgtcgtgcatagtaggttcagttgttgttgtcatgcatgctcctgaagagcatatgcctaactctgtcaaggaaatctggaacctagctactcaaccagggtttctagcatatgtggtgacagcattgttacttgtgggagcgctagtactcttctttgaacctcgatacggtcagactaacatcctgatatatctgggtatctgctcttcaatgggatcgctaacggtcgttagcatcaaagccattggtgttgccataaagcttacgttggatggggtgaatcaggctgcttatccatacacatggctttttcttatggttgcaattgtttgtggggtttctcaaataaattacctgaacaaggcattggatacctttaatctggctattgtctctcctatatattatgtaatgtttactacccttacaatagtggcaagtggaattatgtttaaggactgggctggtcaaagcttaagtagtattgcttctgaattatgcggcctgataaccatcctttctgggacaattttgttgcacacagcagaggagggagccaacaattctgcagctttgttgccttggcctttggataaagggtctatatcatggtgtatcaacttaagcagtgacaatcttctaaagaatgtcgaagaggactacttcacagctctgcaaagttcacctgccccagtataatgaagaaactgataaatatctaaaagggaacatgcaaatcaaggtgtaaatcttaacagtgccagaaatctggcagttttgggatagaacttctccattgtttgttcaaggcaagcagaattatcgcctgcatgttgtattttgtataaatgttcatcctttaactaaaactcagaagtgaagattgatatatctagctgctgtgttctacgttctcgaatggtttcg

SEQ ID NO: 218211 - DNA, 1844 bp, Zea Mays
acggatttcgcttcagcacagatggtttttgatgctgctttgagaacatgtgggcagaaggaagtgctctattgcttaatgtgcactgaactctctacctatggtaaatggattgaagccaagaacattctagaaatggcacttgaaatgagggtctctatccagagtttcccatataagcagataatttcagggctctgtgaagttggggaggtggatcttgcacatagccttctcaagttgttaatagctaaacgacatttgtttgatccagcagtgttcatgccagtgatagatgcattaggtgataggggaaagaaacaggatgttgatatgctgtcagcaaaaatgatggaaatggctgaccgtaatgatggtcttggaactgattctggtaagattacccctggaagctgtaagcatgagcatgacaggaatggtgaaagcgattggcgtaatcttttgcacagagatgacagtgcccgcacgattatgaaaattacaaagagagtgcggacagggtggggtcaaagaggcaatgtatatgagcataaacagcaacagggtgatggcttttatgtactcgagaacactggctaagcgttatgtgatcttatcaaactgtccaagtaggcaagtactgcagcgctataattttgtgctaccatctgagacacagcttttgttctatcatggattcttcatcactgtcgggagctcagtttatatctggtttggtcatgggcatcactgggctctcttcagacatacctgtggtggtgactgcgaacaacattgcaacgaggctgtcgctcccctcagcggcatcgtcaacctcaggtgtaaggtgctccgcgacgcaacggtgacaagggaagttcagctatgcatggccgtgcggagagaatggaggctgcaccggtgacgaggttcatgtccgtgcttcggcggtgtgcgacaagcggcaacccgaggcattggttaaccgcgcaggcatgagactttcccttcttcggtctaaactgcgtcagcttttgcgggttcttcacctttagggatcagtacaaggactatattgttaaacacctccgaaaatataaatcacccccgttgaggagctcaagaatcgcccttgaaatttcgtctctcagcaagttccagcgtcgacgatagaagccaacggcaaagcaattgactgggccatggagctttatttggcttcagcatgaaaaggacttccttaatttatgtccctgtgaaaggtgaacataggacttccttaatcgttttcagaatcagttacattcctggggacatcacacaacacctcctctggattagtatcttgtgtcgagaaaacacgtttgtagaattcagctgctcactttgatcaatgcaaactgaaccatcctggcgttaaagggcggtaaatttaggccctgttcggttgtaccggaataagccatgattcattccagctcatcaaaatctatataaattagagaagtaatccggctaggaattaatccggggctccaatccaaaacaaccgaacagggccttatttgctcgttccctttgtcgtgctttggcctggaagaaccatgtatccaatcaccagccagcaatagcgtgcaaacactgatgcattgtttatagagtggaatttgaaatgtagagtgagatagggaagccagtggagaactggagatagccacaaccaaacatgggagcgctattttttccatgacctcctccctcgccagtagaatgtcatcctctacgcatggtcagggcaggttttcacattgcgtcgcccttctcgtcgattgtcccaaccgaac

SEQ ID NO: 218212 - DNA, 4404 bp, Zea Mays
ccgtccgtgcacacctctctctctattgtgcgttgtcgatcccccgcgagcccgccctccctcacccccacgagatggtcgggagatccgccctcgccttgcctccgcgcaacaatcgtgcgcccactcctcatcgcaatccagtagctccggcctcgcctcctcaaccgcgcattcccctctcccacacccgcctcgttcgcccctaccgcgccatcaacgcgcctcccccgccgcacaccccgtcctccccatgccgaatcgtgatggttatgctccccacccacgcgccgcgtgcctcctccttccccgccgctcccacccgagatggttagctcccctccttctggtcccttcccctgcctcactgccagccagcgatggagcaaggccaggggattcgccggattcaccgagcgggctctggtggcggccggcgctgccgtcgtgtccgccattcttgtcaacccccttgacgtcgccaaggtacgccggtgaccctgtcgttgcctctttcgcttcctctcaactgccgcccctcaaccctcgacacttgcccacaactgtcgccattgcccgctcgccatggcgctaaaataaaccccctctgcggccgccccgtatcctctcgctgcggccgcgggctggggagcaccggccttggcatcgtcatagccgcgggagtcttcagcgccgccgcctcgttgctcctcgcctacttcttctggcagtgcaccgggaagggcaaaggaggccgccgtcgccacaggcgcggcaccagcgagtcgggcggtggggaagacgggagctggtggaccgagaggctgcgggcggcgcacaaccgcctggtcccggtctcgctgttccagaagcccatcgtgaaggtcaagctcgctgacctgatggccgccacccatgacttcagcactagccacatcgtggtcgccgggagctcgcaggcggggatagcttaccgagccgtgctacgggacgggtctgcgctgacggtcaagcgcctgcactcgtgcccactttcggagaaggcgttcagggcagagatgggtcgtatggggcagctgcggcatcctaacatcgtgccactgctgggcttctgtgttgtcgaggacgagaggctgctggtgtataagcatatggagagtggggctctttcatcggtgatgaagaagccaggggaagcgccgctggattgggcaacgcgacttaggatcgccgtgggggcagcaagggggcttgcgtggctgcaccatgggttccaggttccgcagattcaccagaatttgagctcgagtgcagtgcttctcgacgaggattatgatgctcggatcacggatgttggactcacaaggttggtccggatggcgcctggcgagggtggtgataccagtcctttcctgaacggggactttggggagtttggctatgttgctccagagtatgctagcaatccagttggtacgatgaaaggcgatgcgtatgcatttggggtgatattgtttgagcttgttagcgggcaggagtctgctgctgtggttactgacgtgacgggtgaaggattcaaggggacattggtggactgggttaaccagctcaaggcttctggtcgaatcagtgatgctattgataaaccattgcgtggaaagggccatgaggcagagattcaggagttcttgaagatagcttttgcttgcacccagccccgtgtgacggagaggcattcaatgtatcgggttttccacgctctgaagagcatcggagagggctgcgatgtcacggagcagtttgatgagttcccattggcctataacaaggatgattcagacgctatttagctgatgatgctgattgccaattcgattgtggaaatgtttggtcaggcttattgatgatatatatatttagccttgctatggacagaccggaagcataaatgagtgataagagaacaatatcgaggcaccaaatctagcgccggatgccgggtggtcaattacatcgttgcatcgacaggggatgtgataaccataagtaatattgctcgaaaatgtagagctgactcttgaagcctttgactaaatgcagctgccattcacgctgaaaggacaaattaggaagctaagcatctagataggagaatttgattggtttgtgtcaatatttaatttcttagctcactctgttcatgcctttgtggttcatggacaactgctgctacgtgctcccttccccgacagcgcattctaacacggcatgatacactagcaactggaatgttgtcaacatcagcggcaacgacgacaacgccacatcgagaaacaacaactgtgggctagggagcacaatcccgtggtgcggtgacttgcccacgtttgccatgctgccttgatgcatggcacatcaacaagaagagcaccagtttggaaggctaattccgaaggaattgagatgtgcagagggagatgaagaatgtggagaaagacatcagggtagctactaagcgcaatgacatgttatctgcaaagagctgatgctgctcggagtcatctcgctgctgctcagccagacggcacgcttcatatcggagatctgcgtgccgtcctcgctcttcaccagccgcttctacatctgctctgagagcgactaccaggacctgctgcgcaacacggacgccaaccagacggcgctcgacaagaacatgttcggtggccagcggctgcacgtctgtggcgagggccatgaaccttttgtttcgtacgagggccttgagcagctgcaccggtttctcttcatccttggtatcactcatgtgttgtacagttttgtaacagtggttctgtccatgatcaagatctatagctggaggaagtgggaaaccttagcaggtccaattgctgctgaggaattgaaagctaggagaaccaaggtgatgagaaggcagtcaacctttgtttttaacaatgcttctcatccatggagcaaaaataaaatacttatttggatggtaaaattccttttctgtttcttgatctttctgtggaacagatactgactgtatcatcctttgttatctgattagtgtattaccgtgtaaagacataaaaatgccttatttttctagctcatccagtcatttcgaattcaacctcaagtttactgatgaaagaacatctaagagtgtcaccgaccatagtcaaaagattcatgtatctgaagcctcaaataagtagtatacatccataatcacttggatttaaagtttctttaattgcattatagctttgctttttgcgccaattcaagggctccataataaggtcagactatttggcactgaggttgggctttgtcacagtgagtactctaatttttttctaatgttttagcatcctcgccccacctcctccccctgccaagatgattctaatatgccactttgttcatgtgtttttcttattagtatcacaagctaccacattcatatgacttccataaatacatggtacggagcatggaagattattacaatgggactattggtatcagttggccactttgggcatatgtgattgtctgcgtattaatcaatgttcatgcagcacaagcagcacgccgtgccgctccaaccgtcttgcttccccgcttagcttcccgccgcgccatggcgtcgaccaaggctcccggcgagaagcaccactccatcgacacgcagctccatcagctggtcccaggcaaggtctccgaggacgacaagctcatcgagtacgatgcgctgctcattgatcgcttcctcaacatcctccaggacctccatgggcccagccttcgcgaatttgtccaggagtgctacgaggtctcggccgactacgagggcaaaggagacacgacgaagctgggcgagctcagcgccaagctcatggggctggcccccgtcgacgccatcctcgtggcgagctccatcctgcacatgctcaacctcgccaacctctccgaggaggtgcagatcacgcaccgctgccgcaacagcaagctcaagaaaggtggcttcgccgacgagggctcagccaccaccgagtccgacatcgaggagacgctcaagcgcctcgtgtccgaggtcggcaagtccctcgaggaggtgttcgaggcgctcaagaaccagatagatccacatttatgcttatgtttattttatattttttgatttgaatatctaaactatgatgttctatgaaagatcattcttgaatttttgcctttaaattttcttgttaaatcttgtatactacactattaaatgagtgctcgtgcgtcacagtcccgagtttctctttaacgtcatcctggacggttcgtggatgtcgtcctccaactcataacagtataacacac

SEQ ID NO: 218213 - DNA, 3860 bp, Zea Mays
ccgtccgtgcacacctctctctctattgtgcgttgtcgatcccccgcgagcccgccctccctcacccccacgagatggtcgggagatccgccctcgccttgcctccgcgcaacaatcgtgcgcccactcctcatcgcaatccagtagctccggcctcgcctcctcaaccgcgcattcccctctcccacacccgcctcgttcgcccctaccgcgccatcaacgcgcctcccccgccgcacaccccgtcctccccatgccgaatcgtgatggttatgctccccacccacgcgccgcgtgcctcctccttccccgccgctcccacccgagatggttagctcccctccttctggtcccttcccctgcctcactgccagccagcgatggagcaaggccaggggattcgccggattcaccgagcgggctctggtggcggccggcgctgccgtcgtgtccgccattcttgtcaacccccttgacgtcgccaagtgcaccgggaagggcaaaggaggccgccgtcgccacaggcgcggcaccagcgagtcgggcggtggggaagacgggagctggtggaccgagaggctgcgggcggcgcacaaccgcctggtcccggtctcgctgttccagaagcccatcgtgaaggtcaagctcgctgacctgatggccgccacccatgacttcagcactagccacatcgtggtcgccgggagctcgcaggcggggatagcttaccgagccgtgctacgggacgggtctgcgctgacggtcaagcgcctgcactcgtgcccactttcggagaaggcgttcagggcagagatgggtcgtatggggcagctgcggcatcctaacatcgtgccactgctgggcttctgtgttgtcgaggacgagaggctgctggtgtataagcatatggagagtggggctctttcatcggtgatgaagaagccaggggaagcgccgctggattgggcaacgcgacttaggatcgccgtgggggcagcaagggggcttgcgtggctgcaccatgggttccaggttccgcagattcaccagaatttgagctcgagtgcagtgcttctcgacgaggattatgatgctcggatcacggatgttggactcacaaggttggtccggatggcgcctggcgagggtggtgataccagtcctttcctgaacggggactttggggagtttggctatgttgctccagagtatgctagcaatccagttggtacgatgaaaggcgatgcgtatgcatttggggtgatattgtttgagcttgttagcgggcaggagtctgctgctgtggttactgacgtgacgggtgaaggattcaaggggacattggtggactgggttaaccagctcaaggcttctggtcgaatcagtgatgctattgataaaccattgcgtggaaagggccatgaggcagagattcaggagttcttgaagatagcttttgcttgcacccagccccgtgtgacggagaggcattcaatgtatcgggttttccacgctctgaagagcatcggagagggctgcgatgtcacggagcagtttgatgagttcccattggcctataacaaggatgattcagacgctatttagctgatgatgctgattgccaattcgattgtggaaatgtttggtcaggcttattgatgatatatatatttagccttgctatggacagaccggaagcataaatgagtgataagagaacaatatcgaggcaccaaatctagcgccggatgccgggtggtcaattacatcgttgcatcgacaggggatgtgataaccataagtaatattgctcgaaaatgtagagctgactcttgaagcctttgactaaatgcagctgccattcacgctgaaagcgcattctaacacggcatgatacactagcaactggaatgttgtcaacatcagcggcaacgacgacaacgccacatcgagaaacaacaactgtgggctagggagcacaatcccgtggtgcggtgacttgcccacgtttgccatgctgccttgatgcatggcacatcaacaagaagagcaccagtttggaaggctaattccgaaggaattgagatgtgcagagggagatgaagaatgtggagaaagacatcagggtagctactaagcgcaatgacatgttatctgcaaagagctgatgctgctcggagtcatctcgctgctgctcagccagacggcacgcttcatatcggagatctgcgtgccgtcctcgctcttcaccagccgcttctacatctgctctgagagcgactaccaggacctgctgcgcaacacggacgccaaccagacggcgctcgacaagaacatgttcggtggccagcggctgcacgtctgtggcgaggtattggtaacccagatgtcctgctcccagcctattgagatcaatggaactgggagtggagcagactgttcactcatcgcttgggttggaacctaatctgtcacttgtagggccatgaaccttttgtttcgtacgagggccttgagcagctgcaccggtttctcttcatccttggtatcactcatgtgttgtacagttttgtaacagtggttctgtccatgatcaagatctatagctggaggaagtgggaaaccttagcaggtccaattgctgctgaggaattgaaaggagaaccaaggtgatgagaaggcagtcaacctttgtttttaacaatgcttctcatccatggagcaaaaataaaatacttatttggatgctttgctttttgcgccaattcaagggctccataataaggtcagactatttggcactgagtatcacaagctaccacattcatatgacttccataaatacatggtacggagcatggaagattattacaatgggactattggtatcagttggccactttgggcatatgtgattgtctgcgtattaatcaatgttcatggtatctctactacttattaaggctgtaagggtagcctccctttttttgttctgtctttttcattttcctgttttgccctttccattcccacccgcgcattgcattgatcaccaatcgcatcgcagcagcacaagcagcacgccgtgccgctccaaccgtcttgcttccccgcttagcttcccgccgcgccatggcgtcgaccaaggctcccggcgagaagcaccactccatcgacacgcagctccatcagctggtcccaggcaaggtctccgaggacgacaagctcatcgagtacgatgcgctgctcattgatcgcttcctcaacatcctccaggacctccatgggcccagccttcgcgaatttgtccaggagtgctacgaggtctcggccgactacgagggcaaaggagacacgacgaagctgggcgagctcagcgccaagctcatggggctggcccccgtcgacgccatcctcgtggcgagctccatcctgcacatgctcaacctcgccaacctctccgaggaggtgcagatcacgcaccgctgccgcaacagcaagctcaagaaaggtggcttcgccgacgagggctcagccaccaccgagtccgacatcgaggagacgctcaagcgcctcgtgtccgaggtcggcaagtccctcgaggaggtgttcgaggcgctcaagaaccagatagatccacatttatgcttatgtttattttatattttttgatttgaatatctaaactatgatgttctatgaaagatcattcttgaatttttgcctttaaattttcttgttaaatcttgtatactacactattaaatgagtgctcgtgcgtcacagtcccgagtttctctttaacgtcatcctggacggttcgtggatgtcgtcctccaactcataacagtataacacac

SEQ ID NO: 218214 - DNA, 1727 bp, Zea Mays
aatatcctcgactctgataatatttttttctgggcaaaataatgtagctcatcatcttgtttcttgtcactttttgggtttaaaagttaatatgtctgtagaattcccaagtcacatccttcgtgaggacaaaagagctgatgctgctcggagtcatctcgctgctgctcagccagacggcacgcttcatatcggagatctgcgtgccgtcctcgctcttcaccagccgcttctacatctgctctgagagcgactaccaggacctgctgcgcaacacggacgccaaccagacggcgctcgacaagaacatgttcggtggccagcggctgcacgtctgtggcgagggccatgaaccttttgtttcgtacgagggccttgagcagctgcaccggtttctcttcatccttggtatcactcatgtgttgtacagttttgtaacagtggttctgtccatgatcaagatctatagctggaggaagtgggaaaccttagcaggtccaattgctgctgaggaattgaaagctaggagaaccaaggtgatgagaaggcagtcaacctttgtttttaacaatgcttctcatccatggagcaaaaataaaatacttatttggatgctttgctttttgcgccaattcaagggctccataataaggtcagactatttggcactgagtatcacaagctaccacattcatatgacttccataaatacatggtacggagcatggaagattattacaatgggactattggtatcagttggccactttgggcatatgtgattgtctgcgtattaatcaatgttcatggtatctctactacttattaaggctgtaagggtagcctccctttttttgttctgtctttttcattttcctgttttgccctttccattcccacccgcgcattgcattgatcaccaatcgcatcgcagcagcacaagcagcacgccgtgccgctccaaccgtcttgcttccccgcttagcttcccgccgcgccatggcgtcgaccaaggctcccggcgagaagcaccactccatcgacacgcagctccatcagctggtcccaggcaaggtctccgaggacgacaagctcatcgagtacgatgcgctgctcattgatcgcttcctcaacatcctccaggacctccatgggcccagccttcgcgaatttgtccaggagtgctacgaggtctcggccgactacgagggcaaaggagacacgacgaagctgggcgagctcagcgccaagctcatggggctggcccccgtcgacgccatcctcgtggcgagctccatcctgcacatgctcaacctcgccaacctctccgaggaggtgcagatcacgcaccgctgccgcaacagcaagctcaagaaaggtggcttcgccgacgagggctcagccaccaccgagtccgacatcgaggagacgctcaagcgcctcgtgtccgaggtcggcaagtccctcgaggaggtgttcgaggcgctcaagaaccagatagatccacatttatgcttatgtttattttatattttttgatttgaatatctaaactatgatgttctatgaaagatcattcttgaatttttgcctttaaattttcttgttaaatcttgtatactacactattaaatgagtgctcgtgcgtcacagtcccgagtttctctttaacgtcatcctggacggttcgtggatgtcgtcctccaactcataacagtataacacac

SEQ ID NO: 218215 - DNA, 3790 bp, Zea Mays
agatccgccagtagtgaattgcatgccggtcgtgtgggctttggcgctggtgggtccatcagttgaaagttgaaacgccggggtgcgtcgcactgtcgcttcgcttgcgctcttcgcgtccgttcccccccaaagccacgataaatatgcgctcgagaccgaccctttcggccgtaatctcctccgctcaagccgtagtagggtttccgtagcccagcccatgtcgacgcgcgacggcggaggcggccggcgtggcggcaatgcagcagcaggccgtggaggtgacggccaagggcggggccgtggagggggcggccgaggtggcgccggcggccgtggcggtggcggccaatggcgggcccaaggcggcgcggagcttggcggtggccgaggtggagccgtcggcgcagcgcgtggcggccgcggaggtgtcgagagagggggtcaccagtccttccacggcgccaggccggtcggtggggaccgaggcggacgcggacactaccaccatggcgtgcctgctcaggtccagccgcagtggcaagtggccgcgccgccttcgacgtcgaggccgacacccgcggaagtcgaggagctgagaggcgaggtggagaggaaggcggcggtggcggtgccagacgcagaggcgcacgaggggccgtcgtcgggcaccgcgcatgagccttccgccgcgccggcgcgggtcgaagcggagcaagggacgtcgctggtggtggaggcagaccaggccgctcaggggaggctgcctccgtcgtcgagcaaggcgctggttttccccgcgcggccggggtacggcacgctcggccggaggtgccgcgtgcgcgccaaccatttcttcgttcaggtggcggacaaggagatctaccactacgacgtcgtgattagtccagaatcgcagtcaaggaaaagaaatcgttggattcttaacgaactcgttaaattgcacaagaattacttgaatgggcgactgcctgtttatgatggtagaaagggccttttcactgctggtccgctaccgttcaaaaccaaagaatttgttctggaactaaccaatcctgagagagcaaaccagggggcgaaagagtacagcgtgaccataaaagatgctgccaaattagatctttacagccttaggcagttcttggctggtaggcagagggaactgccacaggatactgtccaagccctcgatattgctatgcgagaatgcccaactgaaaagtatgtatccatctcaaggtcatttttctctcagtcatttggacatggtggtgatattggcagtggtgtggaatgctggagggggtactaccaaagtctacgtgctacacaaatgggattgtctttaaatattgatatttcagcaactgcattttacaaggctcaaccgattttggagtttgcattggagtacctcaacatacgtgacacctcaaggcgtttgtctgaccaggatcgcttaaaactgaagaaagtcctcaaaggagtacgtgttgtggcaacacatcgtcgtgatatagccatacattacaagattactgggataacctcacttcccttgaatagtttaacgtttaatcaagatggggcaagtgtttcagttgtccaatactttaaacaccaatataattacagtttgaaacacattcactggccatgccttcaatctggcaatgatagtaggccgacttatttaccaatggaggtttgcagtatacttggcggtcaacgctattctaggaagctaaatgagtaccaagtcacaagcatcctgaagaaggcatgtgagcgaccacctcaaagggagggcagcattttagaggtagttaataggaacgactatggtaatgatcattgtgccaaagaatttggtattaaggtgacaaatgaacttgccttggttgatgcacgggtgctgccagctccgacgcttaagtaccatgactctggacgagaaaaggtgtgtagtccttccgttggtcagtggaacatgaacaacaagagattgatcgatggagtatccattcagtattgggcttgtgtgacttttgcttctcggttgcatccaaatgatgtccgcatgttttgcaacaacttggttggggcgtgcaatgatatgggcatgcaaataaatgggagaccttgtgttgatgttgggcaagcacgcccagataacttagaagctgcactcagaaatactcatagacaatctgcacaaatgcttgcccaacaaggcgtgactagacagcttgatttactaattgttgtattaccagatgcaaatgcaagtgtcttttatggtaggataaagcgtctttgtgaaactgaacttggtttagtaactcaatgttgtcaaccaaagaatgtttttaaaggtggccgacaatatctccaaaacctggctcttaaaattaatgttaaggttggtggccgtaatacagttctcgaagatgctttaaataggagaatacatttgttaacagatttacctacaattatctttggagctgatgttacccacccagctccaggggaagatgcatccccgtctattgcagcggttgttgcatcaatggattggccacaagttgcaaagtacaggtgcttggtgtcttctcaaggtcatagggaagagatcataactgatcttttcacacaagtgaaggatccacaaaagggacttattaacggtggaatgatcagggaactactcgtgtcattctataaggcaaacgggagccgcaaaccaagcaggataattttctatcgagatggtgtcagtgaggggcagtttagccaggtcttgctttatgaagtggatgcaattcgaaaggcgtgtgccagcttggaagagggctaccttcctccaattacattcattgtggtgcaaaagcgccatcacacacggcttttccctgaagatcatcatgcacacggacagatggatcgaagtggaaacattttgccaggaactgttgttgacacgaagatatgccatccaagtgaattcgacttctacctttgtagccactctggcatacagggaacgagccggccagcacactaccatgttctgtttgacgaaaacaaattcactgccgatgcactgcaaacgttgacctacaaactgtgctacacgtatgcgcgatgcactcgatcagtctctatagttcccccggcgtactacgcacacctggcggccttccgtgcgcgccactacatggacgatgacctctccgaccaggggtcgtcttcagtggcgagttctcgcatgaaagatggcgctgttccggtgaagcagctgccgaaagtgatggagagcgtcaaacagttcatgttctactgctgaaggtggcctttgcaggaaggaccttcatcgacacttttgttgccatgaaatgaaacgagtaattctgggttggtgtaattatggtgaagtaaccctgaagggtgggccgcacgacctccaaatcatattttgggtctggcgagtcttctatccaaaactcgtcagaaaacgccttttatttttggtggacttcgtataagtccaaggcattgcctgtgattttggggtttcttttaggttgcaaccttgttttgtttttgaaattttctgctttgaattgatgcattatatatgaagaaatgagcctctcacgctagctccagcaagtgacccaagtatgacaaatatgtatgtacaaaaaataaaaaatgcctctaatatggatatttgagtataaatgacatgatttagaggacattg

SEQ ID NO: 218216 - DNA, 2326 bp, Zea Mays
attgcatgccggtcgtgtgggctttggcgctggtgggtccatcagttgaaagttgaaacgccggggtgcgtcgcactgtcgcttcgcttgcgctcttcgcgtccgttcccccccaaagccacgataaatatgcgctcgagaccgaccctttcggccgtaatctcctccgctcaagccgtagtagggtttccgtagcccagcccatgtcgacgcgcgacggcggaggcggccggcgtggcggcaatgcagcagcaggccgtggaggtgacggccaagggcggggccgtggagggggcggccgaggtggcgccggcggccgtggcggtggcggccaatggcgggcccaaggcggcgcggagcttggcggtggccgaggtggagccgtcggcgcagcgcgtggcggccgcggaggtgtcgagagagggggtcaccagtccttccacggcgccaggccggtcggtggggaccgaggcggacgcggacactaccaccatggcgtgcctgctcaggtccagccgcagtggcaagtggccgcgccgccttcgacgtcgaggccgacacccgcggaagtcgaggagctgagaggcgaggtggagaggaaggcggcggtggcggtgccagacgcagaggcgcacgaggggccgtcgtcgggcaccgcgcatgagccttccgccgcgccggcgcgggtcgaagcggagcaagggacgtcgctggtggtggaggcagaccaggccgctcaggggaggctgcctccgtcgtcgagcaaggcgctggttttccccgcgcggccggggtacggcacgctcggccggaggtgccgcgtgcgcgccaaccatttcttcgttcaggtggcggacaaggagatctaccactacgacgtcgtgattagtccagaatcgcagtcaaggaaaagaaatcgttggattcttaacgaactcgttaaattgcacaagaattacttgaatgggcgactgcctgtttatgatggtagaaagggccttttcactgctggtccgctaccgttcaaaaccaaagaatttgttctggaactaaccaatcctgagagagcaaaccagggggcgaaagagtacagcgtgaccataaaagatgctgccaaattagatctttacagccttaggcagttcttggctggtaggcagagggaactgccacaggatactgtccaagccctcgatattgctatgcgagaatgcccaactgaaaagtatgtatccatctcaaggtcatttttctctcagtcatttggacatggtggtgatattggcagtggtgtggaatgctggagggggtactaccaaagtctacgtgctacacaaatgggattgtctttaaatattgatatttcagcaactgcattttacaaggctcaaccgattttggagtttgcattggagtacctcaacatacgtgacacctcaaggcgtttgtctgaccaggatcgcttaaaactgaagaaagtcctcaaaggagtacgtgttgtggcaacacatcgtcgtgatatagccatacattacaagattactgggataacctcacttcccttgaatagtttaacgtttaatcaagatggggcaagtgtttcagttgtccaatactttaaacaccaatataattacagtttgaaacacattcactggccatgccttcaatctggcaatgatagtaggccgacttatttaccaatggaggtttgcagtatacttggcggtcaacgctattctaggaagctaaatgagtaccaagtcacaagcatcctgaagaaggcatgtgagcgaccacctcaaagggagggcagcattttagaggtagttaataggaacgactatggtaatgatcattgtgccaaagaatttggtattaaggtgacaaatgaacttgccttggttgatgcacgggtgctgccagctccgacgcttaagtaccatgactctggacgagaaaaggtgtgtagtccttccgttggtcagtggaacatgaacaacaagagattgatcgatggagtatccattcagtattgggcttgtgtgacttttgcttctcggttgcatccaaatgatgtccgcatgttttgcaacaacttggttggggcgtgcaatgatatgggcatgcaaataaatgggagaccttgtgttgatgttgggcaagcacgcccagataacttagaagctgcactcagaaatactcatagacaatctgcacaaatgcttgcccaacaaggcgtgactagacagcttgatttactaattgttgtattaccagatgcaaatgcaagtgtcttttatgctttgacatgtctttaatgcag

SEQ ID NO: 218217 - DNA, 3950 bp, Zea Mays
attgcatgccggtcgtgtgggctttggcgctggtgggtccatcagttgaaagttgaaacgccggggtgcgtcgcactgtcgcttcgcttgcgctcttcgcgtccgttcccccccaaagccacgataaatatgcgctcgagaccgaccctttcggccgtaatctcctccgctcaagccgtagtagggtttccgtagcccagcccatgtcgacgcgcgacggcggaggcggccggcgtggcggcaatgcagcagcaggccgtggaggtgacggccaagggcggggccgtggagggggcggccgaggtggcgccggcggccgtggcggtggcggccaatggcgggcccaaggcggcgcggagcttggcggtggccgaggtggagccgtcggcgcagcgcgtggcggccgcggaggtgtcgagagagggggtcaccagtccttccacggcgccaggccggtcggtggggaccgaggcggacgcggacactaccaccatggcgtgcctgctcaggtccagccgcagtggcaagtggccgcgccgccttcgacgtcgaggccgacacccgcggaagtcgaggagctgagaggcgaggtggagaggaaggcggcggtggcggtgccagacgcagaggcgcacgaggggccgtcgtcgggcaccgcgcatgagccttccgccgcgccggcgcgggtcgaagcggagcaagggacgtcgctggtggtggaggcagaccaggccgctcaggggaggctgcctccgtcgtcgagcaaggcgctggttttccccgcgcggccggggtacggcacgctcggccggaggtgccgcgtgcgcgccaaccatttcttcgttcaggtggcggacaaggagatctaccactacgacgtcgtgattagtccagaatcgcagtcaaggaaaagaaatcgttggattcttaacgaactcgttaaattgcacaagaattacttgaatgggcgactgcctgtttatgatggtagaaagggccttttcactgctggtccgctaccgttcaaaaccaaagaatttgttctggaactaaccaatcctgagagagcaaaccagggggcgaaagagtacagcgtgaccataaaagatgctgccaaattagatctttacagccttaggcagttcttggctggtaggcagagggaactgccacaggatactgtccaagccctcgatattgctatgcgagaatgcccaactgaaaagtatgtatccatctcaaggtcatttttctctcagtcatttggacatggtggtgatattggcagtggtgtggaatgctggagggggtactaccaaagtctacgtgctacacaaatgggattgtctttaaatattgatatttcagcaactgcattttacaaggctcaaccgattttggagtttgcattggagtacctcaacatacgtgacacctcaaggcgtttgtctgaccaggatcgcttaaaactgaagaaagtcctcaaaggagtacgtgttgtggcaacacatcgtcgtgatatagccatacattacaagattactgggataacctcacttcccttgaatagtttaacgtttaatcaagatggggcaagtgtttcagttgtccaatactttaaacaccaatataattacagtttgaaacacattcactggccatgccttcaatctggcaatgatagtaggccgacttatttaccaatggaggtttgcagtatacttggcggtcaacgctattctaggaagctaaatgagtaccaagtcacaagcatcctgaagaaggcatgtgagcgaccacctcaaagggagggcagcattttagaggtagttaataggaacgactatggtaatgatcattgtgccaaagaatttggtattaaggtgacaaatgaacttgccttggttgatgcacgggtgctgccagctccgacgcttaagtaccatgactctggacgagaaaaggtgtgtagtccttccgttggtcagtggaacatgaacaacaagagattgatcgatggagtatccattcagtattgggcttgtgtgacttttgcttctcggttgcatccaaatgatgtccgcatgttttgcaacaacttggttggggcgtgcaatgatatgggcatgcaaataaatgggagaccttgtgttgatgttgggcaagcacgcccagataacttagaagctgcactcagaaatactcatagacaatctgcacaaatgcttgcccaacaaggcgtgactagacagcttgatttactaattgttgtattaccagatgcaaatgcaagtgtcttttatggtaggataaagcgtctttgtgaaactgaacttggtttagtaactcaatgttgtcaaccaaagaatgtttttaaaggtggccgacaatatctccaaaacctggctcttaaaattaatgttaaggttgttgcatcaatggattggccacaagttgcaaagtacaggtgcttggtgtcttctcaaggtcatagggaagagatcataactgatcttttcacacaagtgaaggatccacaaaagggacttattaacggtggaatgatcagggaactactcgtgtcattctataaggcaaacgggagccgcaaaccaagcaggataattttctatcggttcgtaattgtctgtttgaatgaattatgttgccgtctgaacttaaatctcgtttccgttcatgaaaagacagcacctgccgttttcccttatgttaatacattgttgatacatagcattcaacagctacaccttggggaagaattgccattgtgcacctgaaaaacaagagaactcattttacttgtttccttgacttgcagagatggtgtcagtgaggggcagtttagccaggtcttgctttatgaagtggatgcaattcgaaaggcgtgtgccagcttggaagagggctaccttcctccaattacattcattgtggtgcaaaagcgccatcacacacggcttttccctgaagatcatcatgcacacggacagatggatcgaagtggaaacattttgccaggaactgttgttgacacgaagatatgccatccaagtgaattcgacttctacctttgtagccactctggcatacagggaacgagccggccagcacactaccatgttctgtttgacgaaaacaaattcactgccgatgcactgcaaacgttgacctacaaactgtgctacacgtaaacagtttctttaccacttgcttgtgattcttaacaaaactggtgcatttttaccgttcgaattatggccaccatacttacctggtcggtgatctggctttctttcaggtatgcgcgatgcactcgatcagtctctatagttcccccggcgtactacgcacacctggcggccttccgtgcgcgccactacatggacgatgacctctccgaccaggggtcgtcttcagtggcgagttctcgcatgaaagatggcgctgttccggtgaagcagctgccgaaagtgatggagagcgtcaaacagttcatgttctactgctgaaggtggcctttgcaggaaggaccttcatcgacacttttgttgccatgaaatgaaacgagtaattctgggttggtgtaattatggtgaagtaaccctgaagggtgggccgcacgacctccaaatcatattttgggtctggcgagtcttctatccaaaactcgtcagaaaacgccttttatttttggtggacttcgtataagtccaaggcattgcctgtgattttggggtttcttttaggttgcaaccttgttttgtttttgaaattttctgctttgaattgatgcattatatatgaagaaatgagcctctcacgctagctccagcaagtgacccaagtatgacaaatatgtatgtacaaaaaataaaaaatgcctctaatatggatatttgagtataaatgacatgatttagaggacattg

SEQ ID NO: 218218 - DNA, 3704 bp, Zea Mays
attgcatgccggtcgtgtgggctttggcgctggtgggtccatcagttgaaagttgaaacgccggggtgcgtcgcactgtcgcttcgcttgcgctcttcgcgtccgttcccccccaaagccacgataaatatgcgctcgagaccgaccctttcggccgtaatctcctccgctcaagccgtagtagggtttccgtagcccagcccatgtcgacgcgcgacggcggaggcggccggcgtggcggcaatgcagcagcaggccgtggaggtgacggccaagggcggggccgtggagggggcggccgaggtggcgccggcggccgtggcggtggcggccaatggcgggcccaaggcggcgcggagcttggcggtggccgaggtggagccgtcggcgcagcgcgtggcggccgcggaggtgtcgagagagggggtcaccagtccttccacggcgccaggccggtcggtggggaccgaggcggacgcggacactaccaccatggcgtgcctgctcaggtccagccgcagtggcaagtggccgcgccgccttcgacgtcgaggccgacacccgcggaagtcgaggagctgagaggcgaggtggagaggaaggcggcggtggcggtgccagacgcagaggcgcacgaggggccgtcgtcgggcaccgcgcatgagccttccgccgcgccggcgcgggtcgaagcggagcaagggacgtcgctggtggtggaggcagaccaggccgctcaggggaggctgcctccgtcgtcgagcaaggcgctggttttccccgcgcggccggggtacggcacgctcggccggaggtgccgcgtgcgcgccaaccatttcttcgttcaggtggcggacaaggagatctaccactacgacgtcgtgattagtccagaatcgcagtcaaggaaaagaaatcgttggattcttaacgaactcgttaaattgcacaagaattacttgaatgggcgactgcctgtttatgatggtagaaagggccttttcactgctggtccgctaccgttcaaaaccaaagaatttgttctggaactaaccaatcctgagagagcaaaccagggggcgaaagagtacagcgtgaccataaaagatgctgccaaattagatctttacagccttaggcagttcttggctggtaggcagagggaactgccacaggatactgtccaagccctcgatattgctatgcgagaatgcccaactgaaaagtatgtatccatctcaaggtcatttttctctcagtcatttggacatggtggtgatattggcagtggtgtggaatgctggagggggtactaccaaagtctacgtgctacacaaatgggattgtctttaaatattgatatttcagcaactgcattttacaaggctcaaccgattttggagtttgcattggagtacctcaacatacgtgacacctcaaggcgtttgtctgaccaggatcgcttaaaactgaagaaagtcctcaaaggagtacgtgttgtggcaacacatcgtcgtgatatagccatacattacaagattactgggataacctcacttcccttgaatagtttaacgtttaatcaagatggggcaagtgtttcagttgtccaatactttaaacaccaatataattacagtttgaaacacattcactggccatgccttcaatctggcaatgatagtaggccgacttatttaccaatggaggtttgcagtatacttggcggtcaacgctattctaggaagctaaatgagtaccaagtcacaagcatcctgaagaaggcatgtgagcgaccacctcaaagggagggcagcattttagaggtagttaataggaacgactatggtaatgatcattgtgccaaagaatttggtattaaggtgacaaatgaacttgccttggttgatgcacgggtgctgccagctccgacgcttaagtaccatgactctggacgagaaaaggtgtgtagtccttccgttggtcagtggaacatgaacaacaagagattgatcgatggagtatccattcagtattgggcttgtgtgacttttgcttctcggttgcatccaaatgatgtccgcatgttttgcaacaacttggttggggcgtgcaatgatatgggcatgcaaataaatgggagaccttgtgttgatgttgggcaagcacgcccagataacttagaagctgcactcagaaatactcatagacaatctgcacaaatgcttgcccaacaaggcgtgactagacagcttgatttactaattgttgtattaccagatgcaaatgcaagtgtcttttatggataaagcgtctttgtgaaactgaacttggtttagtaactcaatgttgtcaaccaaagaatgtttttaaaggtggccgacaatatctccaaaacctggctcttaaaattaatgttaaggttgttgcatcaatggattggccacaagttgcaaagtacaggtgcttggtgtcttctcaaggtcatagggaagagatcataactgatcttttcacacaagtgaaggatccacaaaagggacttattaacggtggaatgatcagggaactactcgtgtcattctataaggcaaacgggagccgcaaaccaagcaggataattttctatcgagatggtgtcagtgaggggcagtttagccaggtcttgctttatgaagtggatgcaattcgaaaggtggttttcttcacaatattattctcttttgttgtattctcctaactgagtttacgtttgtgtttgtactcaggcgtgtgccagcttggaagagggctaccttcctccaattacattcattgtggtgcaaaagcgccatcacacacggcttttccctgaagatcatcatgcacacggacagatggatcgaagtggaaacattttgccaggaactgttgttgacacgaagatatgccatccaagtgaattcgacttctacctttgtagccactctggcatacagggaacgagccggccagcacactaccatgttctgtttgacgaaaacaaattcactgccgatgcactgcaaacgttgacctacaaactgtgctacacgtatgcgcgatgcactcgatcagtctctatagttcccccggcgtactacgcacacctggcggccttccgtgcgcgccactacatggacgatgacctctccgaccaggggtcgtcttcagtggcgagttctcgcatgaaagatggcgctgttccggtgaagcagctgccgaaagtgatggagagcgtcaaacagttcatgttctactgctgaaggtggcctttgcaggaaggaccttcatcgacacttttgttgccatgaaatgaaacgagtaattctgggttggtgtaattatggtgaagtaaccctgaagggtgggccgcacgacctccaaatcatattttgggtctggcgagtcttctatccaaaactcgtcagaaaacgccttttatttttggtggacttcgtataagtccaaggcattgcctgtgattttggggtttcttttaggttgcaaccttgttttgtttttgaaattttctgctttgaattgatgcattatatatgaagaaatgagcctctcacgctagctccagcaagtgacccaagtatgacaaatatgtatgtacaaaaaataaaaaatgcctctaatatggatatttgagtataaatgacatgatttagaggacattg

SEQ ID NO: 218219 - DNA, 3668 bp, Zea Mays
attgcatgccggtcgtgtgggctttggcgctggtgggtccatcagttgaaagttgaaacgccggggtgcgtcgcactgtcgcttcgcttgcgctcttcgcgtccgttcccccccaaagccacgataaatatgcgctcgagaccgaccctttcggccgtaatctcctccgctcaagccgtagtagggtttccgtagcccagcccatgtcgacgcgcgacggcggaggcggccggcgtggcggcaatgcagcagcaggccgtggaggtgacggccaagggcggggccgtggagggggcggccgaggtggcgccggcggccgtggcggtggcggccaatggcgggcccaaggcggcgcggagcttggcggtggccgaggtggagccgtcggcgcagcgcgtggcggccgcggaggtgtcgagagagggggtcaccagtccttccacggcgccaggccggtcggtggggaccgaggcggacgcggacactaccaccatggcgtgcctgctcaggtccagccgcagtggcaagtggccgcgccgccttcgacgtcgaggccgacacccgcggaagtcgaggagctgagaggcgaggtggagaggaaggcggcggtggcggtgccagacgcagaggcgcacgaggggccgtcgtcgggcaccgcgcatgagccttccgccgcgccggcgcgggtcgaagcggagcaagggacgtcgctggtggtggaggcagaccaggccgctcaggggaggctgcctccgtcgtcgagcaaggcgctggttttccccgcgcggccggggtacggcacgctcggccggaggtgccgcgtgcgcgccaaccatttcttcgttcaggtggcggacaaggagatctaccactacgacgtcgtgattagtccagaatcgcagtcaaggaaaagaaatcgttggattcttaacgaactcgttaaattgcacaagaattacttgaatgggcgactgcctgtttatgatggtagaaagggccttttcactgctggtccgctaccgttcaaaaccaaagaatttgttctggaactaaccaatcctgagagagcaaaccagggggcgaaagagtacagcgtgaccataaaagatgctgccaaattagatctttacagccttaggcagttcttggctggtaggcagagggaactgccacaggatactgtccaagccctcgatattgctatgcgagaatgcccaactgaaaagtatgtatccatctcaaggtcatttttctctcagtcatttggacatggtggtgatattggcagtggtgtggaatgctggagggggtactaccaaagtctacgtgctacacaaatgggattgtctttaaatattgatatttcagcaactgcattttacaaggctcaaccgattttggagtttgcattggagtacctcaacatacgtgacacctcaaggcgtttgtctgaccaggatcgcttaaaactgaagaaagtcctcaaaggagtacgtgttgtggcaacacatcgtcgtgatatagccatacattacaagattactgggataacctcacttcccttgaatagtttaacgtttaatcaagatggggcaagtgtttcagttgtccaatactttaaacaccaatataattacagtttgaaacacattcactggccatgccttcaatctggcaatgatagtaggccgacttatttaccaatggaggtttgcagtatacttggcggtcaacgctattctaggaagctaaatgagtaccaagtcacaagcatcctgaagaaggcatgtgagcgaccacctcaaagggagggcagcattttagaggtagttaataggaacgactatggtaatgatcattgtgccaaagaatttggtattaaggtgacaaatgaacttgccttggttgatgcacgggtgctgccagctccgacgcttaagtaccatgactctggacgagaaaaggtgtgtagtccttccgttggtcagtggaacatgaacaacaagcaaataaatgggagaccttgtgttgatgttgggcaagcacgcccagataacttagaagctgcactcagaaatactcatagacaatctgcacaaatgcttgcccaacaaggcgtgactagacagcttgatttactaattgttgtattaccagatgcaaatgcaagtgtcttttatggtaggataaagcgtctttgtgaaactgaacttggtttagtaactcaatgttgtcaaccaaagaatgtttttaaaggtggccgacaatatctccaaaacctggctcttaaaattaatgttaaggttggtggccgtaatacagttctcgaagatgctttaaataggagaatacatttgttaacagatttacctacaattatctttggagctgatgttacccacccagctccaggggaagatgcatccccgtctattgcagcggttgttgcatcaatggattggccacaagttgcaaagtacaggtgcttggtgtcttctcaaggtcatagggaagagatcataactgatcttttcacacaagtgaaggatccacaaaagggacttattaacggtggaatgatcaggcatgccgaacatcttagggaactactcgtgtcattctataaggcaaacgggagccgcaaaccaagcaggataattttctatcgagatggtgtcagtgaggggcagtttagccaggtcttgctttatgaagtggatgcaattcgaaaggcgtgtgccagcttggaagagggctaccttcctccaattacattcattgtggtgcaaaagcgccatcacacacggcttttccctgaagatcatcatgcacacggacagatggatcgaagtggaaacattttgccaggaactgttgttgacacgaagatatgccatccaagtgaattcgacttctacctttgtagccactctggcatacagggaacgagccggccagcacactaccatgttctgtttgacgaaaacaaattcactgccgatgcactgcaaacgttgacctacaaactgtgctacacgtatgcgcgatgcactcgatcagtctctatagttcccccggcgtactacgcacacctggcggccttccgtgcgcgccactacatggacgatgacctctccgaccaggggtcgtcttcagtggcgagttctcgcatgaaagatggcgctgttccggtgaagcagctgccgaaagtgatggagagcgtcaaacagttcatgttctactgctgaaggtggcctttgcaggaaggaccttcatcgacacttttgttgccatgaaatgaaacgagtaattctgggttggtgtaattatggtgaagtaaccctgaagggtgggccgcacgacctccaaatcatattttgggtctggcgagtcttctatccaaaactcgtcagaaaacgccttttatttttggtggacttcgtataagtccaaggcattgcctgtgattttggggtttcttttaggttgcaaccttgttttgtttttgaaattttctgctttgaattgatgcattatatatgaagaaatgagcctctcacgctagctccagcaagtgacccaagtatgacaaatatgtatgtacaaaaaataaaaaatgcctctaatatggatatttgagtataaatgacatgatttagaggacattg

SEQ ID NO: 218220 - DNA, 4566 bp, Zea Mays
ccgcgagtcgcgtcgactcggtcactcggcagtcggcacgccccgtgaggccgtgacgacaacccgcccgtggtcgcagtctcgctctcgcagacgcgtccgtgatccgtccgtcgccctccccttcctgcgcaagcgtgcgcctacctgcatccgctatccgtcggcgatgtcggtgccccccgccggcaagcgccaggtgtccctgcggggctcgagcgcgaaggagatcacacgcgacgcgctgctgcagaaggtttccgaggagcgccagctccgcagccacctccgccgcgccgccgcggccgccttctccatccagcgaatatggagaaggtaccatgtgataagaatggtttcagaacagctccatgaagactgggaactattaatgaaccagcctaacatcgacttgactactcaatggatatccaaaaagatgcttagaccgtttcttttcttcattactcaaccttctagctggtatattggacaatggagcaagactgtggaatctatcttaacatgcttcaagattatcttgaatagtataaattcaatggatgcaaggaaaaacttctgctcctttgctgtgggtataccagaagagagatctatttggctttatcaggccaaaaagctgatttcactgtgctcttccattcttgccaggtacgaccattcctgttgcaaggatggaagcatagtcgacatgactgctattgctatgagattggctgtctctctaactgattgcaaaacatggaaaagtttgaacagtgagaacactagcgctgcagatgcttctgtacagagtttgattgaatttattggtacgtgccagagtggcatgtataattgtgttaggcaatatataaagtctcttggtcctcatgttacttcagcgaagaaaagttctgcaactgcaacagatgatgattttcttattactgctagtgcagtcactttagccttgcgcccattcgattctaagaaagcaaagggcggtgttgatctgaatggtgcttcaaagaaatacttcacacttatacttacaataccagatctgtgcaaacgcatgccacctcttttgttacctgctcttaaacatttttctgtgctgcaaccgagtctcaatattttactgatctccaaggataaaatatttgaagaaataataaaactggaacagtcagaggtttcagctagtattattccttgttctggttgggctcttggaaatatagtgaacttagctaccaatcatgatgacttatccaattcagggtgtttcattcaagagttagatttctgcttatatgttgatgttattaattgtatttctgaaaacttactggaaagttttgagaaaagcaagggaacgtctcaaaatgttggtaatatcactttccatgccgacacatctgttgcagaggaagaggataccaatgacgactgcagaatgagaacattatttatggaccttctgaagccaatttaccagcaatggcaccttagaaaacttttgatgttggcaaaagaggattttccatgccgcagggcaactgattatgatccaaacttgaagaatattcactttcgaatcctaaagttgtcagatgttatatgcttctactatcacatgcttagaattttctcatcacttaacccttctatcggtgcaatgcctattctcaacatgcttgcattctcacctggatttctagttgatttatgggaggcactagaaatgcccatttttggtccacctatccagaattcacaagaaacaggacacgagaaacagttggctacaagtagttcaggtgtgcaagtatcctccatgaggcaaagaaggaatgccaaggacacagcaaacaggtggtcaaatgtgctccagaagattactggaaaatccaatgattcagaggagggcactttatctgatagtattttattttctcatgagtctaatgatgatgcattaacttcatgggatattgaagccatgagacatgcatctgagggtattggaaaggacttaatgtgcattatgtatcttttctgtgctatatatggacacctattacttgtgctagatgatatcgagttttatgaaaagcaggttccttttactttagagcagcagcggaagattgcatcagcacttaatacatttgtatacaattctttcattcaaaatagtggaagctacagcaatcctcttgtggatgtagctgtcagatgtcttaatctactctatgaaagggacagtaggcataagttttgtcctatttccttgtggttggcacctgctagaaatggccgaattccaattgctgctgctgccaggtctcatgaggcagcatttggtatttttccagggattcctcatcggagctctgtacttaccacattaccacatgtatatccatttgaagagagagtgcaaatgtttagagaatttattgagtcagacaaagcatcgagaagggttactggtgaagtttctgggccaggcccgggatcgattgagatagttattcgtcgaggccatataattgatgatggatacaggcagttgaactgcctaagatcaaagttgaaatcttgcattcacgtgtcatttgtgagtgaatgcggtcttcctgaagctggtttggactatggtggtctgtcaaaagagttcctaacagatctctcaaagtccgcttttagtccagagtatggactattttcacaaacatcagcatctgatactagcttaattcccagcaattctgctaagcttctggataacggaattgatatgattgaatttcttggtcgagttgtcggcaaagcactctatgaggggattctgttggactattctttctcaccagtatttgtgcagaaacttcttggacggtataattttctggatgaactatcaactcttgatcccgagctttatagaaatcttatgcaactaaagcactatgatggagatgttgaggatctatttttggattttactgtaactgaagagttgggtggtaaaagaatcgtccatgagcttagacctggtggtaaaaatatatcagtgacgaacgaaaacaagttacactatgttcatgcaatggcagatttcaaacttaaccgacagatacttccatttgcaaacgcattttatagaggactcagcgatctcatttcaccatattggctgagcctgtttaatgcaaatgaatttaatcagttactttcaggcggactacaggattttgacgttgatgatttgcggaacaacaccaagtatactggtggttatactgagtcaagtcgaactgttaaactcttctgggaggtatatgtatctgtacagttttgctcattttgcattaatggtttcttgctatttcctgttttgcattatatattttggggtgcatgtaacttggtaaggtcctaggattaccagcttggttacctatattcaatcaattacatacccaatttggaaatgtctggagcagtgcagttgttcatgtattttcttatctggtgataataacttttgaaaaaatatcatttgattttctgtaatataattatgaattgtgatcctgacatgctcacggatgaaacttgccttatacactcatgccatacttgcactgcatttctggcctatttgcttgtgtagcatgcacttgcccactcattttctatgctatataaacgattttctgtttgcctctgtcatttcagccaattttggtgatggtgaaataactatttttgttcaccaacagcaaatataaatattagtatggttcacacatttttactcgttatgcaggtcatcaaagcatttaagccaacagagcgttgtttgctcttaaagtttgtgacaagctgttcacgagctccactgcttggattcaagtacttgcaaccttctttcacaattcataaggttccatgtgatgtaacactttgggcatcaattggaggccaagatgtagatcgtcttccatctgcttccacatgctacaatacgctcaagcttcctacatacaagcggtcaagcacgctaaggagcaagctgctttacgccataagctcaaatactggatttgaactctcgtagaggtatattcagtggttttgtaaccctgctttggttttgctgtgaatagaggtatagcaaaattcgatcggatgtacaattgcatcttgattaatcggagtaacagcttctatgaaggtagcgcaatgcataaaaaatgtttgtttggccggcggggccgtttggatcgatcccaggcaaaatccgacgcctggggagctccgttcaccaggccggtttgcaattcaaacagccatacgtgtgtttctattgattgtgctgagagagagagagagagagagagagagagagagggaggggggagggagagggagatagagagagagtgagggaggagagagagagagagagagagagagagagagagagagagagagagagagagagagaaagagagagagagagagagagagagagagagagagagagag

SEQ ID NO: 218221 - DNA, 3749 bp, Zea Mays
cgacaacccgcccgtggtcgcagtctcgctctcgcagacgcgtccgtgatccgtccgtcgccctccccttcctgcgcaagcgtgcgcctacctgcatccgctatccgtcggcgatgtcggtgccccccgccggcaagcgccaggtgtccctgcggggctcgagcgcgaaggagatcacacgcgacgcgctgctgcagaaggtttccgaggagcgccagctccgcagccacctccgccgcgccgccgcggccgccttctccatccagcgaatatggagaaggtaccatgtgataagaatggtttcagaacagctccatgaagactgggaactattaatgaaccagcctaacatcgacttgactactcaatggatatccaaaaagatgcttagaccgtttcttttcttcattactcaaccttctagctggtatattggacaatggagcaagactgtggaatctatcttaacatgcttcaagattatcttgaatagtataaattcaatggatgcaaggaaaaacttctgctcctttgctgtgggtataccagaagagagatctatttggctttatcaggccaaaaagctgatttcactgtgctcttccattcttgccaggtacgaccattcctgttgcaaggatggaagcatagtcgacatgactgctattgctatgagattggctgtctctctaactgattgcaaaacatggaaaagtttgaacagtgagaacactagcgctgcagatgcttctgtacagagtttgattgaatttattggtacgtgccagagtggcatgtataattgtgttaggcaatatataaagtctcttggtcctcatgttacttcagcgaagaaaagttctgcaactgcaacagatgatgattttcttattactgctagtgcagtcactttagccttgcgcccattcgattctaagaaagcaaagggcggtgttgatctgaatggtgcttcaaagaaatacttcacacttatacttacaataccagatctgtgcaaacgcatgccacctcttttgttacctgctcttaaacatttttctgtgctgcaaccgagtctcaatattttactgatctccaaggataaaatatttgaagaaataataaaactggaacagtcagaggtttcagctagtattattccttgttctggttgggctcttggaaatatagtgaacttagctaccaatcatgatgacttatccaattcagggtgtttcattcaagagttagatttctgcttatatgttgatgttattaattgtatttctgaaaacttactggaaagttttgagaaaagcaagggaacgtctcaaaatgttggtaatatcactttccatgccgacacatctgttgcagaggaagaggataccaatgacgactgcagaatgagaacattatttatggaccttctgaagccaatttaccagcaatggcaccttagaaaacttttgatgttggcaaaagaggattttccatgccgcagggcaactgattatgatccaaacttgaagaatattcactttcgaatcctaaagttgtcagatgttatatgcttctactatcacatgcttagaattttctcatcacttaacccttctatcggtgcaatgcctattctcaacatgcttgcattctcacctggatttctagttgatttatgggaggcactagaaatgcccatttttggtccacctatccagaattcacaagaaacaggacacgagaaacagttggctacaagtagttcaggtgtgcaagtatcctccatgaggcaaagaaggaatgccaaggacacagcaaacaggtggtcaaatgtgctccagaagattactggaaaatccaatgattcagaggagggcactttatctgatagtattttattttctcatgagtctaatgatgatgcattaacttcatgggatattgaagccatgagacatgcatctgagggtattggaaaggacttaatgtgcattatgtatcttttctgtgctatatatggacacctattacttgtgctagatgatatcgagttttatgaaaagcaggttccttttactttagagcagcagcggaagattgcatcagcacttaatacatttgtatacaattctttcattcaaaatagtggaagctacagcaatcctcttgtggatgtagctgtcagatgtcttaatctactctatgaaagggacagtaggcataagttttgtcctatttccttgtggttggcacctgctagaaatggccgaattccaattgctgctgctgccaggtctcatgaggcagcatttggtatttttccagggattcctcatcggagctctgtacttaccacattaccacatgtatatccatttgaagagagagtgcaaatgtttagagaatttattgagtcagacaaagcatcgagaagggttactggtgaagtttctgggccaggcccgggatcgattgagatagttattcgtcgaggccatataattgatgatggatacaggcagttgaactgcctaagatcaaagttgaaatcttgcattcacgtgtcatttgtgagtgaatgcggtcttcctgaagctggtttggactatggtggtctgtcaaaagagttcctaacagatctctcaaagtccgcttttagtccagagtatggactattttcacaaacatcagcatctgatactagcttaattcccagcaattctgctaagcttctggataacggaattgatatgattgaatttcttggtcgagttgtcggcaaagcactctatgaggggattctgttggactattctttctcaccagtatttgtgcagaaacttcttggacggtataattttctggatgaactatcaactcttgatcccgagctttatagaaatcttatgcaactaaagcactatgatggagatgttgaggatctatttttggattttactgtaactgaagagttgggtggtaaaagaatcgtccatgagcttagacctggtggtaaaaatatatcagtgacgaacgaaaacaagttacactatgttcatgcaatggcagatttcaaacttaaccgacagatacttccatttgcaaacgcattttatagaggactcagcgatctcatttcaccatattggctgagcctgtttaatgcaaatgaatttaatcagttactttcaggcggactacaggattttgacgttgatgatttgcggaacaacaccaagtatactggtggttatactgagtcaagtcgaactgttaaactcttctgggaggtcatcaaagcatttaagccaacagagcgttgtttgctcttaaagtttgtgacaagctgttcacgagctccactgcttggattcaagtacttgcaaccttctttcacaattcataaggttccatgtgatgtaacactttgggcatcaattggaggccaagatgtagatcgtcttccatctgcttccacatgctacaatacgctcaagcttcctacatacaagcggtcaagcacgctaaggagcaagctgctttacgccataagctcaaatactggatttgaactctcgtagagtgtccagatgtcttgatgacgtcactgctaaacaacctctcttatgccgagtcatcgtcagagcatatcctgtaatgtcttcacgctatcgccgtgaccatatggtcttctatcaataacttcgacctctcaagacatcaggaaagttatgatattgatttct

SEQ ID NO: 218222 - DNA, 3628 bp, Zea Mays
cgacaacccgcccgtggtcgcagtctcgctctcgcagacgcgtccgtgatccgtccgtcgccctccccttcctgcgcaagcgtgcgcctacctgcatccgctatccgtcggcgatgtcggtgccccccgccggcaagcgccaggtgtccctgcggggctcgagcgcgaaggagatcacacgcgacgcgctgctgcagaaggtttccgaggagcgccagctccgcagccacctccgccgcgccgccgcggccgccttctccatccagcgaatatggagaaggtaccatgtgataagaatggtttcagaacagctccatgaagactgggaactattaatgaaccagcctaacatcgacttgactactcaatggatatccaaaaagatgcttagaccgtttcttttcttcattactcaaccttctagctggtatattggacaatggagcaagactgtggaatctatcttaacatgcttcaagattatcttgaatagtataaattcaatggatgcaaggaaaaacttctgctcctttgctgtgggtataccagaagagagatctatttggctttatcaggccaaaaagctgatttcactgtgctcttccattcttgccaggtacgaccattcctgttgcaaggatggaagcatagtcgacatgactgctattgctatgagattggctgtctctctaactgattgcaaaacatggaaaagtttgaacagtgagaacactagcgctgcagatgcttctgtacagagtttgattgaatttattggtacgtgccagagtggcatgtataattgtgttaggcaatatataaagtctcttggtcctcatgttacttcagcgaagaaaagttctgcaactgcaacagatgatgattttcttattactgctagtgcagtcactttagccttgcgcccattcgattctaagaaagcaaagggcggtgttgatctgaatggtgcttcaaagaaatacttcacacttatacttacaataccagatctgtgcaaacgcatgccacctcttttgttacctgctcttaaacatttttctgtgctgcaaccgagtctcaatattttactgatctccaaggataaaatatttgaagaaataataaaactggaacagtcagaggtttcagctagtattattccttgttctggttgggctcttggaaatatagtgaacttagctaccaatcatgatgacttatccaattcagggtgtttcattcaagagttagatttctgcttatatgttgatgttattaattgtatttctgaaaacttactggaaagttttgagaaaagcaagggaacgtctcaaaatgttggtaatatcactttccatgccgacacatctgttgcagaggaagaggataccaatgacgactgcagaatgagaacattatttatggaccttctgaagccaatttaccagcaatggcaccttagaaaacttttgatgttggcaaaagaggattttccatgccgcagggcaactgattatgatccaaacttgaagaatattcactttcgaatcctaaagttgtcagatgttatatgcttctactatcacatgcttagaattttctcatcacttaacccttctatcggtgcaatgcctattctcaacatgcttgcattctcacctggatttctagttgatttatgggaggcactagaaatgcccatttttggtccacctatccagaattcacaagaaacaggacacgagaaacagttggctacaagtagttcaggtgtgcaagtatcctccatgaggcaaagaaggaatgccaaggacacagcaaacaggtggtcaaatgtgctccagaagattactggaaaatccaatgattcagaggagggcactttatctgatagtattttattttctcatgagtctaatgatgatgcattaacttcatgggatattgaagccatgagacatgcatctgagggtattggaaaggacttaatgtgcattatgtatcttttctgtgctatatatggacacctattacttgtgctagatgatatcgagttttatgaaaagcaggttccttttactttagagcagcagcggaagattgcatcagcacttaatacatttgtatacaattctttcattcaaaatagtggaagctacagcaatcctcttgtggatgtagctgtcagatgtcttaatctactctatgaaagggacagtaggcataagttttgtcctatttccttgtggttggcacctgctagaaatggccgaattccaattgctgctgctgccaggtctcatgaggcagcatttggtatttttccagggattcctcatcggagctctgtacttaccacattaccacatgtatatccatttgaagagagagtgcaaatgtttagagaatttattgagtcagacaaagcatcgagaagggttactggtgaagtttctgggccaggcccgggatcgattgagatagttattcgtcgaggccatataattgatgatggatacaggcagttgaactgcctaagatcaaagttgaaatcttgcattcacgtgtcatttgtgagtgaatgcggtcttcctgaagctggtttggactatggtggtctgtcaaaagagttcctaacagatctctcaaagtccgcttttagtccagagtatggactattttcacaaacatcagcatctgatactagcttaattcccagcaattctgctaagcttctggataacggaattgatatgattgaatttcttggtcgagttgtcggcaaagcactctatgaggggattctgttggactattctttctcaccagtatttgtgcagaaacttcttggacggtataattttctggatgaactatcaactcttgatcccgagctttatagaaatcttatgcaactaaagcactatgatggagatgttgaggatctatttttggattttactgtaactgaagagttgggtggtaaaagaatcgtccatgagcttagacctggtggtaaaaatatatcagtgacgaacgaaaacaagttacactatgttcatgcaatggcagatttcaaacttaaccgacagatacttccatttgcaaacgcattttatagaggactcagcgatctcatttcaccatattggctgagcctgtttaatgcaaatgaatttaatcagttactttcaggcggactacaggattttgacgttgatgatttgcggaacaacaccaagtatactggtggttatactgagtcaagtcgaactgttaaactcttctgggaggtcatcaaagcatttaagccaacagagcgttgtttgctcttaaagtttgtgacaagctgttcacgagctccactgcttggattcaagtacttgcaaccttctttcacaattcataaggttccatgtgatgtaacactttgggcatcaattggaggccaagatgtagatcgtcttccatctgcttccacatgctacaatacgctcaagcttcctacatacaagcggtcaagcacgctaaggagcaagctgctttacgccataagctcaaatactggatttgaactctcgtagaggctcctagtccttgtcggtccaacaacggagatggtgacatg

SEQ ID NO: 218223 - DNA, 3756 bp, Zea Mays
ctctcgcagacgcgtccgtgatccgtccgtcgccctccccttcctgcgcaagcgtgcgcctacctgcatccgctatccgtcggcgatgtcggtgccccccgccggcaagcgccaggtgtccctgcggggctcgagcgcgaaggagatcacacgcgacgcgctgctgcagaaggtttccgaggagcgccagctccgcagccacctccgccgcgccgccgcggccgccttctccatccagatgcaaggaaaaacttctgctcctttgctgtgggtataccagaagagagatctatttggctttatcaggccaaaaagctgatttcactgtgctcttccattcttgccaggtacgaccattcctgttgcaaggatggaagcatagtcgacatgactgctattgctatgagattggctgtctctctaactgattgcaaaacatggaaaagtttgaacagtgagaacactagcgctgcagatgcttctgtacagagtttgattgaatttattggtacgtgccagagtggcatgtataattgtgttaggcaatatataaagtctcttggtcctcatgttacttcagcgaagaaaagttctgcaactgcaacagatgatgattttcttattactgctagtgcagtcactttagccttgcgcccattcgattctaagaaagcaaagggcggtgttgatctgaatggtgcttcaaagaaatacttcacacttatacttacaataccagatctgtgcaaacgcatgccacctcttttgttacctgctcttaaacatttttctgtgctgcaaccgagtctcaatattttactggtggcggcagatctccaaggataaaatatttgaagaaataataaaactggaacagtcagaggtttcagctagtattattccttgttctggttgggctcttggaaatatagtgaacttagctaccaatcatgatgacttatccaattcagggtgtttcattcaagagttagatttctgcttatatgttgatgttattaattgtatttctgaaaacttactggaaagttttgagaaaagcaagggaacgtctcaaaatgttggtaatatcactttccatgccgacacatctgttgcagaggaagaggataccaatgacgactgcagaatgagaacattatttatggaccttctgaagccaatttaccagcaatggcaccttagaaaacttttgatgttggcaaaagaggattttccatgccgcagggcaactgattatgatccaaacttgaagaatattcactttcgaatcctaaagttgtcagatgttatatgcttctactatcacatgcttagaattttctcatcacttaacccttctatcggtgcaatgcctattctcaacatgcttgcattctcacctggatttctagttgatttatgggaggcactagaaatgcccatttttggtccacctatccagaattcacaagaaacaggacacgagaaacagttggctacaagtagttcaggtgtgcaagtatcctccatgaggcaaagaaggaatgccaaggacacagcaaacaggtggtcaaatgtgctccagaagattactggaaaatccaatgattcagaggagggcactttatctgatagtattttattttctcatgagtctaatgatgatgcattaacttcatgggatattgaagccatgagacatgcatctgagggtattggaaaggacttaatgtgcattatgtatcttttctgtgctatatatggacacctattacttgtgctagatgatatcgagttttatgaaaagcaggttccttttactttagagcagcagcggaagattgcatcagcacttaatacatttgtatacaattctttcattcaaaatagtggaagctacagcaatcctcttgtggatgtagctgtcagatgtcttaatctactctatgaaagggacagtaggcataagttttgtcctatttccttgtggttggcacctgctagaaatggccgaattccaattgctgctgctgccaggtctcatgaggcagcatttggtatttttccagggattcctcatcggagctctgtacttaccacattaccacatgtatatccatttgaagagagagtgcaaatgtttagagaatttattgagtcagacaaagcatcgagaagggttactggtgaagtttctgggccaggcccgggatcgattgagatagttattcgtcgaggccatataattgatgatggatacaggcagttgaactgcctaagatcaaagttgaaatcttgcattcacgtgtcatttgtgagtgaatgcggtcttcctgaagctggtttggactatggtggtctgtcaaaagagttcctaacagatctctcaaagtccgcttttagtccagagtatggactattttcacaaacatcagcatctgatactagcttaattcccagcaattctgctaagcttctggataacggaattgatatgattgaatttcttggtcgagttgtcggcaaagcactctatgaggggattctgttggactattctttctcaccagtatttgtgcagaaacttcttggacggtataattttctggatgaactatcaactcttgatcccgagctttatagaaatcttatgcaactaaagcactatgatggagatgttgaggatctatttttggattttactgtaactgaagagttgggtggtaaaagaatcgtccatgagcttagacctggtggtaaaaatatatcagtgacgaacgaaaacaagttacactatgttcatgcaatggcagatttcaaacttaaccgacagatacttccatttgcaaacgcattttatagaggactcagcgatctcatttcaccatattggctgagcctgtttaatgcaaatgaatttaatcagttactttcaggcggactacaggattttgacgttgatgatttgcggaacaacaccaagtatactggtggttatactgagtcaagtcgaactgttaaactcttctgggaggtcatcaaagcatttaagccaacagagcgttgtttgctcttaaagtttgtgacaagctgttcacgagctccactgcttggattcaagtacttgcaaccttctttcacaattcataaggttccatgtgatgtaacactttgggcatcaattggaggccaagatgtagatcgtcttccatctgcttccacatgctacaatacgctcaagcttcctacatacaagcggtcaagcacgctaaggagcaagctgctttacgccataagctcaaatactggatttgaactctcgtagaggtatattcagtggttttgtaaccctgctttggttttgctgtgaatagaggtatagcaaaattcgatcggatgtacaattgcatcttgattaatcggagtaacagcttctatgaaggtagcgcaatgcataaaaaatgtttgtttggccggcggggccgtttggatcgatcccaggcaaaatccgacgcctggggagctccgttcaccaggccggtttgcaattcaaacagccatacgtgtgtttctattgattgtgctgagagagagagagagagagagagagagagagagggaggggggagggagagggagatagagagagagtgagggaggagagagagagagagagagagagagagagagagagagagagagagagagagagagaaagagagagagagagagagagagagagagagagagagagag

SEQ ID NO: 218224 - DNA, 4514 bp, Zea Mays
acgcgtccgtgatccgtccgtcgccctccccttcctgcgcaagcgtgcgcctacctgcatccgctatccgtcggcgatgtcggtgccccccgccggcaagcgccaggtgtccctgcggggctcgagcgcgaaggagatcacacgcgacgcgctgctgcagaaggtttccgaggagcgccagctccgcagccacctccgccgcgccgccgcggccgccttctccatccagcgaatatggagaaggtaccatgtgataagaatggtttcagaacagctccatgaagactgggaactattaatgaaccagcctaacatcgacttgactactcaatggatatccaaaaagatgcttagaccgtttcttttcttcattactcaaccttctagctggtatattggacaatggagcaagactgtggaatctatcttaacatgcttcaagattatcttgaatagtataaattcaatggatgcaaggaaaaacttctgctcctttgctgtgggtataccagaagagagatctatttggctttatcaggccaaaaagctgatttcactgtgctcttccattcttgccaggtacgaccattcctgttgcaaggatggaagcatagtcgacatgactgctattgctatgagattggctgtctctctaactgattgcaaaacatggaaaagtttgaacagtgagaacactagcgctgcagatgcttctgtacagagtttgattgaatttattggtacgtgccagagtggcatgtataattgtgttaggcaatatataaagtctcttggtcctcatgttacttcagcgaagaaaagttctgcaactgcaacagatgatgattttcttattactgctagtgcagtcactttagccttgcgcccattcgattctaagaaagcaaagggcggtgttgatctgaatggtgcttcaaagaaatacttcacacttatacttacaataccagatctgtgcaaacgcatgccacctcttttgttacctgctcttaaacatttttctgtgctgcaaccgagtctcaatattttactggtggcggcagatctccaaggataaaatatttgaagaaataataaaactggaacagtcagaggtttcagctagtattattccttgttctggttgggctcttggaaatatagtgaacttagctaccaatcatgatgacttatccaattcagggtgtttcattcaagagttagatttctgcttatatgttgatgttattaattgtatttctgaaaacttactggaaagttttgagaaaagcaagggaacgtctcaaaatgttggtaatatcactttccatgccgacacatctgttgcagaggaagaggataccaatgacgactgcagaatgagaacattatttatggaccttctgaagccaatttaccagcaatggcaccttagaaaacttttgatgttggcaaaagaggattttccatgccgcagggcaactgattatgatccaaacttgaagaatattcactttcgaatcctaaagttgtcagatgttatatgcttctactatcacatgcttagaattttctcatcacttaacccttctatcggtgcaatgcctattctcaacatgcttgcattctcacctggatttctagttgatttatgggaggcactagaaatgcccatttttggtccacctatccagaattcacaagaaacaggacacgagaaacagttggctacaagtagttcaggtgtgcaagtatcctccatgaggcaaagaaggaatgccaaggacacagcaaacaggtggtcaaatgtgctccagaagattactggaaaatccaatgattcagaggagggcactttatctgatagtattttattttctcatgagtctaatgatgatgcattaacttcatgggatattgaagccatgagacatgcatctgagggtattggaaaggacttaatgtgcattatgtatcttttctgtgctatatatggacacctattacttgtgctagatgatatcgagttttatgaaaagcaggttccttttactttagagcagcagcggaagattgcatcagcacttaatacatttgtatacaattctttcattcaaaatagtggaagctacagcaatcctcttgtggatgtagctgtcagatgtcttaatctactctatgaaagggacagtaggcataagttttgtcctatttccttgtggttggcacctgctagaaatggccgaattccaattgctgctgctgccaggtctcatgaggcagcatttggtatttttccagggattcctcatcggagctctgtacttaccacattaccacatgtatatccatttgaagagagagtgcaaatgtttagagaatttattgagtcagacaaagcatcgagaagggttactggtgaagtttctgggccaggcccgggatcgattgagatagttattcgtcgaggccatataattgatgatggatacaggcagttgaactgcctaagatcaaagttgaaatcttgcattcacgtgtcatttgtgagtgaatgcggtcttcctgaagctggtttggactatggtggtctgtcaaaagagttcctaacagatctctcaaagtccgcttttagtccagacaattctgctaagcttctggataacggaattgatatgattgaatttcttggtcgagttgtcggcaaagcactctatgaggggattctgttggactattctttctcaccagtatttgtgcagaaacttcttggacggtataattttctggatgaactatcaactcttgatcccgagctttatagaaatcttatgcaactaaagcactatgatggagatgttgaggatctatttttggattttactgtaactgaagagttgggtggtaaaagaatcgtccatgagcttagacctggtggtaaaaatatatcagtgacgaacgaaaacaagttacactatgttcatgcaatggcagatttcaaacttaaccgacaggttcgtgacactgttttctcttgatttactaggttttgttcggtaccagtaaagttttttgttagcaccattgtccttgcagatacttccatttgcaaacgcattttatagaggactcagcgatctcatttcaccatattggctgagcctgtttaatgcaaatgaatttaatcagttactttcaggcggactacaggattttgacgttgatgatttgcggaacaacaccaagtatactggtggttatactgagtcaagtcgaactgttaaactcttctgggaggtatatgtatctgtacagttttgctcattttgcattaatggtttcttgctatttcctgttttgcattatatattttggggtgcatgtaacttggtaaggtcctaggattaccagcttggttacctatattcaatcaattacatacccaatttggaaatgtctggagcagtgcagttgttcatgtattttcttatctggtgataataacttttgaaaaaatatcatttgattttctgtaatataattatgaattgtgatcctgacatgctcacggatgaaacttgccttatacactcatgccatacttgcactgcatttctggcctatttgcttgtgtagcatgcacttgcccactcattttctatgctatataaacgattttctgtttgcctctgtcatttcagccaattttggtgatggtgaaataactatttttgttcaccaacagcaaatataaatattagtatggttcacacatttttactcgttatgcaggtcatcaaagcatttaagccaacagagcgttgtttgctcttaaagtttgtgacaagctgttcacgagctccactgcttggattcaagtacttgcaaccttctttcacaattcataaggttccatgtgatgtaacactttgggcatcaattggaggccaagatgtagatcgtcttccatctgcttccacatgctacaatacgctcaagcttcctacatacaagcggtcaagcacgctaaggagcaagctgctttacgccataagctcaaatactggatttgaactctcgtagaggtatattcagtggttttgtaaccctgctttggttttgctgtgaatagaggtatagcaaaattcgatcggatgtacaattgcatcttgattaatcggagtaacagcttctatgaaggtagcgcaatgcataaaaaatgtttgtttggccggcggggccgtttggatcgatcccaggcaaaatccgacgcctggggagctccgttcaccaggccggtttgcaattcaaacagccatacgtgtgtttctattgattgtgctgagagagagagagagagagagagagagagagagggaggggggagggagagggagatagagagagagtgagggaggagagagagagagagagagagagagagagagagagagagagagagagagagagagaaagagagagagagagagagagagagagagagagagagagag

SEQ ID NO: 218225 - DNA, 4500 bp, Zea Mays
acgcgtccgtgatccgtccgtcgccctccccttcctgcgcaagcgtgcgcctacctgcatccgctatccgtcggcgatgtcggtgccccccgccggcaagcgccaggtgtccctgcggggctcgagcgcgaaggagatcacacgcgacgcgctgctgcagaaggtttccgaggagcgccagctccgcagccacctccgccgcgccgccgcggccgccttctccatccagcgaatatggagaaggtaccatgtgataagaatggtttcagaacagctccatgaagactgggaactattaatgaaccagcctaacatcgacttgactactcaatggatatccaaaaagatgcttagaccgtttcttttcttcattactcaaccttctagctggtatattggacaatggagcaagactgtggaatctatcttaacatgcttcaagattatcttgaatagtataaattcaatggatgcaaggaaaaacttctgctcctttgctgtgggtataccagaagagagatctatttggctttatcaggccaaaaagctgatttcactgtgctcttccattcttgccaggtacgaccattcctgttgcaaggatggaagcatagtcgacatgactgctattgctatgagattggctgtctctctaactgattgcaaaacatggaaaagtttgaacagtgagaacactagcgctgcagatgcttctgtacagagtttgattgaatttattggtacgtgccagagtggcatgtataattgtgttaggcaatatataaagtctcttggtcctcatgttacttcagcgaagaaaagttctgcaactgcaacagatgatgattttcttattactgctagtgcagtcactttagccttgcgcccattcgattctaagaaagcaaagggcggtgttgatctgaatggtgcttcaaagaaatacttcacacttatacttacaataccagatctgtgcaaacgcatgccacctcttttgttacctgctcttaaacatttttctgtgctgcaaccgagtctcaatattttactggtggcggcagatctccaaggataaaatatttgaagaaataataaaactggaacagtcagaggtttcagctagtattattccttgttctggttgggctcttggaaatatagtgaacttagctaccaatcatgatgacttatccaattcagggtgtttcattcaagagttagatttctgcttatatgttgatgttattaattgtatttctgaaaacttactggaaagttttgagaaaagcaagggaacgtctcaaaatgttggtaatatcactttccatgccgacacatctgttgcagaggaagaggataccaatgacgactgcagaatgagaacattatttatggaccttctgaagccaatttaccagcaatggcaccttagaaaacttttgatgttggcaaaagaggattttccatgccgcagggcaactgattatgatccaaacttgaagaatattcactttcgaatcctaaagttgtcagatgttatatgcttctactatcacatgcttagaattttctcatcacttaacccttctatcggtgcaatgcctattctcaacatgcttgcattctcacctggatttctagttgatttatgggaggcactagaaatgcccatttttggtccacctatccagaattcacaagaaacaggacacgagaaacagttggctacaagtagttcaggtgtgcaagtatcctccatgaggcaaagaaggaatgccaaggacacagcaaacaggtggtcaaatgtgctccagaagattactggaaaatccaatgattcagaggagggcactttatctgatagtattttattttctcatgagtctaatgatgatgcattaacttcatgggatattgaagccatgagacatgcatctgagggtattggaaaggacttaatgtgcattatgtatcttttctgtgctatatatggacacctattacttgtgctagatgatatcgagttttatgaaaagcaggttccttttactttagagcagcagcggaagattgcatcagcacttaatacatttgtatacaattctttcattcaaaatagtggaagctacagcaatcctcttgtggatgtagctgtcagatgtcttaatctactctatgaaagggacagtaggcataagttttgtcctatttccttgtggttggcacctgctagaaatggccgaattccaattgctgctgctgccaggtctcatgaggcagcatttggtatttttccagggattcctcatcggagctctgtacttaccacattaccacatgtatatccatttgaagagagagtgcaaatgtttagagaatttattgagtcagacaaagcatcgagaagggttactggtgaagtttctgggccaggcccgggatcgattgagatagttattcgtcgaggccatataattgatgatggatacaggcagttgaactgcctaagatcaaagttgaaatcttgcattcacgtgtcatttgtgagtgaatgcggtcttcctgaagctggtttggactatggtggtctgtcaaaagagttcctaacagatctctcaaagtccgcttttagtccagagtatggactattttcacaaacatcagcatctgatactagcttaattcccagcaattctgctaagcttctggataacggaattgatatgattgaatttcttggtcgagttgtcggcaaagcactctatgaggggattctgttggactattctttctcaccagtatttgtgcagaaacttcttggacggtataattttctggatgaactatcaactcttgatcccgagctttatagaaatcttatgcaactaaagcactatgatggagatgttgaggatctatttttggattttactgtaactgaagagttgggtggtaaaagaatcgtccatgagcttagacctggtggtaaaaatatatcagtgacgaacgaaaacaagttacactatgttcatgcaatggcagatttcaaacttaaccgacagcaccattgtccttgcagatacttccatttgcaaacgcattttatagaggactcagcgatctcatttcaccatattggctgagcctgtttaatgcaaatgaatttaatcagttactttcaggcggactacaggattttgacgttgatgatttgcggaacaacaccaagtatactggtggttatactgagtcaagtcgaactgttaaactcttctgggaggtatatgtatctgtacagttttgctcattttgcattaatggtttcttgctatttcctgttttgcattatatattttggggtgcatgtaacttggtaaggtcctaggattaccagcttggttacctatattcaatcaattacatacccaatttggaaatgtctggagcagtgcagttgttcatgtattttcttatctggtgataataacttttgaaaaaatatcatttgattttctgtaatataattatgaattgtgatcctgacatgctcacggatgaaacttgccttatacactcatgccatacttgcactgcatttctggcctatttgcttgtgtagcatgcacttgcccactcattttctatgctatataaacgattttctgtttgcctctgtcatttcagccaattttggtgatggtgaaataactatttttgttcaccaacagcaaatataaatattagtatggttcacacatttttactcgttatgcaggtcatcaaagcatttaagccaacagagcgttgtttgctcttaaagtttgtgacaagctgttcacgagctccactgcttggattcaagtacttgcaaccttctttcacaattcataaggttccatgtgatgtaacactttgggcatcaattggaggccaagatgtagatcgtcttccatctgcttccacatgctacaatacgctcaagcttcctacatacaagcggtcaagcacgctaaggagcaagctgctttacgccataagctcaaatactggatttgaactctcgtagaggtatattcagtggttttgtaaccctgctttggttttgctgtgaatagaggtatagcaaaattcgatcggatgtacaattgcatcttgattaatcggagtaacagcttctatgaaggtagcgcaatgcataaaaaatgtttgtttggccggcggggccgtttggatcgatcccaggcaaaatccgacgcctggggagctccgttcaccaggccggtttgcaattcaaacagccatacgtgtgtttctattgattgtgctgagagagagagagagagagagagagagagagagggaggggggagggagagggagatagagagagagtgagggaggagagagagagagagagagagagagagagagagagagagagagagagagagagagaaagagagagagagagagagagagagagagagagagagagag

SEQ ID NO: 218226 - DNA, 3914 bp, Zea Mays
ccgcgactgcagcgtcggcggctgggaccagcggatgtgcgttcctctctctagaagctccgtccgtcttcacagccttttcctcccaacaacgcataatattagctagggtttcaacgcatctgacggcggaagctagggcgtcgccaccgtcaatgtcttggcactcccgctctgttcatcaatcgcatcgacaggtgctccatgattctctataacatccgaaataaattaggattaaagcaagaataggaagttattcaaaactcaaaagtaaagggtttccggtcttccagttaaatgaccaaatgacctgtagaatgacagcaagcaagcaaaataaacggcagacaaattgcaccaactcagagcagtgcaggccagggaagaaagcaaaatttgacacatctcattgtctagtaagtttgaagcctcatatcagtcttaaatgggatcaatatctgaggaaagttgtgccagagaaggaacaagttggaattttgtggtcagacttggcccctttcatggaaagccagaaacactgttcaggccttgctgatgttatgtatgttcctccagagattttctctcttaagagcctgaaaggtgtgctatcctatgaggcatggtctacatctcttacagaagccgagagaaaatttctcatacaattccttccaagcgagactgatgcagaagaaaatgtaaaattgttgcttacgggacaaaatcatcactttggaaatcctttccttagctggtcatcttctctttgctatggtgatattcatccggatgcactacttaacaaggagaagcacataaaaaaggatgagaaggcatatcatgttaacttgcttaattaccattccaacatggttgaaaccttgaagagttggaggaagagatggctaagttgcggtgatacagagaatttgttcagggataaccctagtaatcagatgcaaggagttatgcagctgaaagctactaacagtggaatgcccatgaaggttgcacaaagaatcgatgtttcaaagtttatgtcatacatcaaagttagtagaacacagctcaaccatataaagagactgaagcaatctggggatggtattcagaccaagcatgtttcacgtgtaattggcggccttgataaatctcatgtgaaaccttatggagctttattagaggatgaacagaggagactgcgcgagcattggctggaaatgtcttgcaatgatttacctgctgcctttgaggttcttagggaaaggaaggtgctgatggagaaatcaataaagttattaggccttgagcttcagcagaagaatgtatctgtcttgagaaaggttcgctgtgacttgtccttcaattctttttcttaagtctctaatttttgtcttgagggaagtgatttacttgaatgtgtaaaaaatacagtggatgagaataccgttgtatgcttacttctgttatgtatcttccccatttacaatgtatcatagcattcgccactatagatgagaataccatgactataaagatactgaattgtaatagaggcatctagtatgaaagccataggcagtatttcattatgaatggtgaattgccctgcagtgttatcttatttgtataagctaatatattgtcacatttttgtaagtatactttgttgtaatcttcataatgaaaataaattcttataaaaaacaatcttaatttgtttttaatacccaatagatgattatggtttatttatgtttgtttatgatgagaaggcagaccagttaacagacataatgaaagggctaggacaacctggtgctagtgaaaatgatggtaccccagtttttcaaaatgaccaggtagaatgctcaccccaaagtatattgcaaggtgggcatgttcagagcacatctcttcaccatcaggatgatgagcagtctgtttaccatattcaccgtatgaatgtggaagatcatgatctcatggtagtcaggggtatagacataactagtcagagtgagaaaaactctgatgtgccagatcaaagtcgtaatggtatcagctgcgtagataaaggcatttactgctgtgccaacaaccctgataagcagagtgatgttctcatggacatcaaattatgtaaaggtggactggttgtttacaatcctgactgcaaaaatacgcaactagaagatcttgatggagtttcttacaaaggtccatcagttcatgcttgtgaccaagatcaggacctggaaagcatcggccatgctgttgtgaaccacaattgtcacaatagtccaaatatttcttcggaaatgagtcatccgacgacgaacgctgtaattgaccaggaaactgagaatgttatggaaccatcttgcagttcttcacaactacctaagtcgtctggagaacaaatgcatgtggaagattttctgtatctaaatgaccaagcagcaaaatttgagaaagtcagtgggcagttggcaggccctcttggccctccagagaatatgatgtataatgactcaggtgacttgcagattaaacagacttatctctcttcaggacaacatttttcttcagtttacttgaataatggcattttaagccatcagcaacctcaacttgccacaccagcttttgctttggacaatccagcatcatttattgagcctttctcaaatctgcagagcaatcgtcagcccgagacagaaaaggacattggagcagtcttctatccctttcgacacgcaactaacatcaaacagtcagcgagtttgcattgtttagtgaataaaggcttggctcaatctgcttcatttcccaggttgttgcaagagcggcatcagttaatcgatcagagtgacagtgacctctatgcacaacctcatgaggattactgcacagatgtataactggttccccgagggctgtcagtcacataataataatgataatctgttggggttgcagtcaggtaacttcttaccccaggccttaccaagtggaagcagcaccgatggagctctgttcagcaccgcatcccagtacaatcagccatcagtacacatgggacatggtgggtcaaaccgcagccaactcattgagccaaggaatcaatttggcccacctcagaattttctttctaagagtcaagacacaaaccctatgtttccggatatgtatggcttcacccagaatatagccagtggcacaagcagtcaggtagcacctatagggtctctggattgctcacattggacaaatttcatacaacaaaattctggaatgccgtctgactttacaaacaggccatctcgagggccttggaccagataactctatgacaccctggactggatgtactagattggttggttttaggcgccacctaagttggttaataaggaaactggggcaggaattgcttttgcaccatacctgtctgaacgcaagcgctgggaatctggagtcaaagctgaggattcccgcttttgctgtcttgccctgctgattttttttttattttgataataagctgtgccccagtttccatgtgtagtctgcctatggtgccctcagcaaaacatgatgctgtgttgttctcaattattttgttatttttttttgggttgacatgccagttatatatgaagacaagatatgtataccagtcgggatgccattttaggtatcaagagcgggcagttcgaaatgaacaagtacctttccttttggttgggaggcactaggatttctttattcaggcgtgtttacattccgtttgattagttggccgcaccgtttcgtcctaagtcacttagtgtattgactttatctaaatgtttgtttggttgtctgtacatagtgatgtataaagcgtatagcgtagatttagc

SEQ ID NO: 218227 - DNA, 2013 bp, Zea Mays
tatcaaactgggcgcagcactttctaataatactcgtttcaactattgcaactgtctgcatatttcttgggtcaaagatagaagacacaccttgtcaattgaaacacgtggtcattgtgtcatatgaaacaatgtaccataaaaatccggatgctgctaagagaatccaccaggagcatgaagtgcttgcgaagcaaaaggcactgattttggtgggggagacactgctgctttcaacaataaggtttgatttcaatatacatcatccttatgaacctctaaagctcgcgctgaagaagctgggcattgccgagacggaactgagacaatctgctatgagtctcattaacgatacgcttccgtcaactctagtcatccagttcaaaccacagtatattgctgcggcatcactgtggtttgctgccaaatttcacaacgttaatctttcccagaatgggacaatatggtggcatgtgttcgatgttgctccagatccgttgagagttgttgtgcagcaaatgtctgagctctttgagaaaagagccccatgctccgtgggtcctgttaccaagccagtaccagcttcaagcgcgacggataaacaccagatcaagccggccccaactcatactccaatggataagcatcagatcaagcaggttccagctccaatgaatagacatcagatcaagccggtcccaactccaactccaatggataagcatcatatcaagcagatcccagctccagctccaacgtgtagacatcatatcaagccggttccaactcccatcccaactccgatggataagcagcagaacaagctagctccaactccgatggataagcagcagaacaagctagctccaactccgatggacaaacagcagaacaagccggctgcagctccagctccgacggacagatgtcagagagtaagcaccccggttcctgcaccgagggacacgcaatcttcaaggagaagctttagcagcagcagcaacacagaagctcctagacgtgtgcctgcaggccgttcatctaacgagaagcccagagacaggtcgccaaggcatgaagggcactggtgccgaggaaaggatggagagaaccagcattgtcaaaaacacagagaccataactctgagcagaggccagaagaacggtctaatcagagagctctgaagtctggtcttgcttaccttgttcgtagtggtgggccgaaggatacaggtgcagcaacagagatcaggaacctgaccagacggaagagaaggatccaggaggttggagggctcccaactcctgtttacacgtcggatacggatgcttggaggcaagttagcgctgtagttctttttggaacgaagggacagaaaaggccgagaggagatgaaccgtaggagttgccgccttttttatttggtattttgcagagaaggtcgagagaagatgaaccgcgtaggagttgccgttttcatttggtatttggcagagaccgacggctggtctttgctggactgatgatactttgagacaaaggtgtctaatgtggacggggtctgtgaattaagttcactcgtgcgcatcagatgcacccagcttgcactgaaaatgacacgctattgtctccatggaccaggctgttccggttctgtaggcacggatggacagtgatggagagaaagctggttttgggcaccacctggtgccagccatctttgttttggactgagctgtatggctcaaaacaaattttgtagtgtgtgtccatgtgtatattaggacggtgttctaattctgtctcagatcgtccagtgctatttagttatttacaccgtgcctgtctgtccttcgagttctcagtttttagtggcttattggtgaaaatttgttatccgtttgaaatttctcatgcgaacgaggaggagatttgacagtgccttggccgtcgacacaatccgccaacacatttgatcattaccagcttctgcaatatgctctagagagcct

SEQ ID NO: 218228 - DNA, 4296 bp, Zea Mays
atcctgccttgagtgttcgtgcaacgctgcccctgccgcgtcgtcttctggaccgcttctccactccgcccagctcgcagtcgcagctcgctcaaagcagcacagcagcaagcagaaggaagaaaaagagcagcgagagccgagaagagaagcgcgccgccgctcgagctcatcccgccgccggacacaccgcatggccatgaggcacagggcgcggtcctcccccacctccccgctcaccccgtcctccagcgcaagaacaaacaagatacttggtttctctgtatctctcatcctcatcaatctggcttcaattatggagcgtgctgatgagaatctccttccagcagtttacaaggaagtcagtgcagccttcaatgctggtcctgcagatctgggatacctcacctttgtaatgaactttctgaagtcaatagcatctcccttggcaggtatccttgctctgcactatgatcggccaatagtgcttgcaatagggactgttttctgggccttatcaacaggggctgtcggtgttagccagcgttttgggcaggttgcattctggagagccgtaaatggcctagggcttgccattgtaataccagcgcttcagtcgttcattgctgatagctataaagatggtacgcgtggtgcagggttcggtttgttaagcctcattggcgctgtaggtggtataggtggtagtattttggcaacaatcatggctggaaaggactattggggattcccaggatggcgtgttgcatttatgatggtcgcacttgtcagcttgataattggaattcttgtgtacttatatgcgactgatccaagaagaatacctggcaatcgccttcttgacgaagatgagtatgagaggttgcatctatcaagcaaagatgttcttcctccgccttctatctggagggattcttgggtggcaacaagatctgtcatgaaagtgaagacgtttcagatcattgtcctgcaagggatcattggctcgttgccgtggactgctatagttttcttcacaatgtggttcgaactcattggttttgacaacaacagctcagcagcactgaacagcctcttcgccatcgggtgtgccagcggagcatttattggcggggtgatagcagatcacctgtcaaagtacttcccagattcggcacgggtcatgtgtgcccagtttagtgccttcatgggcatcccgttttcttggatcctcctcacagtcatcccccagtcagttgactactggtatgccttcgccgtcacgcttttcttcatgggcatcacgataagctggtgcgccacctcggcaaacaaccccatgttcgccgaggtggtccctcccaagcaccgcaccatgatctacgccttcgaccgcgcgttcgagggctcattcgcctcgttggctgcccctgccgtgggcctaatcaccgagaagatctatggctatgataccaagaccgtgaaccttgcgaacgggtcagcggaaggggcgtacgcgctctcaagggggctgctgaccatgatgatcgtgcctttcggtgtgtgtgtcctgttctacagccccctgtaccttgtgttcaagcacgacagagagaacgctaaatttgccagcttcaaggagcaggagctagtatgatcaatgatcatacgaatgtgcttccttggtccgcattcataacctctcgtcatcccgggctggagctttgcgtgatgattatgaagataactgccttgatcggcattcagaacatctggtcataccgtcctgggtcattctgagtttcttgttgagattatggcaattgtgccacggagaggtgtggatcaacgtttgttctggcagattttgaagattgttataaggcgacctttttttttgtgctgatcacctatccagaaagccatggcttctcccgacgactgatttgtgttgttaagggatgatttgcttttttgcatggcttctcctgacgactgatttgtgttgttaagggatgatttgcttttttggtaattcttagtcttacaagagaaccccaaggagaagcatatgatatgatctgaaccatgctgaattgctgatgttacatgtagttggaacagatcactaataatgttctgatcactgggatcagctcgttttcagtaatctttctggtttttttttcgcaggaaaaaatttctgtgttttttttgggaaaaacacaggaaattttgcttctgttgattatgaaagcagtgctagcagtttgatttcatctattaaaactatgtgcggaagcaaattccgcaaagaagcaaaggaagaaaatggaaaatgctagctgcctcacgtgggacctcctgtcagagacagacccctttgcacgctttggagccgcagcaaagctcgaactcgatccgggtctccgggccattcgatctccgatcggacggcccagacagctcacttcctctccacctttgcacgctatagctcctctccgagtcgtcgtctccgtcgctgcctgctctgcttgctgcgccactccaaacccaacccaaaacccccacacgagatctgcgcagcaatggcgacgcggtgccacgtcctgctcctcctcgccgccgccttcgcgtccctcctcgcgctcgtggccgcggaagggggcgaagaggggccccgcgggcgccggctgctcgtcctcctggacgacctggccgtgcggtcgtcgcactcggccttcttcggctcgctccaggcgcgtgggttcgatctcgacttccgcctcgctgacgatccaaagctctcgctccaccgctacggccagtacctctacgacggcctcgtgctcttcgccccctccacaccacgttttggtggatcagtggaccagaacgcagtcctcgaatttattgatgctgggcatgacatgatcctggcggcagattcctctgcctctgatctcattcgtggcattgcaacagagtgtggggttgattttgatgaggatccagaggcaatggttattgaccatatgaactatgccgtcacagatgttgaaggtgatcacaccttgattgctggtgacgatcttatccattcggatgtgatactagggtctgaaaagattgaggctcctgtattgtttcgaggaattggacacatggctaatccatcaaacagtttggttctgaaggttctatcagcctctccatcagcatattcagctaatccaaagactaagttagcgtctcctccatcgctcactgggtcagctatatcattggtttcggttatgcaggcaagaaataatgctcgggtgctgttatctggatcactcgatctgtttagcaaccggttcctgaagtctggtgttcaaaaggctgatagcaaaacaagatatgagagagctggaaacgagcaatttgtggcagagataagcaaatgggttttccatgagaggggacatctaaaggctgttaatgttaggcatcacaaggttggggagaccaatgaaccaggcatgtaccgcattaatgatgacctggaatactctgttgagatctatgaatggtccggaacaagctggaagccgtatgttgctgatgatgtgcagcttcaatttttcatgatgagcccttacgttctgaaaactatgtcgactgacaacaagggtttgtattcaacaaccttcaaagttccagatgtttatggagttttccagttcaaagttgagtaccaaagactgggatatactggtctgtcttttacaaagcagattccagtacgtccttacagacataatgagtatgagagattcataacatcagcgtacccatactacaccgcctcattttcaacaatgggtgctttcttcgtattctcgtttgtgtacctgtaccacaaataaaggactcatgggagcgcacaagtctctggaggctgacgtgaccaagatctgtgggcactgaatgttgtgctataagccaagagttacccggcgccaattttatggaaccatgtttttgtactgccaacttagataacatttgacgaccgtgaccgcactcatgggaaatttactcgtgctaggatgttcgatctgcccccacttcttttttttctttcttggaccctttctgatcagcacttgtcagaacgtttacagtctatagcactgaaacgtgattttggaagtactacacccccagtaattttgcactcaaaaacagaatcagcgccgccgccgccgccgccggccgagatcgatcgaggaatcttttggaattagt

SEQ ID NO: 218229 - DNA, 635 bp, Zea Mays
atggatccactgcgctcggcgcaggagctcttcgcgcgcgttgctctcctccatggatccactgtgctcggtgcaggagctcttcacgcgcgcacctcgcctttccttctcctgttgttggggaatgttgagggtgacaagttcaatgatttttctaatcaggacacatttatttggcatgagcatattgcatctttgtttccccatgtttactttgccagctcgggttaccctgtggacctaacagatcctgagtatgatcacaagtctatatttgggaggacacattttgttgtggcattcttgccaaattcaaaagctggtaaaaagaagaacttgctaggagattcagaagagcctaaagagcaagcaccacataaggttgttattttcatcctttgtcatcaagtactagctttcagggacataaacgctcaagctccaacacacatcctcatcatccccaaagtcaaggatggactaactggtctgtcaaaggaaaggataacattaaaccacaagaatacatcacaatggccaaagcacatcattaagcgtggattgtctattcaagttgaaggcactcgagctgctattgcaacacaactccaacaaaatactcttgtttatttctt

SEQ ID NO: 218230 - DNA, 2264 bp, Zea Mays
atggcagcgaggagcaaggacgcgaagaaggtggtgcagtaccgggagtgccagcgcaaccacgcggcgtccatcggcgggcacgccgtggacgggtgccgcgagttcatggcgtcgggcgccgagggcacggcgtgcgcggcctgcgggtgccaccgcagcttccacaggcgcgagccgtcagcccaacaaacgaaaaggcgcatacgattcaggaaacgtgggccggagccaatgaacgtgcacatgcagcagcagcaccacctccgtcagctccgagccgtcctcctccgccgcggccaccccgtccccccaccgccggcgacccacccggaccctgaccgggccttcctcgccgccatccgtgccgccgcctcctctgccccacgcctcgtgctcgccgcctgcgcctgcctccgccgcgccggcctgcccgcaccggggccccgagcgcttccggccctgctccgctccgctgcgcgctgcgagggtgctggcgcgtacgtcgcggccacgcacgcgctggccgtcaggacaggggcactggacgatgggtttgtcggaaccgcgctggccggggcgtacgcggcgtgcgggtgcgtgagggacacgcggaaagtgtttgacggaatggccgtgagggacgtcgtctcctggggcgtcatgcttgatagttattgtcagactcggaactataaagaagctttgcttctgtttgctaagatgaagaattctggagttgttccagaccaattgatccttgctactgttctaccagcttgtggtcatataaggcatttgagaatcgggaaagccattcactcgtacatgttggtgtcggacatgattatcggcgctcacattagtagtgctctcatcagtttgtatgctagttgtgcgaacatggagatggcagaaaagctatataacgaaatgccaaggaaggacttggtctcatcaactgccatggtttctgggtacgccaggaatagaaaagtcgagattgctcgctctatatttgatgggatgccagagaaggatgttgtatcttggagtgccatgatatcaggatatgttgatagtaaccagcctaacgaagcactgagtctgttcaatggtatgcaagagtgtggtatcaggtctgatgaaattaccatgttaagtgtcatatctgcatgtgctaatttaggttccctcgataaagccaagtggatccatgccttcattaagaacagtgggttgaataaggtactgcacatttgcaatgctcttattgatatgttcgccaaatgtgggggtattaaccttgcattgaatgtcttcaatgaaatgcctctaaagaatgttatcacctggacaagtatgattagtgcctttgctatgcacggtgatgggaaatcttccttacgtctgtttgagcagatgaaagatgaaggcgctgaacccaatgaagtgacatttcttagtttactttatgcttgctgtcatgctggtctagttcatgaaggccgtttattgtttagctcgatggttcagcaatacgggattgaacccaagcatgagcactatggttgtatggtggatcttctaggaagggctaaacttatgcaagaagcagttagtctcatagagtcaatgcatttagagcccaatgtgcctatctggggatctcttttagcagcatgctggatgcatggtgatctcaagctcggcgcttttgctgccaagaaaattttgcagttggatcctaatcatgatggagcatctgtgcttttattgaagatatacatgaaatctgataacttgaacaatgctcaggaggtgaggggagtaatgaaactccacagggtctcaaaagaaacaggcttgagttggatggaactgaatgagccttttcatgagtttgcagctggaggtgaaaaacatccagaaagtggcaagatcttccttcaaaaagttgtgaattaaagatgcatggatgttgaggatatgagagaatatgttttgctgcatagtgggaaacttgttttttttcctgccaagtgatttaagtacatcgattggtaatatctcttgcatgggcagagactgtggaaggcaatggttatttttcaaatctgatgagcgagtcattcagcccactgcttgaccttgaactgaataccaattctcaagatcaactgtcacagaatatggtagcagcaccaaccgagagaccaaatcagagaagatcaaagaatttcagcgagcaggaagatgcacta

SEQ ID NO: 218231 - DNA, 1952 bp, Zea Mays
ccactggccattgctatcaccaaatttttcgcgggcgcacgcattcctaggccgcaccgcgccaccgggacgggaagagcgtcccctgcaccggccatttgctccgctcgcgtccccgcctcctgcgcacgagacgctctccgctttttttttatcgacgagtttgagacagaccaaagaggcggaagaagcggggaagccgacgggcaacgaccggggcgtgaggcgatgtcgtggctccgcagcgcggtgcaccgcgccgtggaggcgagcgggggtcacagctccctccttacccgcaccgtccgcacctcccttgacaccgtcgtccaccatgccggccaggctgtcgcgggcggcgccaggctcatcaccgggagccggagttacaagagcgcgaaggtggcagcgaagaggctggaagaggaggcgctctcctgcaaaggggacgaacgggtgcagctgctgcgccggtggctcgtcgcgctcaaggagacccagcgcgcgaccacggcggtccgggagccgcaatttggggacaatccggaccagactgcgcccctgctggatttgtacatcgattacgacagcggtgcggagccgatgaactttttccatgtcttcctctacagtcaagccctcgagtgtgttgttctctccttgattagggaagccccaactgaggaagaagttccactggtctcagaagtttttggaatgtgcctttcgggagggaaggatgtgcacaatgcactcttaagtagtgtaaaggacctggcaaggttattctcaagttatagtgacgaagtgttggcaaaacgtgacgagctgcttcagtttgctcagggtgcgatctcagggctaaagataaatgctgacattgcaagattagataatgaaattactcagttgcaacagcagataaattcaatggatgcgctccatgctacatcaatcgtcaatcagaataaaaaagctcaaacagccactgagggtttcagaaaggcagtttctgaagttcggctttgctctagaatggaagaacttctattgaagaagaaatcaatacaccccggtgattcattggagactcattttgagaaggtagataaactgaaggttttgtctgaatcccttgcaaattcatctgcaaaagcagaaaagcgtatcatggaaaataggctacaaaaggaagaatctcttatcttccgggtcaccaaaacaaatgaagttagtggtatagaaaaggaattagttgctgagatctctggacttgaggagcaaaggaatcaactcgaggcagaactgaaaaaggtgaatactaaattgaaagttgctacagtgaagcttaaaaaaactagagaggaacgggaccaatttgatgaagcaagcaatcagattgtgttgcacctaaaaacaaaggaagacgaactttcaagatccatagcttcatgcaaagtagaagcaagtactgtcagtgcatggatcaactttttgaaagatacgtggaaattgcagtccttgtttgaagagctaagagaaaaacaggccaacgaagaattggatagatgtggactctgctttgcgaaattgatgaagtatcatgtttctgcatccatggaagagctaagcacttctattgaccgtatcaaaacctttgttgataacttgaaaatatttggtaacagatccgtgtcagcagaggatggagctaatggtccgtctaagcaatcaaaccctcgtagatatcttgaggaagaatatctccaaactgagaaaaaggtcgtagctgcattcagtttggttgatagtatcagagcaatatattcttcaaaccaggattactataaaacgagtttgtgcagaagggatgacactgaggtaaaaaatctgtttacctccattgacaatctgcggatcgagttcgaatccgtgccacgtccagtgcttca

SEQ ID NO: 218232 - DNA, 1715 bp, Zea Mays
ggccatttgctccgctcgcgtccccgcctcctgcgcacgagacgctctccgctttttttttatcgacgagtttgagacagaccaaagaggcggaagaagcggggaagccgacgggcaacgaccggggcgtgaggcgatgtcgtggctccgcagcgcggtgcaccgcgccgtggaggcgagcgggggtcacagctccctccttacccgcaccgtccgcacctcccttgacaccgtcgtccaccatgccggccaggctgtcgcgggcggcgccaggctcatcaccgggagccggagttacaagagcgcgaaggtggcagcgaagaggctggaagaggaggcgctctcctgcaaaggggacgaacgggtgcagctgctgcgccggtggctcgtcgcgctcaaggagacccagcgcgcgaccacggcggtccgggagccgcaatttggggacaatccggaccagactgcgcccctgctggatttgtacatcgattacgacagcggtgcggagccgatgaactttttccatgtcttcctctacagtcaagccctcgagtgtgttgttctctccttgattagggaagccccaactgaggaagaagttccactggtctcagaagtttttggaatgtgcctttcgggagggaaggatgtgcacaatgcactcttaagtagtgtaaaggacctggcaaggttattctcaagttatagtgacgaagtgttggcaaaacgtgacgagctgcttcagtttgctcagggtgcgatctcagggctaaagataaatgctgacattgcaagattagataatgaaattactcagttgcaacagcagataaattcaatggatgcgctccatgctacatcaatcgtcaatcagaataaaaaagctcaaacagccactgagggtttcagaaaggcagtttctgaagttcggctttgctctagaatggaagaacttctattgaagaagaaatcaatacaccccggtgattcattggagactcattttgagaaggtagataaactgaaggttttgtctgaatcccttgcaaattcatctgcaaaagcagaaaagcgtatcatggaaaataggctacaaaaggaagaatctcttatcttccgggtcaccaaaacaaatgaagttagtggtatagaaaaggaattagttgctgagatctctggacttgaggagcaaaggaatcaactcgaggcagaactgaaaaaggtgaatactaaattgaaagttgctacagtgaagcttaaaaaaactagagaggaacgggaccaatttgatgaagcaagcaatcagattgtgttgcacctaaaaacaaaggaagacgaactttcaagatccatagcttcatgcaaagtagaagcaagtactgtcagtgcatggatcaactttttgaaagatacgtggaaattgcagtccttgtttgaagagctaagagaaaaacaggccaacgaagaattggatagatgtggactctgctttgcgaaattgatgaagtatcatgtttctgcatccatggaagagctaagcacttctattgaccgtatcaaaacctttgttgataacttgaaaatatttggtaacagatccgtgtcagcagaggatggagctaatggtccgtctaagcaatcaaaccctcgtagatatcttgaggaagaatatctccaaactgagaaaaagtgccacataattattcaatatgtgt

SEQ ID NO: 218233 - DNA, 1856 bp, Zea Mays
ggccatttgctccgctcgcgtccccgcctcctgcgcacgagacgctctccgctttttttttatcgacgagtttgagacagaccaaagaggcggaagaagcggggaagccgacgggcaacgaccggggcgtgaggcgatgtcgtggctccgcagcgcggtgcaccgcgccgtggaggcgagcgggggtcacagctccctccttacccgcaccgtccgcacctcccttgacaccgtcgtccaccatgccggccaggctgtcgcgggcggcgccaggctcatcaccgggagccggagttacaagagcgcgaaggtggcagcgaagaggctggaagaggaggcgctctcctgcaaaggggacgaacgggtgcagctgctgcgccggtggctcgtcgcgctcaaggagacccagcgcgcgaccacggcggtccgggagccgcaatttggggacaatccggaccagactgcgcccctgctggatttgtacatcgattacgacagcggtgcggagccgatgaactttttccatgtcttcctctacagtcaagccctcgagtgtgttgttctctccttgattagggaagccccaactgaggaagaagttccactggtctcagaagtttttggaatgtgcctttcgggagggaaggatgtgcacaatgcactcttaagtagtgtaaaggacctggcaaggttattctcaagttatagtgacgaagtgttggcaaaacgtgacgagctgcttcagtttgctcagggtgcgatctcagggctaaagataaatgctgacattgcaagattagataatgaaattactcagttgcaacagcagataaattcaatggatgcgctccatgctacatcaatcgtcaatcagaataaaaaagctcaaacagccactgagggtttcagaaaggcagtttctgaagttcggctttgctctagaatggaagaacttctattgaagaagaaatcaatacaccccggtgattcattggagactcattttgagaaggtagataaactgaaggttttgtctgaatcccttgcaaattcatctgcaaaagcagaaaagcgtatcatggaaaataggctacaaaaggaagaatctcttatcttccgggtcaccaaaacaaatgaagttagtggtatagaaaaggaattagttgctgagatctctggacttgaggagcaaaggaatcaactcgaggcagaactgaaaaaggtgaatactaaattgaaagttgctacagtgaagcttaaaaaaactagagaggaacgggaccaatttgatgaagcaagcaatcagattgtgttgcacctaaaaacaaagacgaactttcaagatccatagcttcatgcaaagtagaagcaagtactgtcagtgcatggatcaactttttgaaagatacgtggaaattgcagtccttgtttgaagagctaagagaaaaacaggccaacgaagaattggatagatgtggactctgctttgcgaaattgatgaagtatcatgtttctgcatccatggaagagctaagcacttctattgaccgtatcaaaacctttgttgataacttgaaaatatttggtaacagatccgtgtcagcagaggatggagctaatggtccgtctaagcaatcaaaccctcgtagatatcttgaggaagaatatctccaaactgagaaaaaggtcgtagctgcattcagtttggttgatagtatcagagcaatatattcttcaaaccaggattactataaaacgagtttgtgcagaagggatgacactgaggtaaaaaatctgtttacctccattgacaatctgcggatcgagttcgaatccgtgccacgtccagtgcttca

SEQ ID NO: 218234 - DNA, 1829 bp, Zea Mays
agaaagctcgtcatcagggtccattatgtattcttcaatacgtgtatcttttccaacccccaaaccttcaactagaagagccatttcccccctaaacccaggtaaccaacaagtttctacaggacttctttagggcacccacgccgccgattctgcctggcgctactgcccctgaagcgcacatggcaaggaagacaagagtccctgaagaaggtgcaagcatggaaattccaacacgatgtcgtcgatcccatcgttcttctaacacaaccacggggaccctaccacaagaggttcttgcagccctgacgtctgccttcaacctcgatgggtcggcgaaggagaacttcgaggatgctttgcttgcgatgctttggcccttcgctgatagagtggcaaccttcaagtcgggcctagtggcaccagaggagggattacgctgctatggagcaccatccatgtggaactttctgattttttttgtgggtgatttccacatttctgtcaagattggttcgtctcttcggctcctccttggcttcgcaagagtggtgccgccagtagctcctccgcgctccgccgggaccgacttgccgctggccgccaggggctccctcgcccaggaccggctccgccgtccaaccgtcctatcccctccggcctccgcccagtgcgggaagcctacaacactgggtacacccttttttaaagaagggtgggcctagcgcagcggtagagcctaccgtctgtaactggaaggtcctgggttcgagccacaacctcatattatgcgggtaaggcttgacgcttaaagatacccttctccagaccccgcacagtgcgggaagcctacggcacttggtacgccctttatattgcaggtgattcatatcaaagatctgattcacataattaccaagttcagcagttttgcctctgacgatatgggttcttgggagggccaagctaggcagcttttgttggatgaggaagaagacgatgaagagtttttctttcttcttctccctgctatactttcattcctctctgaagagcaaagcgaaactggagcagctattgaaagtttcgtggaattcaagaggagcaccgcagccaaaacgctcgaagctcttgaagaaaagaagaagcatgatgaagatttctctattaaaaagtgtctagaggagttggatacaattgatgggctgacagatgaggatagatcatatgcaatggaagtctttgaatctgggttcaacagagaagtgtttatgagttcaaaaaaccacaatgttaggttgttttggctcaagagagaaattaaagcgcttgctgctatcatgtgatgtgaagtgaatgtggttgtgaagagataggcttacagaaaccgaagaaatccaactgctagtaccgttccagcgagaagacttcagccctgctttctgagtgcttggtgaacgatggaaggcctaggatgctgtttttgtttatgttgcttagagacggatattggaacgaggatataccttgtttgtacggtatcgtgctgccaaaattaatgcgttttaagcaatattttgctaggctaaccacggtttcttttaacggaacttgcctgacgtgatggagcctgctctgtctctagccagaaccccgcgtgttgtcaaggcgaactgtcatactgatcctaaatttagaagcgtcaatgttgagttatcagaacttgaaacaagacagcgtacatatactctacatggataatctcattcgagcaagggaaatggggcactgtgttatagacccagttaaaacaatctagtaggaaaaac

SEQ ID NO: 218235 - DNA, 1909 bp, Zea Mays
gaactattggaaacatgtttttgtgtttttttcaaaaaatattgttctaggagagacttctaggaagcttttagagatgttgtccctggttttatagtcgacgaacaaaatccgtagagttcggtagtcgtgagagttagggcatattggaaaaaaaaatcaaaaatcctttctttatgtgttttttcttttaaaaccgaactgatttctataaaacacattcatgcgtgattcatacgaaattcttacgttcttagaataaaattcgaaaaaaagaccaccaaactcgaccaacggccagatatggccaccgcccaccggctgaatacctccactgctccacacgtccctgtgccgccgtatcttggtgcgctcttgctcctaggtaacatacatctctgtccctccctaggagaccgagacagcaccgtaatggcgtccccctgcggcgatgctgcggcggcagccgagctcaccagcctgcgcatcagcgaaggagctgggatccctccgcttcccggacggcgaagcgtcggcggcaatgcagctgagggagaagaggagggtgataagaacaagaaggcgaggaaggggaaggctggtacgcagcggatcgccgggtgggggctccgcgagttcagcaagatagtttctaaaaaggttgagaccaaaggacggactacttacagtgaggttgcagatgaaatttgtggagagctgaagttgactcttattggtcaagagtttgatgagaagaatatcaggaggagagtgtatgatgcttttaatgtgctaattgcactacgtgttatcacaaaagatgaaaaagagataaaatggatgggcttgtctaatttccaatatgaaaagataaagttggaggaaactcgcaaagaactcatgatcaggattaagaacaagaaaaaacttctccaggaaattgaaagacagtttgatgacctccagaatatcaagtttcgcaaccagtttctacagaggccagcagagagtgtgaatggtatctgccttccattcttattggtcaaggcatccagaaaagcaagggtggagattgagatctcagaaaactcaaagtttgctggtttggacttcaactgcgtaccattcaccttgcacgacgatgtatcaatccttgaagccatcaggtgtaatagcgtaaaaaaaagctagctacttgggcacgcttcattagatgatcggggaagtggtcgatctgttgaaagtgacgaatgatacgatcatttccctttgcacagccatcagcatgtgtaggtatataactatatatatatatatagtacgaaaacttgacctcgtcttcaaggctgcctttctggcatggtgaagctttaacctgcaaattttgcccctttttgcgcctagcgggttattaggtcaggtagattattctcatatataatgctatgtattaactacattgattatagctcagattcggaagcttgtgcacgagctttgctggttgttatgatgttcgggcgttttgcccttggcaaaccatgtgtttctctagctgcagtgactacgagaatgttatcttccgttcaatatctatatgcctcttggctcctgcggtccactgtcctggctgagaagccttgcgaaacatgtatgctaatcttttctagtccttttttgaagtacaatacaaacgacccagctcaatttataggaaactcaaggagaccaggtagtatggaccttcggccagcagattgtgcatatgactatgtaagttgttaggcattggccatcagattgtgtatatgaatatgtaaaacactgttgtagacatttatcgagtggagtttgaaacgaaatgtaagaggcttctaaagatagtctgttttttatacctggttcttgg

SEQ ID NO: 218236 - DNA, 3685 bp, Zea Mays
gctggctgcgccttctctggccagggccggcggctgcgaaaggttatagagttggtcctgtgtatgatgatgtgttggcaatggcttggttttttctggagcttattgtaaaatcaatgggattggaacaaagtcgtctcttctaccacaaccttccattaggtgaagatgtcccaccgctacaattgaaagaaggtgtcttcaggtgcatcatgcagctctttgattgccttctaactgaggttcatgaacgctgtaaaaagggtttaagcttggcaaaacgcttgaacagcacgcttgctttcttttgctatgatcttttatcaataattgagcctcgccaagtttttgagctggtttcgttgtacatggacaagtttgcaggagtttgtcaagcagtccttcatgactgcaaattgacattcctgcagataatatgcgaccatgatctattcgttgagatgcctgggcgggatccctctgatagaaactatctctcgtcagttcttattcaagagatctttctgaccttagaccatgatgatttgtctcaacgagcgaaggctgctcggattctggttgtccttatatgcaaacatgaatttgatgcacgctatcaaaaaagtgaagacaagctgtacattgctcagctgtacttctctcttatagggcagatccttgatgagatgcctgttttctataatctgaatgccatcgaaaagcgtgaagtgctagttgtcattttgcaaattgtaaggaacttggatgatgcaactcttatcaaagcatggcaacaaagcattgctagaaccagattgttcttcaagcttcttgaagaatgtataacccattttgagcacaacaaaacaggaggcagcatgctacttggtgctagttctcggagcccagatgttgagcgccctgcacccccaaagtactctgagcgattatccccatcagtcaatgcatatttgtcggaggcttcaaggcatgaaataaggcctcagggaacaccagaaaatgggtacatgtggaacagggttagccctcaattaagttcccctaatcaaccctattcattgagggaagcacttgctcaagcacaatcttcaagaattgggtcaaccgccagggcattgagagagtctctgcatccagtactgagacaaaaattggaactttgggaagaaaatctcagtactgctgtgagcctcgaagtgttgagaataaccgagaagttttcagctgctgcaggcactagaagcatcactactgattatgcgaagctagattgtgtaacatctatcgtaatgggtcttttatctaggagccaacccttggcattttggaaggctttccttcctgtggtctacaacatatttaatcttcatggtgcaacactaatggcaagggagaatgaccgcttcttgaagcaaattgcttttcatcttttgcggcttgctgtttttcgaaatgattctattaggaaaagagctgttgttgggttgcagattctcgttaggaacgcattcaactatttcaagaacactacaaggttgagagtcatgttgacaattactttgtcagagttgttgtctgatgtgcaagtgactcaaatgaaatccgatggttctcttgaagaaagtggtgaagctcggcgccttagaaaatcactggaggaaatggctgatgtaagaagcaaggatctgttgaaagattgtggcctccctgttactgcattggaggcggcccctgatggttcctctgataatatgtggtcttgggcagaggtgaaacatctctctaaatgtctagtccaggcccttgatgctggtctggaacacgccctcttggattctgtagtgactgtagacaggtatgcagctgctgagggtttctataaactagctatggcctatgcgcccgttccagatcttcacattatgtggttgcagcatttgtgtgatgcacaccaggagatgcaatcatgggctgaagcagcacaatgtgcagttgctgcagctggcgtgatcatgcaggcacttgttggaaggaatgatgctgtgtggagcaaggagcatgttacttcgctacacaagatttgccctatcgtcaacactgatgtgagtgcagaagcatctgcagctgaagttgagggatatggtgcatccaaattaacagtggactcagcggttaaatatcttcaacttgccaataaactcttcacacaagctgaactttatcatttttgtgcaagcattcaggaactcataattcctgtgtataaaagcagaagggcttatggacagctggccaaatgtcatacatcactcacaaacatctatgagtcaattcttgaacaggaggcaagtcctataccattcattgatgccacatactaccgagttggtttctatggtgagcgtttcggcaagctcaataaaaaggagtatgtatttagagaaccacgagatgtacgtcttggtgatattatggagaagcttagtcatatatatgaggttaaaatggatgggagtcacactttacatataattccagattctagacaagtcaatgctgatgagttgcagcctggcgtctgctatttacagatcactgctgttgatcctgtaatggaggatgaggacttgggtagcaggagggaaaggattttttctttatctactggtactgtacgtgcacgtgtttttgaccgttttcttttcgatacaccattcacaaaaaatggaaaaacacaaggtggtctagaagaccagtggaagaggcgtactgtgctccagacagagggttcctttcctgctttggtgaaccgtctgccagtcaccaaatctgaatctctggagttctctcctgtcgagaatgcgattggaatgatcgaaacaagaacagctgcattgagaaatgaactagaagaaccacggagttctgaaggtgatcaactcccaaggcttcaaagcttgcaaaggatactccaaggaagtgtggctgtgcaggtcaacagtggggtattaagtgtgtgcactgcattcttatctggcgagccagcaactaggctcagatcccaagaactgcagcagctcatcgccgcattgcttgaattcatggctgtctgcaagcgtgcaatccgtgtgcatttcagattgataggggaagaagaccaggaattccacacccaacttgtcaatgggttccagtcactcaccgctgagctatctcattatatccctgctatactctccgagctatgatagaactgtaacaagccagaaattaggtagcatgtgaatgattcattctttcagttgcaggttcccaccaaatgtccatatttccattagttttggttgtatagttgcaccgattcctgattttggagtgtaaagtttgtataacctagtgttatctgttatgcaccagttatatgctgagtgccatgttttttgcggtttgctactgtatcacagcgagccgacattttacaacagttatatgtaatgttctgtagtgatacaatagtgcctattctgggtgatatgtatttttttccctgtaggaaatttgctgctgtcgagggcatcctcgcaatttgtttatgcacgatttgaagccttgtgttattgaagtcgttcccataactgtagtttgtttattgttcctagtgtat

SEQ ID NO: 218237 - DNA, 5924 bp, Zea Mays
atggagcccgcggtggctacggcgggtgaagggcagcggttcaagcggatttcgcggcaggcgtggtcggggaacctggaactggatcctttgcttaatgaaagcttagatcagtggccacatctaaatgatctggtacagtgctacaaggctgattttgtgaaggatgactgcaaatatggacgctatgagagtgttgcaccaccatctttccaaaatcaaattttcgagggacctgatacagacatagaaacagaattgcagctttgcaacgcaagacatttcaagcctgaagatcctaccgaagatgatatgccaagcacctcagggaggcaaatgtatgaaaccgaatcatctgcttcatcttcaaaagtgcactgtagtctgtcaccactgccagcatatgagcctgcatttgattgggagaatgagaggtctttgatatttggccaaagggtgccagaaagtataccagcaataagcaacagtggcttgaagataactgtcaaggtactatctttgtcattccaagctggattagttggtgagcaaaactagaatattttagatagaagagaaaaactgtcagaagacttctactttcacatacttccaacagatatgcaggatgctcagggttctttggatcgtcgaggcgttttttcattggacacaccttcaccatcagtctgccttttgattcaattggaaaaggctgctactgaagaagggggagtaacaccttctgtttattctcgtaaagagcctgtgcacttagctgagaaagagaagcaaaagctgcaagtatggtctcgaattatgccttgtaaagagtcatttgcatgggccatgattcctctgtttgaaggtaaccatgcgggtggtcttagtgatgctgcttctcctagcagtcctttagcaacaagtttaccaggatcaacttctcaagatagtattgtggaccctattttaaagcttactttagatggaaaagtaaaccattactcgagtggaagctcagttattgtagagatatcaaacctaaacaaagtgaaggaaagctatatagtggactccctccaagatccaaaacggaaagtacataaaccagtgaaaggtgtattgagattagaagtggaaaaacttcatggtggccacaatgatgtggataacacttctgaaggcggaagcatggccaatgatttgaatgatgctggtgacatcaataatggcagaagcaacagaagtagctttgatgggattcacagttttgtgaattctattgccattgcccagaaagatgctcatcacaatggaatcatttctaatgctgagaatggtgacaattttgaagcttttgactttcggatgctgacccgaagtgagccgttttcacaactttttcattgcctctatgtgtacccattgactgttagcttgagccgcaaaagaaacctgtttgttagagtggaactgagaaaggacgattctgacatccgaaagcctccattagaggctgttcatcctagggagcggaatatgatgctacagaagtggggccatacacagattgctgttggaacaagaatggcttcctaccatgatgaagttaaaatcagcctacctgctcttttgacaccccagcatcatcttgtgttcacatttttccatgtagatcttcaaatgaaacttgaagcaccaaaaccagtgatcgttgggcattctgtacttccactgtcgacacatattcagttactttcagatgtatccttgccaattttgagagagctcgttccacattacctgcagggaagtggaaaggagagaatggactatctggaagatggaaaaactgttttcaagttgcgtttaaggctctgttcttcattgttcccggttaatgaaaggataagagacttttttgttgaatatgaccgccatactctacatacaagtcccccatggggttctgagcttcttgaggccataaatagtttgaaaaacgttgaatctactgcattattacaatttctgcaaccaatacttaacatgctgcttcatcttattggcgatggcggtgagacccttcaggttgctgcgtttcgagccatggttaacattttaacccgtgtgcagcaggagtcatcagatggggctgagagaaatagattccttattaattatgttgattttgcttttgatgacttcggcggtcggcaagcacctgtgtatcctggtctgtctactgtttggggaagtcttgctaggagtaaggcgaaaggttatagagttggtcctgtgtatgatgatgtgttggcaatggcttggttttttctggagcttattgtaaaatcaatgggattggaacaaagtcgtctcttctaccacaaccttccattaggtgaagatgtcccaccgctacaattgaaagaaggtgtcttcaggtgcatcatgcagctctttgattgccttctaactgaggttcatgaacgctgtaaaaagggtttaagcttggcaaaacgcttgaacagcacgcttgctttcttttgctatgatcttttatcaataattgagcctcgccaagtttttgagctggtttcgttgtacatggacaagtttgcaggagtttgtcaagcagtccttcatgactgcaaattgacattcctgcagataatatgcgaccatgatctattcgttgagatgcctgggcgggatccctctgatagaaactatctctcgtcagttcttattcaagagatctttctgaccttagaccatgatgatttgtctcaacgagcgaaggctgctcggattctggttgtccttatatgcaaacatgaatttgatgcacgctatcaaaaaagtgaagacaagctgtacattgctcagctgtacttctctcttatagggcagatccttgatgagatgcctgttttctataatctgaatgccatcgaaaagcgtgaagtgctagttgtcattttgcaaattgtaaggaacttggatgatgcaactcttatcaaagcatggcaacaaagcattgctagaaccagattgttcttcaagcttcttgaagaatgtataacccattttgagcacaacaaaacaggaggcagcatgctacttggtgctagttctcggagcccagatgttgagcgccctgcacccccaaagtactctgagcgattatccccatcagtcaatgcatatttgtcggaggcttcaaggcatgaaataaggcctcagggaacaccagaaaatgggtacatgtggaacagggttagccctcaattaagttcccctaatcaaccctattcattgagggaagcacttgctcaagcacaatcttcaagaattgggtcaaccgccagggcattgagagagtctctgcatccagtactgagacaaaaattggaactttgggaagaaaatctcagtactgctgtgagcctcgaagtgttgagaataaccgagaagttttcagctgctgcaggcactagaagcatcactactgattatgcgaagctagattgtgtaacatctatcgtaatgggtcttttatctaggagccaacccttggcattttggaaggctttccttcctgtggtctacaacatatttaatcttcatggtgcaacactaatggcaagggagaatgaccgcttcttgaagcaaattgcttttcatcttttgcggcttgctgtttttcgaaatgattctattaggaaaagagctgttgttgggttgcagattctcgttaggaacgcattcaactatttcaagaacactacaaggttgagagtcatgttgacaattactttgtcagagttgttgtctgatgtgcaagtgactcaaatgaaatccgatggttctcttgaagaaagtggtgaagctcggcgccttagaaaatcactggaggaaatggctgatgtaagaagcaaggatctgttgaaagattgtggcctccctgttactgcattggaggcggcccctgatggttcctctgataatatgtggtcttgggcagaggtgaaacatctctctaaatgtctagtccaggcccttgatgctggtctggaacacgccctcttggattctgtagtgactgtagacaggtatgcagctgctgagggtttctataaactagctatggcctatgcgcccgttccagatcttcacattatgtggttgcagcatttgtgtgatgcacaccaggagatgcaatcatgggctgaagcagcacaatgtgcagttgctgcagctggcgtgatcatgcaggcacttgttggaaggaatgatgctgtgtggagcaaggagcatgttacttcgctacacaagatttgccctatcgtcaacactgatgtgagtgcagaagcatctgcagctgaagttgagggatatggtgcatccaaattaacagtggactcagcggttaaatatcttcaacttgccaataaactcttcacacaagctgaactttatcatttttgtgcaagcattcaggaactcataattcctgtgtataaaagcagaagggcttatggacagctggccaaatgtcatacatcactcacaaacatctatgagtcaattcttgaacaggaggcaagtcctataccattcattgatgccacatactaccgagttggtttctatggtgagcgtttcggcaagctcaataaaaaggagtatgtatttagagaaccacgagatgtacgtcttggtgatattatggagaagcttagtcatatatatgaggttaaaatggatgggagtcacactttacatataattccagattctagacaagtcaatgctgatgagttgcagcctggcgtctgctatttacagatcactgctgttgatcctgtaatggaggatgaggacttgggtagcaggagggaaaggattttttctttatctactggtactgtacgtgcacgtgtttttgaccgttttcttttcgatacaccattcacaaaaaatggaaaaacacaaggtggtctagaagaccagtggaagaggcgtactgtgctccagacagagggttcctttcctgctttggtgaaccgtctgccagtcaccaaatctgaatctctggagttctctcctgtcgagaatgcgattggaatgatcgaaacaagaacagctgcattgagaaatgaactagaagaaccacggagttctgaaggtgatcaactcccaaggcttcaaagcttgcaaaggatactccaaggaagtgtggctgtgcaggtcaacagtggggtattaagtgtgtgcactgcattcttatctggcgagccagcaactaggctcagatcccaagaactgcagcagctcatcgccgcattgcttgaattcatggctgtctgcaagcgtgcaatccgtgtgcatttcagattgataggggaagaagaccaggaattccacacccaacttgtcaatgggttccagtcactcaccgctgagctatctcattatatccctgctatactctccgagctatgatagaactgtaacaagccagaaattaggtagcatgtgaatgattcattctttcagttgcaggttcccaccaaatgtccatatttccattagttttggttgtatagttgcaccgattcctgattttggagtgtaaagtttgtataacctagtgttatctgttatgcaccagttatatgctgagtgccatgttttttgcggtttgctactgtatcacagcgagccgacattttacaacagttatatgtaatgttctgtagtgatacaatagtgcctattctgggtgatatgtatttttttccctgtaggaaatttgctgctgtcgagggcatcctcgcaatttgtttatgcacgatttgaagccttgtgttattgaagtcgttcccataactgtagtttgtttattgttcctagtgtat

SEQ ID NO: 218238 - DNA, 7513 bp, Zea Mays
ttcatacgtacatgtgcaaggtggaaacgtcatgcgtgcgtgctccgttgccagtgcatctcgtgatgcatgcgcgggtcttgcgcaggcagttgcgcgagcacggtggccagaccgaggaataagcgaaaggtggttggtccattcagtcgctcaccttcctatggatctcgaagggcagcgggtggcgtgtggcggcctgcgctggtgcgtgggtacggatccatgaaactctgcagcacgaatgctgtgggaaacaggggatcgcgagatccaggctggcaaatctgtctgcgatgacaccgtccctggcctgcccgtggctgctgcaaacaggagctacccggcggcgacgcggcgtccagcacgagttggcgtgcggcgtagcgtagatctccatcgcgagaacacgcaggagcagcgactgcaggtggcgtgccaggccgggccgacgttcgactgaggaaacgcctcgtcgacgatatttgcctcttcggaagggaatcacaccagtgtgatggatggacctccgtctcggtaggcgcggctgctggcgcgcctggcggtccctgcgcgagtgcatcttctaacgtaggtgtggccctgtgcgggcgtgggcgcgcctttcggtgtgggcacgagcacgggcacagcaccacgacgacaatgacagttcatcgcgcatggatcacaactagtgcacaacaacagattaagaacagtaaacataccgttccattacgtagaggaaaaatcgaagcctgtcgcgtaggacagttcggctagaccgatgacctgccggtttgacgtagagttgatgcagatctgatccatagcaacgtcgaggtagagcgtgctgataacgtgttgagaactacgttaccacggatcaccagatccgctctcttccctcccgtcagcagtagaggcgcaagaagctgtagagaactcgtctcccttcccataagcacgacagaggaaacacacgggacactagatatagggttgggcctctggcctctttctaatctctgtaatatgatggggtgtacatgttccttatatagagatgtgagacccctcaggggcaaagccggtatttgcccatataaccctaactagggttacttaacactttgtattttacgcctcgtttccccctccttccattaaaaaaaaaacacacccagacaccctccccccaactccacccgcttccttcgcttcccttcacccccactccaccaaaccctcacgtcgctgggactgggcagcgcagagcagagtagcagacagagcacagcggagcagaaggtggcgagtggaagcaaatggggaatgagtggcggcaaatgggcaatgagtggcggcggcggtagtagctagcatagcatcctcctcgccttttcttctccccgccctctcgcgctctggttgttgcagccagtgggagcgagaggactcgtgctgcctccgtcgcttctccggcacgcctccctcgcccggatctgcgccgctcgcgtgggatcctgagctccgggttggagagctctcgcgttccgggtcaggtgacggtgatggagcccgcggtggctacggcgggtgaagggcagcggttcaagcggatttcgcggcaggcgtggtcggggaacctggaactggatcctttgcttaatgaaagcttagatcagtggccacatctaaatgatctggtacagtgctacaaggctgattttgtgaaggatgactgcaaatatggacgctatgagagtgttgcaccaccatctttccaaaatcaaattttcgagggacctgatacagacatagaaacagaattgcagctttgcaacgcaagacatttcaagcctgaagatcctaccgaagatgatatgccaagcacctcagggaggcaaatgtatgaaaccgaatcatctgcttcatcttcaaaagtgcactgtagtctgtcaccactgccagcatatgagcctgcatttgattgggagaatgagaggtctttgatatttggccaaagggtgccagaaagtataccagcaataagcaacagtggcttgaagataactgtcaaggtactatctttgtcattccaagctggattagttgaacctttcagtggaacgatttgcttgtataacagagatagaagagaaaaactgtcagaagacttctactttcacatacttccaacagatatgcaggatgctcagggttctttggatcgtcgaggcgttttttcattggacacaccttcaccatcagtctgccttttgattcaattggaaaaggctgctactgaagaagggggagtaacaccttctgtttattctcgtaaagagcctgtgcacttagctgagaaagagaagcaaaagctgcaagtatggtctcgaattatgccttgtaaagagtcatttgcatgggccatgattcctctgtttgaaggtaaccatgcgggtggtcttagtgatgctgcttctcctagcagtcctttagcaacaagtttaccaggatcaacttctcaagatagtattgtggaccctattttaaagcttactttagatggaaaagtaaaccattactcgagtggaagctcagttattgtagagatatcaaacctaaacaaagtgaaggaaagctatatagtggactccctccaagatccaaaacggaaagtacataaaccagtgaaaggtgtattgagattagaagtggaaaaacttcatggtggccacaatgatgtggataacacttctgaaggcggaagcatggccaatgatttgaatgatgctggtgacatcaataatggcagaagcaacagaagtagctttgatgggattcacagttttgtgaattctattgccattgcccagaaagatgctcatcacaatggaatcatttctaatgctgagaatggtgacaattttgaagcttttgactttcggatgctgacccgaagtgagccgttttcacaactttttcattgcctctatgtgtacccattgactgttagcttgagccgcaaaagaaacctgtttgttagagtggaactgagaaaggacgattctgacatccgaaagcctccattagaggctgttcatcctagggagcggaatatgatgctacagaagtggggccatacacagattgctgttggaacaagaatggcttcctaccatgatgaagttaaaatcagcctacctgctcttttgacaccccagcatcatcttgtgttcacatttttccatgtagatcttcaaatgaaacttgaagcaccaaaaccagtgatcgttgggcattctgtacttccactgtcgacacatattcagttactttcagatgtatccttgccaattttgagagagctcgttccacattacctgcagggaagtggaaaggagagaatggactatctggaagatggaaaaactgttttcaagttgcgtttaaggctctgttcttcattgttcccggttaatgaaaggataagagacttttttgttgaatatgaccgccatactctacatacaagtcccccatggggttctgagcttcttgaggccataaatagtttgaaaaacgttgaatctactgcattattacaatttctgcaaccaatacttaacatgctgcttcatcttattggcgatggcggtgagacccttcaggttgctgcgtttcgagccatggttaacattttaacccgtgtgcagcaggagtcatcagatggggctgagagaaatagattccttattaattatgttgattttgcttttgatgacttcggcggtcggcaagcacctgtgtatcctggtctgtctactgtttggggaagtcttgctaggagtaaggcgaaaggttatagagttggtcctgtgtatgatgatgtgttggcaatggcttggttttttctggagcttattgtaaaatcaatgggattggaacaaagtcgtctcttctaccacaaccttccattaggtgaagatgtcccaccgctacaattgaaagaaggtgtcttcaggtgcatcatgcagctctttgattgccttctaactgaggttcatgaacgctgtaaaaagggtttaagcttggcaaaacgcttgaacagcacgcttgctttcttttgctatgatcttttatcaataattgagcctcgccaagtttttgagctggtttcgttgtacatggacaagtttgcaggagtttgtcaagcagtccttcatgactgcaaattgacattcctgcagataatatgcgaccatgatctattcgttgagatgcctgggcgggatccctctgatagaaactatctctcgtcagttcttattcaagagatctttctgaccttagaccatgatgatttgtctcaacgagcgaaggctgctcggattctggttgtccttatatgcaaacatgaatttgatgcacgctatcaaaaaagtgaagacaagctgtacattgctcagctgtacttctctcttatagggcagatccttgatgagatgcctgttttctataatctgaatgccatcgaaaagcgtgaagtgctagttgtcattttgcaaattgtaaggaacttggatgatgcaactcttatcaaagcatggcaacaaagcattgctagaaccagattgttcttcaagcttcttgaagaatgtataacccattttgagcacaacaaaacaggaggcagcatgctacttggtgctagttctcggagcccagatgttgagcgccctgcacccccaaagtactctgagcgattatccccatcagtcaatgcatatttgtcggaggcttcaaggcatgaaataaggcctcagggaacaccagaaaatgggtacatgtggaacagggttagccctcaattaagttcccctaatcaaccctattcattgagggaagcacttgctcaagcacaatcttcaagaattgggtcaaccgccagggcattgagagagtctctgcatccagtactgagacaaaaattggaactttgggaagaaaatctcagtactgctgtgagcctcgaagtgttgagaataaccgagaagttttcagctgctgcaggcactagaagcatcactactgattatgcgaagctagattgtgtaacatctatcgtaatgggtcttttatctaggagccaacccttggcattttggaaggctttccttcctgtggtctacaacatatttaatcttcatggtgcaacactaatggcaagggagaatgaccgcttcttgaagcaaattgcttttcatcttttgcggcttgctgtttttcgaaatgattctattaggaaaagagctgttgttgggttgcagattctcgttaggaacgcattcaactatttcaagaacactacaaggttgagagtcatgttgacaattactttgtcagagttgttgtctgatgtgcaagtgactcaaatgaaatccgatggttctcttgaagaaagtggtgaagctcggcgccttagaaaatcactggaggaaatggctgatgtaagaagcaaggatctgttgaaagattgtggcctccctgttactgcattggaggcggcccctgatggttcctctgataatatgtggtcttgggcagaggtgaaacatctctctaaatgtctagtccaggcccttgatgctggtctggaacacgccctcttggattctgtagtgactgtagacaggtatgcagctgctgagggtttctataaactagctatggcctatgcgcccgttccagatcttcacattatgtggttgcagcatttgtgtgatgcacaccaggagatgcaatcatgggctgaagcagcacaatgtgcagttgctgcagctggcgtgatcatgcaggcacttgttggaaggaatgatgctgtgtggagcaaggagcatgttacttcgctacacaagatttgccctatcgtcaacactgatgtgagtgcagaagcatctgcagctgaagttgagggatatggtgcatccaaattaacagtggactcagcggttaaatatcttcaacttgccaataaactcttcacacaagctgaactttatcatttttgtgcaagcattcaggaactcataattcctgtgtataaaagcagaagggcttatggacagctggccaaatgtcatacatcactcacaaacatctatgagtcaattcttgaacaggaggcaagtcctataccattcattgatgccacatactaccgagttggtttctatggtgagcgtttcggcaagctcaataaaaaggagtatgtatttagagaaccacgagatgtacgtcttggtgatattatggagaagcttagtcatatatatgaggttaaaatggatgggagtcacactttacatataattccagattctagacaagtcaatgctgatgagttgcagcctggcgtctgctatttacagatcactgctgttgatcctgtaatggaggatgaggacttgggtagcaggagggaaaggattttttctttatctactggtactgtacgtgcacgtgtttttgaccgttttcttttcgatacaccattcacaaaaaatggaaaaacacaaggtggtctagaagaccagtggaagaggcgtactgtgctccagacagagggttcctttcctgctttggtgaaccgtctgccagtcaccaaatctgaatctctggagttctctcctgtcgagaatgcgattggaatgatcgaaacaagaacagctgcattgagaaatgaactagaagaaccacggagttctgaaggtgatcaactcccaaggcttcaaagcttgcaaaggatactccaaggaagtgtggctgtgcaggtcaacagtggggtattaagtgtgtgcactgcattcttatctggcgagccagcaactaggctcagatcccaagaactgcagcagctcatcgccgcattgcttgaattcatggctgtctgcaagcgtgcaatccgtgtgcatttcagattgataggggaagaagaccaggaattccacacccaacttgtcaatgggttccagtcactcaccgctgagctatctcattatatccctgctatactctccgagctatgatagaactgtaacaagccagaaattaggtagcatgtgaatgattcattctttcagttgcaggttcccaccaaatgtccatatttccattagttttggttgtatagttgcaccgattcctgattttggagtgtaaagtttgtataacctagtgttatctgttatgcaccagttatatgctgagtgccatgttttttgcggtttgctactgtatcacagcgagccgacattttacaacagttatatgtaatgttctgtagtgatacaatagtgcctattctgggtgatatgtatttttttccctgtaggaaatttgctgctgtcgagggcatcctcgcaatttgtttatgcacgatttgaagccttgtgttattgaagtcgttcccataactgtagtttgtttattgttcctagtgtat

SEQ ID NO: 218239 - DNA, 444 bp, Zea Mays
atcgcccccgcgaactttttttcgctatttggtgagcacgcttcccggccctcaccgcgggggagctcggtgatttcgctccccacctcagcaggtcgggaagagcttccctgtccgctctcacgaagcctcctcctccccgtctccctcgcaaagccaccgcctcctcgtctccctctcgaagccgtcgccgcccactgcctcgcactctcttggactggatctgtcgtcgtccggtgattttgctgaacacgagcacttcctgcttcctggcaccgcgcgctcggcaacagatctccctcctcttcgctggagcctgggcccgaggatcctgcaagccggcagctggagaaaggcgagcgacatggcgacctccacaatgcggctggtgaaggacgagaaagaacaccagtatgcccgggactctgttctgctaatgcgttt

SEQ ID NO: 218240 - DNA, 2103 bp, Zea Mays
atggaggcgaaggaaggcgtgatggcgacggacttcttctggtcgtacacggacgagctgcacgcgtcgcgccaccgggagatcctggccaatcgtggcttgccttatgatggtccagttatcccacccgcaccacagcctacaccttcaccggtcaggaagacgcacaagaatttgaagtacgtactgatcggggccattggtggaggcctcctgctgatagccattgttgcagccattgtgttctgctttgtgtgttctgggagtacagggaggaggaatgatcagagagaaagtggggcatcaccaagtgcaccattgggagtgtcagctaccggcacaactgcagctactggtggcacctcgggatttggggaagataggctcatcaagcacggtcactcaggtgatctataccatggtgtgctccaagacgggactgtcgtggtggtgaagaggatcacttcgcgtgtgcctcggaaggatgcttatctggcagagttatatttgtttgcaaaaggagtgcatgaaacgctggttcctttgttggggcactgccttgataaagaagaagaaaaggttcttgtgtataggtttgtccgaaatggtgacttgtcaactgcactgcacagaaagtcaagggaggaaaatgaaggcttgcaatctttggactggattaaaaggttgaagattgcaacaggggttgctgaggctctttgctatctgcatcatgagtgttctccaccaatggttcacaaggatgtgcaagccagcagcatccttcttgatgataaatttgatgttcgtcttggtagcttgagcgagatatttcttcacgatagctctctgctcgcaaccatctcccagctgagccgccgcgccatctccctggccatcaccagttgtgccctcgcggcatttgcaagggattttaagcaacgcacgcacgagcatcacctagtgttctcaagaataacggaacgaaattctttccgtgacaaactgagcaccctaatcccaaatcgagcggctgaagcgctgggctccagctactgctgctcgcctgcttcgggacggccgattgggtgccggtttgccaaggacatggaggatgcgagcggcagctcgtcgtctccagccgtcctacggaacaagtattgggtcctccgccacggccgcagcgtccccaacgagcgcggtctcatcgtctcatctctggagaacggcacgaagccggagttcgggctggccccgcagggggtcgagcaggcgcgcgcggccggcgaaaagttccggaaggcggtgctgggacttcgtgagcgctactttgggccatcatatgagttactttcacatgataagacatatggtcagtagatgaagcacatccctgtatggctcctgaaggtggcgagagcgtcgcagatgttgctagtagattttcagctgtgctgttatctgcagagacacagtttcatggctctgcaattcttattgtcagccatggggacccactacaaatctttcaagctgtcctcagtggagccaaggagaacatgtctttccttgacgatctcaccaacctgaaggtgaaagatactgacgatctcaccaacctggaagtgaaagacacgatggtggcatccattctgtcacagcatcgtaagtttgcgctcatcacaggagagctgcgccgagttgtgtaacttgctgctgcttgggtttaacgtcgcctgtcaattgaccatatgtaaacctgcaatgtttgcctagcacattcctccgtaacttgacagggatatgaaattcgtctcctatggaatgctataacctcagaagtcttaaattattttgaagaagcggcctaaatatttggttgcttgttgaattgtacgattgaaacccagctgccttttattttgtccttttttgcagtgttttgctaatttctcttacgaattacgatttgagcttcggttcatattttacttccaggtcagagcttgagcgatttggcttgtttgcccttgtaatcttcaatcatcggggccagagctatttgttggccactcgttttttattctttcggaatataaaaaataa

SEQ ID NO: 218241 - DNA, 1818 bp, Zea Mays
ccccccaatggctgaagccggcggcccgaattcatgttcaccaatggctatggcagcgctcgaactacagaagatactggagacagaggacactcacgatcacggctcacctaggcggttcggcggacggcgattggcggggcggctcggtctggagctgaagccttggatggaggggtcacaccggtggccgcctcttgtgggccttatgggtggtgttgggccttctaagtatacaagtgtatacaggctcggtgagaagctgcgaagcctgcgagcccgaccgcgaccgagcagatcgttccgtcgtgcattcgtgcttcggttcttcccgtgctcgtcttcttggccgggacgaaagaaaagggggactttggctgtcgatggcagcggcgttggagttcctggaggcgcagggcgcgacccagccggagctcgcggaatggtacgcggcgctcgccgacctgtaccagcgaaagctatggcaccagctcaccctcaagctggagcagttcctcgccctcgccgtcgtccaggcgatgctctgattcatctttataatcatttcatctctgattttgagacaaagatcagtcttcttaaatttgctcacttcacagtcgtagtttcacaccagtatttggacaagaatgctggtataaattatcttgaaggcgtaatttcaaaactacgtgatacccgtgaatcgcgggttgaagagcccattctgtatgtaaagatgcagattgcaacatttcttcttgagaaagggaatcaaaaggattgtaagaatctgctagaagaaggcaaaaccactttggacagcatggttgatgttgatccttctgtacatggtacctattactgggtgtgttcacagtatcataaggcccgtcaagaatactcagaattctacaaaagctgtcttctttaccttgcgtacacgacagtgagcttgttgttacagtttttgataaacctggcacttgacctctcacttgctgctttattgggtgaaaacatttacaactttggggaactacttgcccatccgattatccatagccttttgggaactcaggctgagtggatatttcatatgttgcaagctttcaactctgggaatctatccttgtatcaagaaatctgcaaagctcatagcaacgctttgagtgcacagcttgcattggtacaaaatgagaggaatctacttgaaaagatcaacatgctttgcttgatggaaatcattttcagtcgatcatctgaaaaccgcacgatcccaatgcgggatatagcagaacagaccaagctccctgttgaagatgtggagtatctattaatgaagagcctctctgctcgtctaatagaaggcataattgatcaggttgatggagttgtccatgtttcacgggttaaaccaagggtgttgggcatagaccaagtgaaatgcttgcatgaccggttggatacatggattgggaaggtcgatacgatcttgctttctgttgaagcggagacgccagacttggtgtcttcgtgatgttctgctcctctcgaaggatcactgtgacataatctgatgtgaacgaagtcgttagatatttatcgtgttgtcagcctgtaatcattggtgtaaacccctgtaacgattgtggtaacactgtaacctcgttgctgcagttttagtagtgtacattcttgaggaatcgttgtttcaaacaattgttcagctgactctcagctcaagatgtgtatcctcaaatatgccctcagctcccaagagatcggctctcagagaattcctgaacacagacagct

SEQ ID NO: 218242 - DNA, 1885 bp, Zea Mays
aacccatgcacatgtcttaacatgtttggcttccgagcaaactttctccagaccccccaagaaaatgtaagatccgatcagatatgtgtcgatgctcatcccagcgtactcccattgcaacgcacgagcacacaactagttaactataaactctataaatgtaagctactttcgcagtagctttacggatcctgtaattacattattttatggactgagggagggaggagaggatcaataagccacgcgggccccaccatatcttcatccacaaagccaccaccaagctttttcatggtcgtcgctttccgctttcctttgctgctgaccatatatctacggtagcaagacaagacaaggaagtcggctgatccatggcggccttcacggtgcacacgagcgccgccacctcgccctactcgccggcgggcacggccatccttctccgaagccggagtcgagcctaccccaccgccaccatccgcgtgtcgtgctcgaagacggtggtgatcggggtggcggcggactcagggtgcgggaagaccacgttcacgcggcgcctggcgagcgtgttgggcggcggggcggagccaccgagggccggccggaacccgggctccaacacgctcgtcagcgacaccaccacggtgatctgcctggacgactaccactcgctggacagggtcgggcggaaggcgaagggcgtcacggcgctggatccgaggttcgtcgacttcgacctcatgtacgagcaggtgagggccatcaaggagggccgcgccgtcgagaaacccgtctacaaccacgtcaccggcctcctcgacccgcccgagctcatcaccccgccgaacatcctcgtcatcaaggggctgcacccaatgttcgacgagcgcgtgagggacctgctagatttcagcatctacctggacatcagcaacgaggtgaagcttgcatggaaaatccagagagacatgggagagcgtggtgggcacagccttgagagcatcaaggcctccatcgagagccgcagaagcagtacgcggacgccgtgatcgaggtcctgccgacgcagctgatcccgggcgacgacgagtgcaaggtggtgcgcgtgaagctgatcatgaaggaaggcgtggagcacttcgcccccgtgcacctcttcgacgaaggatccaccgtctactggatcccctgcggccggaagctctcctgctcctaccctggcatcaggttcgcctacggcttcgacacctacttcggacacgaggtgtcggtggtggagatggacgggcagttcgacaagctggacgagctcatctacgtggagacccacctgagcaacctgtcaaccaagttctacggggaggtgacgcagcagatgctcaggcacgccgacgtccccggcagcaacaacggcacggggctcttccagaccatcgtcgggctcaagatcagggacctctacgagcagatcgtcgcacgtcgctgaccatgacggccaaccctagcaaggtctcgtttttttgtcccatacaaacaatcaaacgcagaccgatacttgatcaatacatgtgcagagcctatttctgctcccacgggcaaccaaacacatcgattgtgttcgtgcgcatcagcacgggtgtagaatggataggcgtgtgtgtagttgtgtacaggctacacgcgtgtccggtccgatctttttgacagattcgtgcaatgtcgcgtgagttggtgtggatgtcggtacgtgggcattcttcttgcaaatgtccaggtcacactagatggagctgtctgtgttcaggaattctctgagagccgatctcttgggagctgagggcatatttgaggatacacatcttgagctgagagtcagctgaac

SEQ ID NO: 218243 - DNA, 1879 bp, Zea Mays
aacccatgcacatgtcttaacatgtttggcttccgagcaaactttctccagaccccccaagaaaatgtaagatccgatcagatatgtgtcgatgctcatcccagcgtactcccattgcaacgcacgagcacacaactagttaactataaactctataaatgtaagctactttcgcagtagctttacggatcctgtaattacattattttatggactgagggagggaggagaggatcaataagccacgcgggccccaccatatcttcatccacaaagccaccaccaagctttttcatggtcgtcgctttccgctttcctttgctgctgaccatatatctacggtagcaagacaagacaaggaagtcggctgatccatggcggccttcacggtgcacacgagcgccgccacctcgccctactcgccggcgggcacggccatccttctccgaagccggagtcgagcctaccccaccgccaccatccgcgtgtcgtgctcgaagacggtggtgatcggggtggcggcggactcagggtgcgggaagaccacgttcacgcggcgcctggcgagcgtgttgggcggcggggcggagccaccgagggccggccggaacccgggctccaacacgctcgtcagcgacaccaccacggtgatctgcctggacgactaccactcgctggacagggtcgggcggaaggcgaagggcgtcacggcgctggatccgaggttcgtcgacttcgacctcatgtacgagcaggtgagggccatcaaggagggccgcgccgtcgagaaacccgtctacaaccacgtcaccggcctcctcgacccgcccgagctcatcaccccgccgaacatcctcgtcatcaaggggctgcacccaatgttcgacgagcgcgtgagggacctgctagatttcagcatctacctggacatcagcaacgaggtgaagcttgcatggaaaatccagagagacatgggagagcgtggtgggcacagccttgagagcatcaaggcctccatcgaggcaaggaagcccgacttcgaagcttacattgagccgcagaagcagtacgcggacgccgtgatcgaggtcctgccgacgcagctgatcccgggcgacgacgagtgcaaggtggtgcgcgtgaagctgatcatgaaggaaggcgtggagcacttcgcccccgtgcacctcttcgacgaaggatccaccgtctactggatcccctgcggccggaagctctcctgctcctaccctggcatcaggtgtcggtggtggagatggacgggcagttcgacaagctggacgagctcatctacgtggagacccacctgagcaacctgtcaaccaagttctacggggaggtgacgcagcagatgctcaggcacgccgacgtccccggcagcaacaacggcacggggctcttccagaccatcgtcgggctcaagatcagggacctctacgagcagatcgtcgcacgtcgctgaccatgacggccaaccctagcaaggtctcgtttttttgtcccatacaaacaatcaaacgcagaccgatacttgatcaatacatgtgcagagcctatttctgctcccacgggcaaccaaacacatcgattgtgttcgtgcgcatcagcacgggtgtagaatggataggcgtgtgtgtagttgtgtacaggctacacgcgtgtccggtccgatctttttgacagattcgtgcaatgtcgcgtgagttggtgtggatgtcggtacgtgggcattcttcttgcaaatgtccaggtcacactagatggagctgtctgtgttcaggaattctctgagagccgatctcttgggagctgagggcatatttgaggatacacatcttgagctgagagtcagctgaac

SEQ ID NO: 218244 - DNA, 1030 bp, Zea Mays
tcgctcgtggctaggtgtcaagtgaggcccgcacgacggacaaagacaaggtgtgcgtgcttctggcgctacgggccgcgtgctggaacggacgggccaccagcacccatcgtggacgcctgaccacgccccatgtgtgttagcaccttacaggagatttgagggcgtcgcgtgcgatgcccgttgcgccgccgccaacatctcgctgcaggggaagtatctcgccggcacgctccacctgccctcccatgggtccgcccctggccggcctctacctcagctacaacaccctctggcggcatccagtaggagctggctgcggatcccgcagatggcgccaagaccgtgcgcaagccggtcttcaccaccgtcgaccagctacaaccccagatgcacagccacactcttaccatccgcgtcatctttgcctgcaccatcctcgacaaatcctccatgcacattggtcgcacccgcatcccccagtgcctcgtcggatacaacaccgacatcgtcctcgtcacgctcgcaacaatctggatacactcacggtgtgctggtgtgtgtggaggaagagcctgacggaggctgaggagaggaatcagtagagcaaatgagcaagacgagacagatgtgtagctgctggtgtttctccactatcgcgacctcactgctcaagcatggcatatatagagtgacgagaacaccatggaatggagttgtgctgttgtggtgcggagtaggagcgtccaagcgaggagagaatcacatgcgatttctctcattgttgttgttctcgcgtcgtttctgattctacgttgaaacaaagtgtttgtcccattagggtgtgtttcctcgctttttctcgcacaagaatccagtaaaaagttatccaaataggctcgttgactgctatagtccgtcgattcgattctcccatctatatcctttgtggttgcccatccggctatcccattatttacctttaaatgatgttgttttagttttgttgcatttcctgtcgatttctaag

SEQ ID NO: 218245 - DNA, 1044 bp, Zea Mays
tcgctcgtggctaggtgtcaagtgaggcccgcacgacggacaaagacaaggtgtgcgtgcttctggcgctacgggccgcgtgctggaacggacgggccaccagcacccatcgtggacgcctgaccacgccccatgtgtgttagcaccttacaggagatttgagggcgtcgcgtgcgatgcccgttgcgccgccgccaacatctcgctgcaggggaagtatctcgccggcacgctccacctgccctcccatgggtccgcccctggccggcctctacctcagctacaacaccctctggcggcatccagtaggagctggctgcggatcccgcagatggcgccaagaccgtgcgcaagccggtcttcaccaccgtcgaccagctacaaccccagatgcacagccacactcttaccatccgcgtcatctttgcctgcaccatcctcgacaaatcctccatgcacattggtcgcacccgcatcccccagtgcctcgtcggatacaacaccgacatcgtcctcgtcacgctcgcaacaatctggcaaatttgtcatagatacactcacggtgtgctggtgtgtgtggaggaagagcctgacggaggctgaggagaggaatcagtagagcaaatgagcaagacgagacagatgtgtagctgctggtgtttctccactatcgcgacctcactgctcaagcatggcatatatagagtgacgagaacaccatggaatggagttgtgctgttgtggtgcggagtaggagcgtccaagcgaggagagaatcacatgcgatttctctcattgttgttgttctcgcgtcgtttctgattctacgttgaaacaaagtgtttgtcccattagggtgtgtttcctcgctttttctcgcacaagaatccagtaaaaagttatccaaataggctcgttgactgctatagtccgtcgattcgattctcccatctatatcctttgtggttgcccatccggctatcccattatttacctttaaatgatgttgttttagttttgttgcatttcctgtcgatttctaag

SEQ ID NO: 218246 - DNA, 771 bp, Zea Mays
ctgacgcacacacgctgcatacgtacaccttcaactggggacggacggtgacgagcaagtcggagcgcgtgctcaagctgctggagcgcggcccgttcctggaggaggagcgcgagcgggcacgcaagatcgcgcgcgagatcaagggcttcggcagcttcaacctcagcagcgcctcccacgccgcgccacagccaccaccaggtgacgagggaagccgcggctacggccggagcaactcgcagttcgagcagcggtggaggcacaaggacggcgacgacagcgacaaggagaatctgatccagagcccggagccagcacgggtcgcgcgggaagtcgaggccgagccggaggagccgcaccaccacccgttccacgggctcgggcaaaaacagcggccggaggcgatgctgctcctgagccagtgacgggatcagtcggttcgtgtcatggtgatatgaaaaagaaccgtgtgctctgctcgactcaactagcttttctccattcctcaaggctgcaggggtcggaggcagtgatgggatcagtcagtactttactgacactgcttggtgcaccatgcatgagaactttgatgtctcatgtagtagtcatgtctgcttcgccttgtaaataattctatgcttcagttcggatgccaggatgtaatacgagtctacgactctacgagacaacataaggctgtctccaacaatagcccgtaaattgttctgtccgctacatatagcgttttcttccgtccggtctccgccc

SEQ ID NO: 218247 - DNA, 425 bp, Zea Mays
ctctttcagggccttgaaatctcgccctcgttgcggtcgtccacatccttttctctcctcctcgccggcccaacctgattgttcttcaaccaagaggaagaaaggaaggaagggaccggaagcatcagccatgtcgaactcggcgtcgggaatggccgtctgtgatgaatgcaagctcaagttccaggagctcaaggcaaagaggagcttccgcttcatcgtgttcaagatcaacgagaacgtgcagcaggtggtggtggacaggctgggggggccaggagagagctacgacgccttcacggcctgcttccccgccaacgagtgccgctacgccgtgttcgattttgacttcgtcactgacgagaactgccagaagagcaagatcttctttatctcttgtttggcttgtcattgtttgtttacag

SEQ ID NO: 218248 - DNA, 5475 bp, Zea Mays
cgcatcgcaactcaacattctacctcgcgaaaccctatcaacgccgccgtcacccgaaccccatccacgaggaagtcgcgccagcgccggagcgtcctcaccgccgacgccgcgacgccgccgctgaagcctgcggtgatgcagaagacggcgacactcgctaccaaccatgaccctgccgtggtcttgcaagcgacagaaccaagccctccactccctttctccatcctctcgtggaagatgaagacgcaaccgtcgcacgcccgatgacagcactcacatcgttccctcttcctcttcctcccgcgcaaggtcaaccatgtcgtcaccggaacgggaacccgccacccctcgtctccgtctggaatcaggtgattcttgcagcctctgtagtatcaaagtctgtaaaagctaattttataatagagcgcgacgcatagcagctcattgagcctgcccacgttagcaaaaagaatatagaccctgcgatgaaacatcaacgatcacggaggtctcagcatgttgcctacatagactcacgctgcttctagagaggtccagcgcatggggaaaaaagaggcagactcgagttgccgtcgtcttcgctggcccttgcctatcgtccgttcgcattcatctcattcaactggtaaaattaggagcactccctcacacgctacacagcgacctggccaacatgctagccggtggctcatcgtatctggcgactctgggccactggagcttctccaaccacagtctcaactctcaagaagctcccagccgccgctccctctcccccatcctcctaccacgacgatggatcctgctaccgtcgtcgtcatcgaggagtcataccggtcctactattgcatgcggaactccaagcagtgtacggaagacaacagggcgaaagctaaattgcagaaaagaaaaggaggacatttgactgttgaacgatggtcgaaggttccaatttcggtggcatgattggtggtcatgatgatgataggaatttactagacctctccggaatataaagtaatcagccatatagtatgtggtcctggagttcatagttttgctacttttctggcgtgacgatgtggcggaggcgatgacagggcctaaaacggattggtcgtcctgctctgtgtcggaagttatgtgaattttctgcctcctagcgctagacagatgaactccttgccattgctttctactgttgtttgtttattttaatgcagcaacagagcctatgaagaagccctattttctgctgctgtttgccaactccaagtagatcgcccactgaagaagctcaccctcctcgctatagaagaaccgtgaaattttgtttcgttgccatagtggaaattgcagctgcaatgcgtgagggatggttgtcgggtgtgttttcctgactatatatgccttgagatatttccctgaggaggcaatagatccagatgtgttattgtcacttgccttctcatttaaggtgattcatgcaagtgctcacctcccgaagatatgaagaaagtaagaaaacaaatcgtcgatcacatttacccgtggatattagaatgccaagagaaaggacatgccaaagtgccatcattgggaagcaaatggatgtttaggacggacactggggctttgaagtagttggtggctgcgactgcgaggccgagacgggttagattgagagaggtgggcagatggcgacactgtcgtcgtcgctttgctccagctttgcctccctgcggaccgcctccatcggccaccctcgcgtcatcatgtcatctacgcccaggttagtttctccttccctgcttcctatttgcctgtgtctgagtagcgacgccctcgcgtgaggtacgaatgtagtagcaccgagcgggcgggtggccacctcttccattcagtcgcatactcgcatctcgctccttgtcagtcttagttcctagcgatctcttgtctcgttgccggcccccgacggctccgtgcggctgctgctgcgaattccattcttaaatttttgtccacctgatggcggcctccaagtggcccagtctcttaaactatgcagttgtagacaacttatatagttgcagtagtttcagtcttttgctgctgcaaacatgaaatccaattatctattgaacctgttttgcgagtttgtgcgctatggcccgacaacgaattcgtattgatttgttctatgaagaggtagattagggatctcaatcattttgaatgtgttattttccattatttttgtctctgttgattctgtgttgctgcttgccatttctctattaagataaaagaggaaaaacatttatatcgatcaacaaagtctaaagcttgcagtagagtgggcttatttgaaatgattttgattatcaattttgtggcacctcataaaaggaactcaagtgacattcagagatgagagattgcctggatttctagcaagattcatgcaacgtcgggaggtgggaaaatatttttttgtcaacctaaaagtatgcttcttattaccaactaggactgcataccagttaggttcagactctgtaaacaaaggccaataccctatcagcacaactcacactgctccaggtatatgcacaatgttaccagtgaagtataatttcagacaggtatatgcacaacgtggcacctgatagttcaaagaccatcacggaaaaaatcagtgagtatgacgagaccctgtttttcttctacgaaacaataggttctgatgcatgtgtgatattgactatgctttagatattagttctttagttcaaagatcacacattcttttctgatagttttgacatttcatcgaagataacttttttactttgtttcagtcttgcgggaaatcagttcatttgcaattcatcaattatacatggttgttcggatctgatagcaatgattaatgataattgatttcccagatggcacatatctattctttagaaactggaagttaattgtacattaatggcagagacaatgtcagtacaggtccaaaggtccaagaacaccatgagttagctctaccaatttctttcagtgtcacatgtttcgcaatatttgttttgttgtttgtgtattggctaagttactacttaatacagatggtgctttcttttacttcagctggtaattatctaagcctatgtagtattaacaccttacacgttaaatatacatgatttgactttttattgtataccaagatctataatttgaattgggtcatgtgaagcattttgcatttcatgatctgcaaagtgcaacatacaattataattccaataatatattaggtcaagtaggttttagcattgtgtataaaggttgtttgaaaaatggagctttagtgatagtaaagagattaaaagatcttgatgttaccagtgaagtataatttcagacagaaattgagttgattggccttgtcgtgcacagggtgtttataaggattttgcatgacctctaaagaacggttgcttgtatatccatatatgccaaatggtagtgttgctgaccgcttgagatgtaactcaattgtctacaacattgtttgttagttaagtctataattggcattctgcacaagtttgcattccttgtcaatattttgtgatctacaaagtgcaacaaacaattttaattccaagaatatattaagtaaaggaggttttggcattgtgtataaaggttgtttgagaaatggcttgtgtttcatatccttgatattatgaatttacataatacaatctaatctgaaagatagttttttcaggctcaagcgatagcgtgcgtgcatgagacttagatggcggcttcggaggcggcaacgacaatgttaaaaatagtttttctcacaaaattaaaataactatcttgcttttcaggcattgccagaaatagctcaaaagattacacggttggagaatgagataccttgcttgattcttctggcgagacttgcacattttcttttacatactgatcttgctgaacatcacaaattggggcttgatatatctgaactggagaagaaaatcatttatgagatgatgagaccagagaggactttgttgtatttggttcctggaaggctggttagggtgagggatggttcaacagactggggatggggtgtggtgtggttgtaaatctatactactccttaacaagctaaggagggcgtccacaactccgtgcccccgcccccgtctctcgctcgcgacctcccgcacgacgcgccagggcaatctggactttgctacatactggtttttacatgcacaataaagctagctggtatcacatttactggtgatcctgctaagaataagaaagatctatttggtgctattgcaatggtattgagagttgtaggaggcaagaattcacaattatctttgcctacacgctattctctgaacacaatatttacgagcttgataggtctattttggaatacgaattatgagtttggtaggtaaataatttatacaatgattcttggacctttgaccctttctgcttcaaggattaatgtgtgactgtgtttagccttcaatccaagcgacatgccactaatctcaaaaatgcttctatgcaatatttacttgacaatttatatctctgctgttccttagagatattttcatgtaatatgttacaaggttgttcatgtgagatttttggtcataaattatattatatatgaagataatgggagtcagccctaaattcatattatctgcaatctgcagtttcttgaaaaaaatgtttgatctacatcagaattttcccaaaatatctaacagacttgttttcttcaggccaggaacccagggtctacacatcttataactgaaaaacacataagcagcaagaaggtgagcaaggcatctaagatccagtggcttgtgaacccttgacccttcagaggaagcatgctagaatcattgacaagaagattgccaagaagaagtctgaggctgtcgagtaccaaaagcttcttcctataggctgaaggaatagagatcaccacaatgagagcttggccaagagaagatccaagctttctacctctgccaaggcttcctctggcacctccgcttaagaatgtcttaagaatgttcagtgcttttgagatgttttcaagacctatcttgttacagcttaagtaccttatgctgctctagctgtgttgcaactgtccctatacttgacagatttgcattagatgcttaggctatagagggtaggatcctaattgtgaccatgtactaaattatatatctgttgctaagttacagtacagacaaaataaatttagcctggccaacttgtagaaaacgactaacttgtagaaaaacgtgttattgtaactaagaatatctaaattgctcctatgttactttctatattcat

SEQ ID NO: 218249 - DNA, 2940 bp, Zea Mays
atggggaaaaaagaggcagactcgagttgccgtcgtcttcgctggcccttgcctatcgtccgttcgcattcatctcattcaactggtaaaattaggagcactccctcacacgctacacagcgacctggccaacatgctagccggtggctcatcgtatctggcgactctgggccactggagcttctccaaccacagtctcaactctcaagaagctcccagccgccgctccctctcccccatcctcctaccacgacgatggatcctgctaccgtcgtcgtcatcgaggagtcataccggtcctactattgcatgcggaactccaagcagtgtacggaagacaacagggcgaaagctaaattgcagaaaagaaaaggaggacatttgactgttgaacgatggtcgaaggttccaatttcggtggcatgattggtggtcatgatgatgataggaatttactagacctctccggaatataaagtaatcagccatatagtatgtggtcctggagttcatagttttgctacttttctggcgtgacgatgtggcggaggcgatgacagggcctaaaacggattggtcgtcctgctctgtgtcggaagttatgtgaattttctgcctcctagcgctagacagatgaactccttgccattgctttctactgttgtttgtttattttaatgcagcaacagagcctatgaagaagccctattttctgctgctgtttgccaactccaagtagatcgcccactgaagaagctcaccctcctcgctatagaaggtgattcatgcaagtgctcacctcccgaagatatgaagaaagtaagaaaacaaatcgtcgatcacatttacccgtggatattagaatgccaagagaaaggacatgccaaagtgccatcattgggaagcaaatggatgtttaggactgcataccagttaggttcagactctgtaaacaaaggccaataccctatcagcacaactcacactgctccaggtatatgcacaatgttaccagtgaagtataatttcagacaggcattgccagaaatagctcaaaagattacacggttggagaatgagataccttgcttgattcttctggcgaggtgtggtaatcttaattattgtattcagtattgttcttatgtgaatttatcatcctcctccctaatattagacttgcacattttcttttacatactgatcttgctgaacatcacaaattggggcttgatatatctgaactggagaagaaaatcatttatgagatgatgagaccagagaggactttgttgtatttggttcctggaaggctggttagggtgagggatggttcaacagactggggatggggtgtggtgtggttgtaaatctatactactccttaacaagctaaggagggcgtccacaactccgtgcccccgcccccgtctctcgctcgcgacctcccgcacgacgcgccagggcaatctggactttgctacatactggtttttacatgcacaataaagctagctggtatcacatttactggtgatcctgctaagaataagaaagatctatttggtgctattgcaatggtattgagagttgtaggaggcaagaattcacaattatctttgcctacacgctattctctgaacacaatatttacgagcttgataggtctattttggaatacgaattatgagtttggtaggtaaataatttatacaatgattcttggacctttgaccctttctgcttcaaggattaatgtgtgactgtgtttagccttcaatccaagcgacatgccactaatctcaaaaatgcttctatgcaatatttacttgacaatttatatctctgctgttccttagagatattttcatgtaatatgttacaaggttgttcatgtgagatttttggtcataaattatattatatatgaagataatgggagtcagccctaaattcatattatctgcaatctgcagtttcttgaaaaaaatgtttgatctacatcagaattttcccaaaatatctaacagacttgttttcttcaggccaggaacccagggtctacacatcttataactgaaaaacacataagcagtatgcggttcacacttttttcttgtttgcattttataaaccattagacccttgtaacaaaaagcagattgtttagatgttatgctctcttatatggagattctcaagtatcttagaatcagttatgtgttggataaatgtcttggttatttactcttctattagtgctctaggcttgttctgtgttggataaatgtcttggttatttactcttctatcctcaagtatcttaggaataggattcatgacaatgagccattgatttctgaagttttccaagctaacctatttgctttgtaggcaagaaggtgagcaaggcatctaagatccagtggcttgtgaacccttgacccttcagaggaagcatgctagaatcattgacaagaagattgccaagaagaagtctgaggctgtcgagtaccaaaagcttcttcctataggctgaaggaatagagatcaccacaatgagagcttggccaagagaagatccaagctttctacctctgccaaggcttcctctggcacctccgcttaagaatgtcttaagaatgttcagtgcttttgagatgttttcaagacctatcttgttacagcttaagtaccttatgctgctctagctgtgttgcaactgtccctatacttgacagatttgcattagatgcttaggctatagagggtaggatcctaattgtgaccatgtactaaattatatatctgttgctaagttacagtacagacaaaataaatttagcctggccaacttgtagaaaacgactaacttgtagaaaaacgtgttattgtaactaagaatatctaaattgctcctatgttactttctatattcat

SEQ ID NO: 218250 - DNA, 3042 bp, Zea Mays
atggggaaaaaagaggcagactcgagttgccgtcgtcttcgctggcccttgcctatcgtccgttcgcattcatctcattcaactggtaaaattaggagcactccctcacacgctacacagcgacctggccaacatgctagccggtggctcatcgtatctggcgactctgggccactggagcttctccaaccacagtctcaactctcaagaagctcccagccgccgctccctctcccccatcctcctaccacgacgatggatcctgctaccgtcgtcgtcatcgaggagtcataccggtcctactattgcatgcgcggtgtaaggaactccaagcagtgtacggaagacaacagggcgaaagctaaattgcagaaaagaaaaggaggacatttgactgttgaacgatggtcgaaggttccaatttcggtggcatgattggtggtcatgatgatgataggaatttactagacctctccggaatataaagtaatcagccatatagtatgtggtcctggagttcatagttttgctacttttctggcgtgacgatgtggcggaggcgatgacagggcctaaaacggattggtcgtcctgctctgtgtcggaagttatgtgaattttctgcctcctagcgctagacagatgaactccttgccattgctttctactgttgtttgtttattttaatgcagcaacagagcctatgaagaagccctattttctgctgctgtttgccaactccaagtagatcgcccactgaagaagctcaccctcctcgctatagaagaaccgtgaaattttgtttcgttgccatagtggaaattgcagctgcaatgcgtgagggatggttgtcgggtgtgttttcctgactatatatgccttgagatatttccctgaggaggcaatagatccagatgtgttattgtcacttgccttctcatttaagtcctgttatattctgtccaccaggtgattcatgcaagtgctcacctcccgaagatatgaagaaagtaagaaaacaaatcgtcgatcacatttacccgtggatattagaatgccaagagaaaggacatgccaaagtgccatcattgggaagcaaatggatgtttaggacggacactggggctttgaagtagttggtggctgcgactgcgaggccgagacgggttagattgagagaggtgggcagatggcgacactgtcgtcgtcgctttgctccagctttgcctccctgcggaccgcctccatcggccaccctcgcgtcatcatgtcatctacgcccaggcattgccagaaatagctcaaaagattacacggttggagaatgagataccttgcttgattcttctggcgagaaaatcatttatgagatgatgagaccagagaggactttgttgtatttggttcctggaaggctggttagggtgagggatggttcaacagactggggatggggtgtggtgtggttgtaaatctatactactccttaacaagctaaggagggcgtccacaactccgtgcccccgcccccgtctctcgctcgcgacctcccgcacgacgcgccagggcaatctggactttgctacatactggtttttacatgcacaataaagctagctggtatcacatttactggtgatcctgctaagaataagaaagatctatttggtgctattgcaatggtattgagagttgtaggaggcaagaattcacaattatctttgcctacacgctattctctgaacacaatatttacgagcttgataggtctattttggaatacgaattatgagtttggtaggtaaataatttatacaatgattcttggacctttgaccctttctgcttcaaggattaatgtgtgactgtgtttagccttcaatccaagcgacatgccactaatctcaaaaatgcttctatgcaatatttacttgacaatttatatctctgctgttccttagagatattttcatgtaatatgttacaaggttgttcatgtgagatttttggtcataaattatattatatatgaagataatgggagtcagccctaaattcatattatctgcaatctgcagtttcttgaaaaaaatgtttgatctacatcagaattttcccaaaatatctaacagacttgttttcttcaggccaggaacccagggtctacacatcttataactgaaaaacacataagcagtatgcggttcacacttttttcttgtttgcattttataaaccattagacccttgtaacaaaaagcagattgtttagatgttatgctctcttatatggagattctcaagtatcttagaatcagttatgtgttggataaatgtcttggttatttactcttctattagtgctctaggcttgttctgtgttggataaatgtcttggttatttactcttctatcctcaagtatcttaggaataggattcatgacaatgagccattgatttctgaagttttccaagctaacctatttgctttgtaggcaagaaggtgagcaaggcatctaagatccagtggcttgtgaacccttgacccttcagaggaagcatgctagaatcattgacaagaagattgccaagaagaagtctgaggctgtcgagtaccaaaagcttcttcctataggctgaaggaatagagatcaccacaatgagagcttggccaagagaagatccaagctttctacctctgccaaggcttcctctggcacctccgcttaagaatgtcttaagaatgttcagtgcttttgagatgttttcaagacctatcttgttacagcttaagtaccttatgctgctctagctgtgttgcaactgtccctatacttgacagatttgcattagatgcttaggctatagagggtaggatcctaattgtgaccatgtactaaattatatatctgttgctaagttacagtacagacaaaataaatttagcctggccaacttgtagaaaacgactaacttgtagaaaaacgtgttattgtaactaagaatatctaaattgctcctatgttactttctatattcat

SEQ ID NO: 218251 - DNA, 2659 bp, Zea Mays
atggggaaaaaagaggcagactcgagttgccgtcgtcttcgctggcccttgcctatcgtccgttcgcattcatctcattcaactggtaaaattaggagcactccctcacacgctacacagcgacctggccaacatgctagccggtggctcatcgtatctggcgactctgggccactggagcttctccaaccacagtctcaactctcaagaagctcccagccgccgctccctctcccccatcctcctaccacgacgatggatcctgctaccgtcgtcgtcatcgaggagtcataccggtcctactattgcatgcgcaacagagcctatgaagaagccctattttctgctgctgtttgccaactccaagtagatcgcccactgaagaagctcaccctcctcgctatagaagaaccgtgaaattttgtttcgttgccatagtggaaattgcagctgcaatgcgtgagggatggttgtcgggtgtgttttcctgactatatatgccttgagatatttccctgaggaggcaatagatccagatgtgttattgtcacttgccttctcatttaaggtgattcatgcaagtgctcacctcccgaagatatgaagaaagtaagaaaacaaatcgtcgatcacatttacccgtggatattagaatgccaagagaaaggacatgccaaagtgccatcattgggaagcaaatggatgtttaggactgcataccagttaggttcagactctgtaaacaaaggccaataccctatcagcacaactcacactgctccaggtatatgcacaatgttaccagtgaagtataatttcagacaggcattgccagaaatagctcaaaagattacacggttggagaatgagataccttgcttgattcttctggcgagacttgcacattttcttttacatactgatcttgctgaacatcacaaattggggcttgatatatctgaactggagaagaaaatcatttatgagatgatgagaccagagaggactttgttgtatttggttcctggaaggctggttagggtgagggatggttcaacagactggggatggggtgtggtgtggttgtaaatctatactactccttaacaagctaaggagggcgtccacaactccgtgcccccgcccccgtctctcgctcgcgacctcccgcacgacgcgccagggcaatctggactttgctacatactggtttttacatgcacaataaagctagctggtatcacatttactggtgatcctgctaagaataagaaagatctatttggtgctattgcaatggtattgagagttgtaggaggcaagaattcacaattatctttgcctacacgctattctctgaacacaatatttacgagcttgataggtctattttggaatacgaattatgagtttggtaggtaaataatttatacaatgattcttggacctttgaccctttctgcttcaaggattaatgtgtgactgtgtttagccttcaatccaagcgacatgccactaatctcaaaaatgcttctatgcaatatttacttgacaatttatatctctgctgttccttagagatattttcatgtaatatgttacaaggttgttcatgtgagatttttggtcataaattatattatatatgaagataatgggagtcagccctaaattcatattatctgcaatctgcagtttcttgaaaaaaatgtttgatctacatcagaattttcccaaaatatctaacagacttgttttcttcaggccaggaacccagggtctacacatcttataactgaaaaacacataagcagtatgcggttcacacttttttcttgtttgcattttataaaccattagacccttgtaacaaaaagcagattgtttagatgttatgctctcttatatggagattctcaagtatcttagaatcagttatgtgttggataaatgtcttggttatttactcttctattagtgctctaggcttgttctgtgttggataaatgtcttggttatttactcttctatcctcaagtatcttaggaataggattcatgacaatgagccattgatttctgaagttttccaagctaacctatttgctttgtaggcaagaaggtgagcaaggcatctaagatccagtggcttgtgaacccttgacccttcagaggaagcatgctagaatcattgacaagaagattgccaagaagaagtctgaggctgtcgagtaccaaaagcttcttcctataggctgaaggaatagagatcaccacaatgagagcttggccaagagaagatccaagctttctacctctgccaaggcttcctctggcacctccgcttaagaatgtcttaagaatgttcagtgcttttgagatgttttcaagacctatcttgttacagcttaagtaccttatgctgctctagctgtgttgcaactgtccctatacttgacagatttgcattagatgcttaggctatagagggtaggatcctaattgtgaccatgtactaaattatatatctgttgctaagttacagtacagacaaaataaatttagcctggccaacttgtagaaaacgactaacttgtagaaaaacgtgttattgtaactaagaatatctaaattgctcctatgttactttctatattcat

SEQ ID NO: 218252 - DNA, 5005 bp, Zea Mays
atggggaaaaaagaggcagactcgagttgccgtcgtcttcgctggcccttgcctatcgtccgttcgcattcatctcattcaactggtaaaattaggagcactccctcacacgctacacagcgacctggccaacatgctagccggtggctcatcgtatctggcgactctgggccactggagcttctccaaccacagtctcaactctcaagaagctcccagccgccgctccctctcccccatcctcctaccacgacgatggatcctgctaccgtcgtcgtcatcgaggagtcataccggtcctactattgcatgcggaactccaagcagtgtacggaagacaacagggcgaaagctaaattgcagaaaagaaaaggaggacatttgactgttgaacgatggtcgaaggttccaatttcggtggcatgattggtggtcatgatgatgataggaatttactagacctctccggaatataaagtaatcagccatatagtatgtggtcctggagttcatagttttgctacttttctggcgtgacgatgtggcggaggcgatgacagggcctaaaacggattggtcgtcctgctctgtgtcggaagttatgtgaattttctgcctcctagcgctagacagatgaactccttgccattgctttctactgttgtttgtttattttaatgcagcaacagagcctatgaagaagccctattttctgctgctgtttgccaactccaagtagatcgcccactgaagaagctcaccctcctcgctatagaagaaccgtgaaattttgtttcgttgccatagtggaaattgcagctgcaatgcgtgagggatggttgtcgggtgtgttttcctgactatatatgccttgagatatttccctgaggaggcaatagatccagatgtgttattgtcacttgccttctcatttaagtcctgttatattctgtccaccaggtgattcatgcaagtgctcacctcccgaagatatgaagaaagtaagaaaacaaatcgtcgatcacatttacccgtggatattagaatgccaagagaaaggacatgccaaagtgccatcattgggaagcaaatggatgtttaggacggacactggggctttgaagtagttggtggctgcgactgcgaggccgagacgggttagattgagagaggtgggcagatggcgacactgtcgtcgtcgctttgctccagctttgcctccctgcggaccgcctccatcggccaccctcgcgtcatcatgtcatctacgcccaggttagtttctccttccctgcttcctatttgcctgtgtctgagtagcgacgccctcgcgtgaggtacgaatgtagtagcaccgagcgggcgggtggccacctcttccattcagtcgcatactcgcatctcgctccttgtcagtcttagttcctagcgatctcttgtctcgttgccggcccccgacggctccgtgcggctgctgctgcgaattccattcttaaatttttgtccacctgatggcggcctccaagtggcccagtctcttaaactatgcagttgtagacaacttatatagttgcagtagtttcagtcttttgctgctgcaaacatgaaatccaattatctattgaacctgttttgcgagtttgtgcgctatggcccgacaacgaattcgtattgatttgttctatgaagaggtagattagggatctcaatcattttgaatgtgttattttccattatttttgtctctgttgattctgtgttgctgcttgccatttctctattaagataaaagaggaaaaacatttatatcgatcaacaaagtctaaagcttgcagtagagtgggcttatttgaaatgattttgattatcaattttgtggcacctcataaaaggaactcaagtgacattcagagatgagagattgcctggatttctagcaagattcatgcaacgtcgggaggtgggaaaatatttttttgtcaacctaaaagtatgcttcttattaccaactaggactgcataccagttaggttcagactctgtaaacaaaggccaataccctatcagcacaactcacactgctccaggtatatgcacaatgttaccagtgaagtataatttcagacaggtatatgcacaacgtggcacctgatagttcaaagaccatcacggaaaaaatcagtgagtatgacgagaccctgtttttcttctacgaaacaataggttctgatgcatgtgtgatattgactatgctttagatattagttctttagttcaaagatcacacattcttttctgatagttttgacatttcatcgaagataacttttttactttgtttcagtcttgcgggaaatcagttcatttgcaattcatcaattatacatggttgttcggatctgatagcaatgattaatgataattgatttcccagatggcacatatctattctttagaaactggaagttaattgtacattaatggcagagacaatgtcagtacaggtccaaaggtccaagaacaccatgagttagctctaccaatttctttcagtgtcacatgtttcgcaatatttgttttgttgtttgtgtattggctaagttactacttaatacagatggtgctttcttttacttcagctggtaattatctaagcctatgtagtattaacaccttacacgttaaatatacatgatttgactttttattgtataccaagatctataatttgaattgggtcatgtgaagcattttgcatttcatgatctgcaaagtgcaacatacaattataattccaataatatattaggtcaagtaggttttagcattgtgtataaaggttgtttgaaaaatggagctttagtgatagtaaagagattaaaagatcttgatgttaccagtgaagtataatttcagacagaaattgagttgattggccttgtcgtgcacagggtgtttataaggattttgcatgacctctaaagaacggttgcttgtatatccatatatgccaaatggtagtgttgctgaccgcttgagatgtaactcaattgtctacaacattgtttgttagttaagtctataattggcattctgcacaagtttgcattccttgtcaatattttgtgatctacaaagtgcaacaaacaattttaattccaagaatatattaagtaaaggaggttttggcattgtgtataaaggttgtttgagaaatggcttgtgtttcatatccttgatattatgaatttacataatacaatctaatctgaaagatagttttttcaggctcaagcgatagcgtgcgtgcatgagacttagatggcggcttcggaggcggcaacgacaatgttaaaaatagtttttctcacaaaattaaaataactatcttgcttttcaggcattgccagaaatagctcaaaagattacacggttggagaatgagataccttgcttgattcttctggcgagaaaatcatttatgagatgatgagaccagagaggactttgttgtatttggttcctggaaggctggttagggtgagggatggttcaacagactggggatggggtgtgctagctggtatcacatttactggtgatcctgctaagaataagaaagatctatttggtgctattgcaatggtattgagagttgtaggaggcaagaattcacaattatctttgcctacacgctattctctgaacacaatatttacgagcttgataggtctattttggaatacgaattatgagtttggtaggtaaataatttatacaatgattcttggacctttgaccctttctgcttcaaggattaatgtgtgactgtgtttagccttcaatccaagcgacatgccactaatctcaaaaatgcttctatgcaatatttacttgacaatttatatctctgctgttccttagagatattttcatgtaatatgttacaaggttgttcatgtgagatttttggtcataaattatattatatatgaagataatgggagtcagccctaaattcatattatctgcaatctgcagtttcttgaaaaaaatgtttgatctacatcagaattttcccaaaatatctaacagacttgttttcttcaggccaggaacccagggtctacacatcttataactgaaaaacacataagcagtatgcggttcacacttttttcttgtttgcattttataaaccattagacccttgtaacaaaaagcagattgtttagatgttatgctctcttatatggagattctcaagtatcttagaatcagttatgtgttggataaatgtcttggttatttactcttctattagtgctctaggcttgttctgtgttggataaatgtcttggttatttactcttctatcctcaagtatcttaggaataggattcatgacaatgagccattgatttctgaagttttccaagctaacctatttgctttgtaggcaagaaggtgagcaaggcatctaagatccagtggcttgtgaacccttgacccttcagaggaagcatgctagaatcattgacaagaagattgccaagaagaagtctgaggctgtcgagtaccaaaagcttcttcctataggctgaaggaatagagatcaccacaatgagagcttggccaagagaagatccaagctttctacctctgccaaggcttcctctggcacctccgcttaagaatgtcttaagaatgttcagtgcttttgagatgttttcaagacctatcttgttacagcttaagtaccttatgctgctctagctgtgttgcaactgtccctatacttgacagatttgcattagatgcttaggctatagagggtaggatcctaattgtgaccatgtactaaattatatatctgttgctaagttacagtacagacaaaataaatttagcctggccaacttgtagaaaacgactaacttgtagaaaaacgtgttattgtaactaagaatatctaaattgctcctatgttactttctatattcat

SEQ ID NO: 218253 - DNA, 2103 bp, Zea Mays
atggggaaaaaagaggcagactcgagttgccgtcgtcttcgctggcccttgcctatcgtccgttcgcattcatctcattcaactggtaaaattaggagcactccctcacacgctacacagcgacctggccaacatgctagccggtggctcatcgtatctggcgactctgggccactggagcttctccaaccacagtctcaactctcaagaagctcccagccgccgctccctctcccccatcctcctaccacgacgatggatcctgctaccgtcgtcgtcatcgaggagtcataccggtcctactattgcatgcgcggtgtaaggaactccaagcagtgtacggaagacaacagggcgaaagctaaattgcagaaaagaaaaggaggacatttgactgttgaacgatggtcgaaggttccaatttcggtggcatgattggtggtcatgatgatgataggaatttactagacctctccggaatataaagtaatcagccatatagtatgtggtcctggagttcatagttttgctacttttctggcgtgacgatgtggcggaggcgatgacagggcctaaaacggattggtcgtcctgctctgtgtcggaagttatgtgaattttctgcctcctagcgctagacagatgaactccttgccattgctttctactgttgtttgtttattttaatgcagcaacagagcctatgaagaagccctattttctgctgctgtttgccaactccaagtagatcgcccactgaagaagctcaccctcctcgctatagaaggtgattcatgcaagtgctcacctcccgaagatatgaagaaagtaagaaaacaaatcgtcgatcacatttacccgtggatattagaatgccaagagaaaggacatgccaaagtgccatcattgggaagcaaatggatgtttaggactgcataccagttaggttcagactctgtaaacaaaggccaataccctatcagcacaactcacactgctccaggtatatgcacaatgttaccagtgaagtataatttcagacaggcattgccagaaatagctcaaaagattacacggttggagaatgagataccttgcttgattcttctggcgagaaaatcatttatgagatgatgagaccagagaggactttgttgtatttggttcctggaaggctggttagggtgagggatggttcaacagactggggatggggtgtggtgtggttgtaaatctatactactccttaacaagctaaggagggcgtccacaactccgtgcccccgcccccgtctctcgctcgcgacctcccgcacgacgcgccagggcaatctggactttgctacatactggtttttacatgcacaataaagctagctggtatcacatttactggtgatcctgctaagaataagaaagatctatttggtgctattgcaatggtattgagagttgtaggaggcaagaattcacaattatctttgcctacacgctattctctgaacacaatatttacgagcttgataggtctattttggaatacgaattatgagtttggcaagaaggtgagcaaggcatctaagatccagtggcttgtgaacccttgacccttcagaggaagcatgctagaatcattgacaagaagattgccaagaagaagtctgaggctgtcgagtaccaaaagcttcttcctataggctgaaggaatagagatcaccacaatgagagcttggccaagagaagatccaagctttctacctctgccaaggcttcctctggcacctccgcttaagaatgtcttaagaatgttcagtgcttttgagatgttttcaagacctatcttgttacagcttaagtaccttatgctgctctagctgtgttgcaactgtccctatacttgacagatttgcattagatgcttaggctatagagggtaggatcctaattgtgaccatgtactaaattatatatctgttgctaagttacagtacagacaaaataaatttagcctggccaacttgtagaaaacgactaacttgtagaaaaacgtgttattgtaactaagaatatctaaattgctcctatgttactttctatattcat

SEQ ID NO: 218254 - DNA, 4167 bp, Zea Mays
caagcagtgtacggaagacaacagggcgaaagctaaattgcagaaaagaaaaggaggacatttgactgttgaacgatggtcgaaggttccaatttcggtggcatgattggtggtcatgatgatgataggaatttactagacctctccggaatataaagtaatcagccatatagtatgtggtcctggagttcatagttttgctacttttctggcgtgacgatgtggcggaggcgatgacagggcctaaaacggattggtcgtcctgctctgtgtcggaagttatgtgaattttctgcctcctagcgctagacagatgaactccttgccattgctttctactgttgtttgtttattttaatgcagcaacagagcctatgaagaagccctattttctgctgctgtttgccaactccaagtagatcgcccactgaagaagctcaccctcctcgctatagaagaaccgtgaaattttgtttcgttgccatagtggaaattgcagctgcaatgcgtgagggatggttgtcgggtgtgttttcctgactatatatgccttgagatatttccctgaggaggcaatagatccagatgtgttattgtcacttgccttctcatttaaggtgattcatgcaagtgctcacctcccgaagatatgaagaaagtaagaaaacaaatcgtcgatcacatttacccgtggatattagaatgccaagagaaaggacatgccaaagtgccatcattgggaagcaaatggatgtttaggacggacactggggctttgaagtagttggtggctgcgactgcgaggccgagacgggttagattgagagaggtgggcagatggcgacactgtcgtcgtcgctttgctccagctttgcctccctgcggaccgcctccatcggccaccctcgcgtcatcatgtcatctacgcccaggttagtttctccttccctgcttcctatttgcctgtgtctgagtagcgacgccctcgcgtgaggtacgaatgtagtagcaccgagcgggcgggtggccacctcttccattcagtcgcatactcgcatctcgctccttgtcagtcttagttcctagcgatctcttgtctcgttgccggcccccgacggctccgtgcggctgctgctgcgaattccattcttaaatttttgtccacctgatggcggcctccaagtggcccagtctcttaaactatgcagttgtagacaacttatatagttgcagtagtttcagtcttttgctgctgcaaacatgaaatccaattatctattgaacctgttttgcgagtttgtgcgctatggcccgacaacgaattcgtattgatttgttctatgaagaggtagattagggatctcaatcattttgaatgtgttattttccattatttttgtctctgttgattctgtgttgctgcttgccatttctctattaagataaaagaggaaaaacatttatatcgatcaacaaagtctaaagcttgcagtagagtgggcttatttgaaatgattttgattatcaattttgtggcacctcataaaaggaactcaagtgacattcagagatgagagattgcctggatttctagcaagattcatgcaacgtcgggaggtgggaaaatatttttttgtcaacctaaaagtatgcttcttattaccaactaggactgcataccagttaggttcagactctgtaaacaaaggccaataccctatcagcacaactcacactgctccaggtatatgcacaatgttaccagtgaagtataatttcagacaggtatatgcacaacgtggcacctgatagttcaaagaccatcacggaaaaaatcagtgagtatgacgagaccctgtttttcttctacgaaacaataggttctgatgcatgtgtgatattgactatgctttagatattagttctttagttcaaagatcacacattcttttctgatagttttgacatttcatcgaagataacttttttactttgtttcagtcttgcgggaaatcagttcatttgcaattcatcaattatacatggttgttcggatctgatagcaatgattaatgataattgatttcccagatggcacatatctattctttagaaactggaagttaattgtacattaatggcagagacaatgtcagtacaggtccaaaggtccaagaacaccatgagttagctctaccaatttctttcagtgtcacatgtttcgcaatatttgttttgttgtttgtgtattggctaagttactacttaatacagatggtgctttcttttacttcagctggtaattatctaagcctatgtagtattaacaccttacacgttaaatatacatgatttgactttttattgtataccaagatctataatttgaattgggtcatgtgaagcattttgcatttcatgatctgcaaagtgcaacatacaattataattccaataatatattaggtcaagtaggttttagcattgtgtataaaggttgtttgaaaaatggagctttagtgatagtaaagagattaaaagatcttgatgttaccagtgaagtataatttcagacagaaattgagttgattggccttgtcgtgcacagggtgtttataaggattttgcatgacctctaaagaacggttgcttgtatatccatatatgccaaatggtagtgttgctgaccgcttgagatgtaactcaattgtctacaacattgtttgttagttaagtctataattggcattctgcacaagtttgcattccttgtcaatattttgtgatctacaaagtgcaacaaacaattttaattccaagaatatattaagtaaaggaggttttggcattgtgtataaaggttgtttgagaaatggcttgtgtttcatatccttgatattatgaatttacataatacaatctaatctgaaagatagttttttcaggctcaagcgatagcgtgcgtgcatgagacttagatggcggcttcggaggcggcaacgacaatgttaaaaatagtttttctcacaaaattaaaataactatcttgcttttcaggcattgccagaaatagctcaaaagattacacggttggagaatgagataccttgcttgattcttctggcgaggtgtggtaatcttaattattgtattcagtattgttcttatgtgaatttatcatcctcctccctaatattagacttgcacattttcttttacatactgatcttgctgaacatcacaaattggggcttgatatatctgaactggagaagaaaatcatttatgagatgatgagaccagagaggactttgttgtatttggttcctggaaggctggttagggtgagggatggttcaacagactggggatggggtgtggtgtggttgtaaatctatactactccttaacaagctaaggagggcgtccacaactccgtgcccccgcccccgtctctcgctcgcgacctcccgcacgacgcgccagggcaatctggactttgctacatactggtttttacatgcacaataaagctagctggtatcacatttactggtgatcctgctaagaataagaaagatctatttggtgctattgcaatggtattgagagttgtaggaggcaagaaggtgagcaaggcatctaagatccagtggcttgtgaacccttgacccttcagaggaagcatgctagaatcattgacaagaagattgccaagaagaagtctgaggctgtcgagtaccaaaagcttcttcctataggctgaaggaatagagatcaccacaatgagagcttggccaagagaagatccaagctttctacctctgccaaggcttcctctggcacctccgcttaagaatgtcttaagaatgttcagtgcttttgagatgttttcaagacctatcttgttacagcttaagtaccttatgctgctctagctgtgttgcaactgtccctatacttgacagatttgcattagatgcttaggctatagagggtaggatcctaattgtgaccatgtactaaattatatatctgttgctaagttacagtacagacaaaataaatttagcctggccaacttgtagaaaacgactaacttgtagaaaaacgtgttattgtaactaagaatatctaaattgctcctatgttactttctatattcat

SEQ ID NO: 218255 - DNA, 548 bp, Zea Mays
atgtggaaattccgtggaagaaagaaaggaaccatgtggcgctttcttctcgtagatgccacagaactcgcgcacaaagcaaacacgcgtttccagttttacgtctcctacgtcaaagacttcgggaagcaagtgacggaggtcgccaagttggtcccacagcaggaagcccaccaaatccagcgagatccaggccgtcttggcctcgccctctcggcggacatcaccaagcacaccggttgtctcctcgggcaccaccaagccacctggccttcaccaagttcacctcatcttaggatttggactcacatcttattaccaattattcataaaaaaacatactgacaaccagtgagactctccattgttgatctgtttgacatatttacaaaacatcctttagacttgcatgcacctatttacagaaatatgagttgttgacaatggaaggagaggatattgactaatacatctcaatgacaatcctcaagaaaaggaggcacattgacgttgaggacactctggaccttatctggtgtcaataaatg

SEQ ID NO: 218256 - DNA, 2018 bp, Zea Mays
ggcccgatcgcggtactcgggtcgggccgtcctccgagagtcccagtctcccacggtcccacactcccacccccggagcgctccactgactccgccgtgcctttctcttctctccttccctcggcctccgcctccgcctccggccccgcctcgtctctcctcccccattttaaatttcaaacccctcccacctgcttcatcctcttcccctaaaacctcctcctcagtcctctctcctgctgccacgaggtacggcccagctcttcctcaaagcgggcgaaatccacgccgcgcggcggcggcggcagaggaggaggggggatgatggggtgcctcttcgcctgcttccgcgcgtccggcggcgatggcgaggtgaagggcaccggcggccagctcgcgcatccgtcccagccccccgcgacgacgacgacgaccagccaccaggtccaggatggcgcgggcaggagggccaggccgccgtcgaggaacgcgctctccgccgtgttccagcgagaagatgagggatcaaggacggcgcaagtggcgagctcgtgggcggacgagagtggcgagaggaaggagatggatcaggagcttgtgcatcaggccattatccaaagaagctgtggtgcgttgctgcaaactacaaataacattcaaggagcgctcatcaaatatgctgattcagttcatcagaaggaaacacattcaggatgtcttcctgttgtgtctgatgatctacatttcatggaagcgccgaaggttgagaaatgtgaaactccttcaaggtctcatcagagtttcactgttccagatgcaacgaggatgaagagcaacaccaagctctggatcttgaagaatgtggggtctcaaaagaagaatcctttcaccctgaaaaaacagaggaaccaaagtgcgcaaagaatcaccatgtggtctccatggaaatttcaatatctgatgaatgctcccttttccagagctctgagggttctgtaccatcttcttacaagataagagagagcatgaacacaacatctgtggagaagtccccgaaaactgaggcaactatccatgccaccagaaagaagttaccgaagagcgataattcagaactggagctcccaagcttagcccaatggttgaagcccccaaatcctaagaagacattcagagatgaggccatggcaggagacaggtctcattcgggtaagagttcagatgaggataggcctattattggaatggttgcagcacattggaaagataaggtgccactgccagcaaattttacctctaaattgcgggatggaaatggcattcccaattcaacaaataagtacaaagaagaccaaaaggtgagttggcatgcaacgccatttgaggagaggctcgagaaggctttatccgaagagaagttgctgtctgaaaggagctgttcgagtggaaagacgtctcagtttttaggagtggaaggcgaggagagtgacatggccgaatctaaccgtctgtacaccactgcttatgcatgccaattcagttctgctagccatgagccacagaagctttcagtataatggttctctggccatcaccttcctgattgatggcatttgcacagccctgtttcccctctgtccttttagtaggtagtatctggatgtgatgtttcagcttgtgcttaactcaatcagttaagatataatattactgctgccactagtccacagatattgttgttagcttctattgttctgttttgcttgcgctgctacctacctacctgactgataggcatgcttcattctgcaattctacttgtcctgcgcagcacattaatcccttaccctggtatctgttattttattggattcctgactgacaggcacgtttccagtttacctcgacaagtcgcaaacaaactaaaacaacctacgcctggcggaaaatactatgacttgggagtcgcccttgaaaataataccctttcgcccttgtcttgggatcgattcccgtag

SEQ ID NO: 218257 - DNA, 4782 bp, Zea Mays
ccgcatcccactctcgccggccgccgcagccaaggcaagaggacgcctccccacacccgatctcccctcccacctccgatcgctacgaaaagcccacgcccgcctcgtccctccggccctcccctccgcacgcctcgcttgccgcgctatttcaaatcccgctcgaaccctagtaactacctaccccgcatggtcgatcgtgccgccgcgcgggcacaggcggtgagctccgacccgccgccgcctgcactgctggagcccgacccgcggctcagccagcccggggccgctgatgggcaagaggtcgcttcggcgggtgcgaccgcgggtccgccttccctgccccaggccagcgacgctgaggaagacgctcttgcctcgccagcggggcagccgggcgagcggtgcagagcgatgatggaggtggtggccaaagacggggcgtggaaggtgaccaagctggtggtggagcactgccacgagctgcaggtcgcccccggacatgtcgcggtgaccgtgccagcgttggggatggaattcgactccgtagacgacgccaaggggttctactatggctacggcgagcaggtgggcttcaaggcgcgcatgggctccaaccgccgctcagtgggcgacggcgagaagatcctgcagcggttcctctgctggaaaggcaattacgcgaataggagtagatgtaaggattcggatgcagggaaggaaaccgatgaggtgctggagggtttgtctgctgctgcggggaagaggaagagggaaccttataagacaaggagccgcaatcctggtaggagtacagaggtgattgaagtggagaaaggtgttgggttgggtggtgctgggaatgggctagagctggataatgggaggcgttccaggaggggtaggagtaaaaaggctgaggtagagcatggtgaggattctgttgttgggttcgaggcggaggaggtggctaaagctgtttctgatgctgacgaggaagaggatgaaggggacgaggatcaggaagcagcggaacaggaggtcgaggtggaagtgaaggaacagagagcgagagggaggccgaggaaggctgttatggaagacaatgcccttcaggcacgcgtcttgagggagcttggtgtgagggcattgcagtacaataacgaggagagaaagaagatactcaataagtaccgctctaaacggcagagcagatcagtgtcgagcaggcctaccaagatatcttcaagacaagctttggctgaaaggcgtaagcgtggcaatggaggtagatttctgtcaagtgaagaacagccggtaacttcctgaccacgttgcctatttttaatgctttgcgttgttgctataacattggttacatgctttattgatccattaaacaaagtgagtaacacaaactttatgactcatgatattcatgcaaggaaataatgatgaatgaacgcattgtatattgtttttgtggcataaaatatgtacatgtactgttacatcatttgcatacacaattcatttctacagaaaatggtgttatcttcatggccctttgcatgcttttaatttttgttgtgcttttagtgttgtgtgtaaaaaacatgtatcttgtaagctgtaactcttcttgttgggccttttcttacttactaaatatgaattctggagagttacttcttactggttatgctactgtggctgtaggctcacatatttgtaatccattaacttaacctgccaggtctttgttattgtgttatttgatgaattggttgaaattctttcaatcgctgccttcagaaaggcgttccaaacgtcttaagaagcaaaatctcaaaatgcagaaggctgagagcaaagaagacgaaacaatggaagcagaaccagatccagaaattgatgtagtccctggacctgggggagaaccaaaggttgggatggtttttctgaatgaggataaggcatatgaattctatgccaactatgctgaaactgcagggttcagtgtccgaaaaggctggttggacaaaacagcaaagaatgttacaaaatctcgagcatatgtttgttccaaggagggatttcgtccaagaagtgcttctatcgaatcaaagaaaccaagcctagaagcaagaactggttgccaggcacacatgactattaagattacagcaagcacaaaatatgtagtgactgagtttgtggccgatcataatcatgatcttgaaactcccttggttgacattcagattttgaagtcagaaaagttattagcaaaggtacaacagcctcctgatccaccaaaagttgttctgataccaaatgagtataaaaattacacaaggacaaaacgtacaaaaaatatgcaattaggtgatacccaggccatctgtgaatatttgcaaaggatgaaaggcgagaatccttctttcttttatgccattcaagtagatgaagatgatatgtttacaaatgtgttttgggctgatgctaaatcaataatggattataactactttggtgatgtagtgtgtgttgacacaagatattgcacaagtgactatgggagacctctactattatttactggtgttaaccatcacaatcagctgataatatttggttcagcgttgatttatgatgactcagcacaatcctttagatggttgtttgagaccttcaaatctgctatgagtggaaaacaaccaaaaacagttttgactgaccagtctgctgcacttagcgatgcagtttcttcttggcctggaaccatccaccgcttctcactactgcatttgtatctgaatgctactaagataagcagggataccttacaaggcttggagacttttgcatcagattttagtaggtggctgtatgaatatgaggaggacaacttctattcaagctgggaaatcctttcagagaaatacaatataaaggataatgagtggttctgtaaattgtatgaggatagagaaagatgggctttgccttatgggcgtgacacattctgtgctgatattgcaaccacactaagaagggataacacaaatacaatcctcacagatctaattaaaccagaaatagatcttcagaacttcttcaacaattatgataagtttttggaggagaaacgcctagctgagcaacaagctgactaccttggggctcaaataacgcaaagggtagcaccactgcatctgctttggcaagctgccaatttatatactccaacactttttgagatgttcagaatggaatatgaacagatctcaaagtgtgtggtctatagttgtggtgagattggaccaatatctgagtaccaggtcactgtcaaagacaggcctcagggtcaatttgttagatttgattcaacagaatgtatggttgtttgtagttgtaagaagtttgaattcatgggtcttctttgttgccatgtattgaaaattcttgatctcagaaatattaaagaacttccacgacactatatcctgaaaagatggagaaaagacgctcagagtgaatctccagagaactatggttttgctgccatagatgaagatcctaagttttcattgtcaaaacggtacaacgcattataccggaatttgtataaaattgcagcaaaagcttcagaaagcgttgaagcttatgcattcctggagaaccaatatgaacagcttgttgaacaagtggaagtacttttgcaagcaaagttgcatgataaatcttccttaagtaccgtcctgaaaggcaatcagccaaatatgcttaatagtgaggtcaacagcagtgaacatcgcagagcaactggtaagaaaattaaaaatgtagaggtgcgccgtcagcaacaaagtcttgatccaaacaaaaagaagaagggtagacaagttctgctggaacctgagattgaaattccactcagggttgaacctcccacggtatcaaatgatatccaaaatcatttaagaacaacaaatcagtttcttgcaccaagccatatgatgcaggcaccttatgttgcacagcagtttggtcttggttctttacaaggattcccaggcatgtcaccatttgggcagattcaagaaccaacacctcttcagcagccccatttacaaccaccatcgtttcatagtggtcctcaaattacacagcaatcctcagcttggccaccagaccacggatcaaggccagtacaccattccagtctgggatttcctgtgacatacagtatcctcctgtttggttgctagcagcttggtgcctgactcgcccagcatcagttgaaactaacgattcttacttcctcacgcatctccacgcatgcaagtcaacgagggtaaaaaagcctagcttgcacctgcgcgcacatgcgtccactatatttttacttccccaagcacgtgcctgggcgcggtcaacgcatgcacggggccaggcgcgggagcagagccaaccaatcatgcagtatgtgatgtatggcgaagtagcaatgtagttgtaaattatgtaatgacactgcccctccccgaagggttaatgtcaatgaaatcctttagcatggtgcattggattagattttggaactgaatgcaattctaatgcacacgttaaagccaaccgggaatggggactgtttgttccaggcaaggtggcatggttgggcacagttatcatacaatacaatatgggcctgtttgtttccttttattttgaggaattagaatcttactattggaatagactattttttagaatgtg

SEQ ID NO: 218258 - DNA, 2926 bp, Zea Mays
ggcccggctccctcgcgctcctaccccggcccccaattccaatctcgccgccgccgggttgccgtcctgtgctccgcttcgcaccgccgcaccgctaggaacagcccgtgctggagctgggggaacgaacatctcaacctccgtcacccccataccgtacaagtattcctatggagacgatctcatcttgtcccatctgcaacatacaagttcttacggctgagctggaatggcatgccaatagccactttgatgatgatcaactccaaatggacatggaattagcacatcagatgtcagttgctgaatcaagtacagatgccatgaacgacccaaaacattatagtggatcattcactagtgactctaacgctctaggggctctatcgagtcatagtggatactcgcaccattacagtgagctactggatgaacaaatctcttgcttggtccgagcacaaattcgaagcaaagttcaagaggtggaaggcggtattttgagcttgttgaggagctgcttggagtcagaagcgggttcctcgacaagtatgatatcgtgctatattgaccatcatcagagcctttcatcagaagataagggatggggatgtggatggaggaacattcagatgctgagctctcatctattgaagcaaagaccagaagctagagaagtattatttggtggttctggatttgttcctgacatcccttcactccagaggtggcttgagattgcttgggacaaaaaatttgatacaattggctccagccactttcataacaaaatttatggtgccaagaagtggatagggaccacagagtgcgctgccctcttccgctcctttggtctccgtgcaaggattgtagattttgatagcacagaatcatctgacctccatagtaacaacggaagccgtgcagcgagccaagtacgaggacctatggacaagttcttgataaagaataagcctccaaaatcatcatctgaactttgtcgagaggatgctgaaagtacgagaggccaacaggcccttgttgactgggtttggaactactttgcaagtgagcgctctgacagattagccacacagcgtgtcactgttagcaataaaacgtcattcaaggacaatagttgggattcaaaagaaaccggatcgtcgtggatctcaagaacaatacagccttttgattttagatccgggccatagaactgcagatctagaaaggtgtctaagaagcaaaaaaggatggcagcgtctggtgaagagaggcgtccacacgctcaggaagccacagtatcagctgtgttatgtggatcctggaattgctagttcagaagaggtggagcgactgaagactattgatggcacactagtcaggttttaggttcctggtaagtacggaaactaaacctgacttcctttatctaattattgggtttcattccaccgtcttgttgacgccttcatcagttactttgacctaacaagacatgcttggttgactcgtcgagatgctaagtgaagcttgctgcttttcaacaatatttgaaaatctgcgtggtggtattctggagggataggtcaaactgccttgaatagatcttgacatgcccacttgggcacttgtcctaaactgaaatttacaccgcgttttcgtttttttaccaggttgtagtctgcgggatcttgatggtggttgtggcagtcggcaattttgccaacactatgtatacactggtggtactgaagctgaggtttaaagcaaagatgaagagagcaaagggcagacaggatcccccacatcaaaactgacaggcatgatcgttcctggaacacaaggatgcagcagctgctggcaccatctcttctgtaaatcctttgacctgtgtcaacattttttggtgctgccgtgctagtagtaggagtatcttgcaagcttttgttttggatggtgtggtggtccagaaaacactctgtctgctaaattaccagaaacatccgcagttgtatattgcggcaaaatcccaagtgtatattaaagtcctccaaaaactgccgctgctttcgaccacaaccaaccacctgaatgtatcttttctttacatggtcaatatcaagtcctctttcctctgcaatgcacgatccatttttcacaatcctaaattctcgatggaggaaataaaaatcatgtgagctctagcagcttgctgagctggatatggtggccgcaacccgccttggcgatggacctcgccgccttctccgcgatggcggcgcgcacctgcgccatcgacggccgcagcccgggctgcgccgccacgcactccacggcgagcctggccacgccggcggcctcctcctcgtcgtgcccgccgtccccgagcctgccgtcgacgagccccgccaccccgcgcgccctgacgcgtggcaggatccgcgccgtcaggttctcggcctcggacgccgccggcaggcccgtgacggcctccagcagcagcacgccgaagccgtacacgtcggacctgctggacacgatgcccgtgcgcaggaagaaagggtcggcgtagcccggcgacgccacggcggcgcgcgccggcgccacggccgccgagaagccctcgcaggcggagcccaggtcgcagagccgcacgccgccgtcggagaggagcacgttggacgccgacacgtcgccgtgcaccacggaggccccgccgccgccgccgccgtgcaggtgctccagcgcgcacgccacgtcgtggaggacgcgcatgcgctgcgcccacggcagcggggccgccgccgtgccgtggagcgcgtccgccagcgtgccgccgccgagtaagttagtatatacacgagcggcagcgcacgcaccgtggtcgtcggagtaggcgaggagcgcgacgatgtgcgggtgtcgg

SEQ ID NO: 218259 - DNA, 3567 bp, Zea Mays
cacgaccccgacgcggctccggccatggcccgcctcctccgggccctcgctgccctcctcgtcctcctcctcgcggccgcctccgtcgccgtcgccgacgacggagaaacactgctggagatcaagaaatccttccgcgacggcggcaacgcgctgtacgattggtccggcgacggcgcgtcgccgggctactgctcgtggcgcggcgtgctatgcgacaacgtcaccttcgctgtcgcggcgctcaacctctctgggctcaatctcgagggtgaaatctcagcggccatcgggagtctgcaacgtcttgtctcaatcgatttgaagtcgaatggactctctggacagatccccgatgagattggtgattgttctttgctcgaaactttggatttgtcatctaacaatctagaaggagacataccattctccatgtccaagctgaagcaccttgagaacttgattttgaagaacaacaaactggtgggagtgatcccatcgacactctctcaacttccaaatttgaagatattggacttggctcaaaacaagttaagtggtgaaattccgaatctaatatattggaatgaggttcttcaatacttgggattgcgaagcaatagtttagaaggaagcctctctcccgatatgtgccagttaactggtctgtggtactttgatgtgaagaacaatagcttgacgggtgcaataccagaaaccatagggaactgtacgagctttcagagatttgtcaaacaatcatcttactggagaaatcccgttcaatattggtttcctgcaagtggctacgttatctttgcaagggaacaagttctctggtcctataccatcagtgattggccttatgcaggcgcttgcagtgctagatctgagtttcaatgagctatctggcccaataccctctatactgggcaacttgacatacactgagaaattatacctgcaaggcaataggttaactggattgataccgccagagcttggtaatatgtcgacactgcattacctggaactgaacgacaatctgttgactgggttcattcctcctgatcttggaaaacttacagaattgtttgaattgaaccttgcaaacaacaaccttataggacctatccctgagaatttaagttcatgtgcaaatctcattagtttcaatgcttatggcaataaattgaatggaaccattccacgttcatttcacaagcttgagagtctgacttatctgaatctgtcatcaaatcatctcagtggagcacttccaattgaggttgcaagaatgagaaatttggacactctggacttatcctgtaacatgatcactggttcaattccctcggctattgggaaactagagcatcttttgaggctcaacttaagcaaaaataatgtggctggacacattcctgctgaatttgggaacttaaggagcatcatggagattgatttgtcttacaaccacctcagtggcctgattcctcaagaggttgggatgctacaaaatttgatactgttaaaattagaaagcaataatattactggagatgtctcttcacttatttactgcttgagtctcaatatcttaaatgtatcatacaaccatctttatggtactgtacctacagacaacaacttctcacgattttcacccgacagcttcttgggtaaccctggactttgtggctattggcttcactctgcttcatgcacacaattatccaatgcagagcaaatgaagagatcctctagcgcaaaggcctcaatgtttgcagctattggtgttggtgccgtattgcttgttattatgctcgttatcctagtagttatttgctggccacataactctccagtgctcaaagatgtctctgtaaacaaaccagataaccttgcttcagcatcaaacaacattcatcccaagcttgtgatcctccacatgaacatggccctctatgtatatgatgatataatgaggatgactgaaaacttgagcgaaaaatacattattggttatggagcctcaagtacagtctacagatgcgacctgaagaactgcaagccaattgcgattaaaaagctgtatgctcactaccctcagagcttgaaggaattcgagactgaacttgagactgttggaagcatcaaacaccggaatcttgtaagccttcaggggtactccctgtcaccatctgggaatctcctcttctatgattacatggaaaatggcagcctctgggacattttacatgcttcatcgaagaaaaagaaactcgattgggaggctcgcctcaagattgctctcggagctgctcaaggcctggcttatcttcaccatgaatgcagtccacgaataatccacagggatgtgaagtcaaagaatatcctcctagacaaagactacgaggctcatcttgctgacttcggtattgccaagagcttgtgtgtgtcgaagacgcacacatcaacgtacgtgatgggcaccattggctacattgaccctgagtatgcacggacatcccggatcaacgagaaatcggatgtgtacagctacggcattgtcttgctggagctgcttaccggcaaaaagcctgtcgacgacgagtgcaaccttcaccacttgatcctatccaaagccgcagagaacacggtcatggagacggtagaccaggacatcaccgacacgtgcaaggacctcggcgaggtcaagaaggtgttccagctggcgctcctttgcagcaagaggcagccgtcggatcgaccgaccatgcacgaggtcgcgcgcgtcctggacagcctcgtctgcccagcaggcccgcccccgaagcaggcgcaggcgcaggcacaggcacaggcgtcggagaagccgtccaccacggcgccgagctatgtcagcgagtacgtcggcctacgaggcggcggcggcggcagcgccctctcctgcaccaactcgtcgagcgcgtccgacgccgagctcttcatgaagtttggcgaggtgatctcgcggagcacggaatagtccaatagatcgacgatcattttgtgttacagtttacaataggtgtctggccggcgccctgtgatgtgactcgctgtaaatatgctgctgccttctcgttgggactccactaggcactagtagctatttttctccgttatgcacgtctctctctttttttttgctgggaaactcgaactgtaactaaaggaatggatttatgtgcaggctgcgtttactgacatgttttgtgattcagctgggacggttatgctattgctctgctcgatcggagcacactgttcaaggctggctggagatcatctgggcactgttactgttacgttatccttcctgggcttcctactcctggatcatgccactgctgcgctgcactgtcgcatgtattaccgtaccgacaaccgctgctgtaaaaaaacaaaaaaaaaactctcttgcttctcgggtttccctgttgaatccatggggaccgatggcaaggccgtgcccatgcagcgcatggaggcccgtctcatggagtgtcagggatgagtaca

SEQ ID NO: 218260 - DNA, 3551 bp, Zea Mays
cgcggctccggccatggcccgcctcctccgggccctcgctgccctcctcgtcctcctcctcgcggccgcctccgtcgccgtcgccgacgacggagaaacactgctggagatcaagaaatccttccgcgacggcggcaacgcgctgtacgattggtccggcgacggcgcgtcgccgggctactgctcgtggcgcggcgtgctatgcgacaacgtcaccttcgctgtcgcggcgctcaacctctctgggctcaatctcgagggtgaaatctcagcggccatcgggagtctgcaacgtcttgtctcaatcgatttgaagtcgaatggactctctggacagatccccgatgagattggtgattgttctttgctcgaaactttggatttgtcatctaacaatctagaaggagacataccattctccatgtccaagctgaagcaccttgagaacttgattttgaagaacaacaaactggtgggagtgatcccatcgacactctctcaacttccaaatttgaagatattggacttggctcaaaacaagttaagtggtgaaattccgaatctaatatattggaatgaggttcttcaatacttgggattgcgaagcaatagtttagaaggaagcctctctcccgatatgtgccagttaactgtgatgtgaagaacaatagcttgacgggtgcaataccagaaaccatagggaactgtacgagctttcaggtcttagatttgtcaaacaatcatcttactggagaaatcccgttcaatattggtttcctgcaagtggctacgttatctttgcaagggaacaagttctctggtcctataccatcagtgattggccttatgcaggcgcttgcagtgctagatctgagtttcaatgagctatctggcccaataccctctatactgggcaacttgacatacactgagaaattatacctgcaaggcaataggttaactggattgataccgccagagcttggtaatatgtcgacactgcattacctggaactgaacgacaatctgttgactgggttcattcctcctgatcttggaaaacttacagaattgtttgaattgaaccttgcaaacaacaaccttataggacctatccctgagaatttaagttcatgtgcaaatctcattagtttcaatgcttatggcaataaattgaatggaaccattccacgttcatttcacaagcttgagagtctgacttatctgaatctgtcatcaaatcatctcagtggagcacttccaattgaggttgcaagaatgagaaatttggacactctggacttatcctgtaacatgatcactggttcaattccctcggctattgggaaactagagcatcttttgaggctcaacttaagcaaaaataatgtggctggacacattcctgctgaatttgggaacttaaggagcatcatggagattgatttgtcttacaaccacctcagtggcctgattcctcaagaggttgggatgctacaaaatttgatactgttaaaattagaaagcaataatattactggagatgtctcttcacttatttactgcttgagtctcaatatcttaaatgtatcatacaaccatctttatggtactgtacctacagacaacaacttctcacgattttcacccgacagcttcttgggtaaccctggactttgtggctattggcttcactctgcttcatgcacacaattatccaatgcagagcaaatgaagagatcctctagcgcaaaggcctcaatgtttgcagctattggtgttggtgccgtattgcttgttattatgctcgttatcctagtagttatttgctggccacataactctccagtgctcaaagatgtctctgtaaacaaaccagataaccttgcttcagcatcaaacaacattcatcccaagcttgtgatcctccacatgaacatggccctctatgtatatgatgatataatgaggatgactgaaaacttgagcgaaaaatacattattggttatggagcctcaagtacagtctacagatgcgacctgaagaactgcaagccaattgcgattaaaaagctgtatgctcactaccctcagagcttgaaggaattcgagactgaacttgagactgttggaagcatcaaacaccggaatcttgtaagccttcaggggtactccctgtcaccatctgggaatctcctcttctatgattacatggaaaatggcagcctctgggacattttacatgcagcttcatcgaagaaaaagaaactcgattgggaggctcgcctcaagattgctctcggagctgctcaaggcctggcttatcttcaccatgaatgcagtccacgaataatccacagggatgtgaagtcaaagaatatcctcctagacaaagactacgaggctcatcttgctgacttcggtattgccaagagcttgtgtgtgtcgaagacgcacacatcaacgtacgtgatgggcaccattggctacattgaccctgagtatgcacggacatcccggatcaacgagaaatcggatgtgtacagctacggcattgtcttgctggagctgcttaccggcaaaaagcctgtcgacgacgagtgcaaccttcaccacttgatcctatccaaagccgcagagaacacggtcatggagacggtagaccaggacatcaccgacacgtgcaaggacctcggcgaggtcaagaaggtgttccagctggcgctcctttgcagcaagaggcagccgtcggatcgaccgaccatgcacgaggtcgcgcgcgtcctggacagcctcgtctgcccagcaggcccgcccccgaagcaggcgcaggcgcaggcacaggcacaggcgtcggagaagccgtccaccacggcgccgagctatgtcagcgagtacgtcggcctacgaggcggcggcggcggcagcgccctctcctgcaccaactcgtcgagcgcgtccgacgccgagctcttcatgaagtttggcgaggtgatctcgcggagcacggaatagtccaatagatcgacgatcattttgtgttacagtttacaataggtgtctggccggcgccctgtgatgtgactcgctgtaaatatgctgctgccttctcgttgggactccactaggcactagtagctatttttctccgttatgcacgtctctctctttttttttgctgggaaactcgaactgtaactaaaggaatggatttatgtgcaggctgcgtttactgacatgttttgtgattcagctgggacggttatgctattgctctgctcgatcggagcacactgttcaaggctggctggagatcatctgggcactgttactgttacgttatccttcctgggcttcctactcctggatcatgccactgctgcgctgcactgtcgcatgtattaccgtaccgacaaccgctgctgtaaaaaaacaaaaaaaaaactctcttgcttctcgggtttccctgttgaatccatggggaccgatggcaaggccgtgcccatgcagcgcatggaggcccgtctcatggagtgtcagggatgagtaca

SEQ ID NO: 218261 - DNA, 3713 bp, Zea Mays
catctggtgttcatgcgctttgcattgtgtaaaaatgcgtttttactgccatttcgtgtgcttggacgctcttctctttctgttctggccgtaaaacctggtgtttgttttctttgtatgttaatttgttattccgcttacattcattttttccttgcgtaacgaactccgttattttttccgtaactttcttatcgattcttcttcttctgtggtgctgccactgcttttactaatccaggagaaacactgctggagatcaagaaatccttccgcgacggcggcaacgcgctgtacgattggtccggcgacggcgcgtcgccgggctactgctcgtggcgcggcgtgctatgcgacaacgtcaccttcgctgtcgcggcgctcaacctctctgggctcaatctcgagggtgaaatctcagcggccatcgggagtctgcaacgtcttgtctcaatcgatttgaagtcgaatggactctctggacagatccccgatgagattggtgattgttctttgctcgaaactttggatttgtcatctaacaatctagaaggagacataccattctccatgtccaagctgaagcaccttgagaacttgattttgaagaacaacaaactggtgggagtgatcccatcgacactctctcaacttccaaatttgaagatattggacttggctcaaaacaagttaagtggtgaaattccgaatctaatatattggaatgaggttcttcaatacttgggattgcgaagcaatagtttagaaggaagcctctctcccgatatgtgccagttaactggtctgtggtactttgatgtgaagaacaatagcttgacgggtgcaataccagaaaccatagggaactgtacgagctttcaggtcttagatttgtcaaacaatcatcttactggagaaatcccgttcaatattggtttcctgcaagtggctacgttatctttgcaagggaacaagttctctggtcctataccatcagtgattggccttatgcaggcgcttgcagtgctagatctgagtttcaatgagctatctggcccaataccctctatactgggcaacttgacatacactgagaaattatacctgcaaggcaataggttaactggattgataccgccagagcttggtaatatgtcgacactgcattacctggaactgaacgacaatctgttgactgggttcattcctcctgatcttggaaaacttacagaattgtttgaattgaaccttgcaaacaacaaccttataggacctatccctgagaatttaagttcatgtgcaaatctcattagtttcaatgcttatggcaataaattgaatggaaccattccacgttcatttcacaagcttgagagtctgacttatctgaatctgtcatcaaatcatctcagtggagcacttccaattgaggttgcaagaatgagaaatttggacactctggacttatcctgtaacatgatcactggttcaattccctcggctattgggaaactagagcatcttttgaggctcaacttaagcaaaaataatgtggctggacacattcctgctgaatttgggaacttaaggagcatcatggagattgatttgtcttacaaccacctcagtggcctgattcctcaagaggttgggatgctacaaaatttgatactgttaaaattagaaagcaataatattactggagatgtctcttcacttatttactgcttgagtctcaatatcttaaatgtatcatacaaccatctttatggtactgtacctacagacaacaacttctcacgattttcacccgacagcttcttgggtaaccctggactttgtggctattggcttcactctgcttcatgcacacaattatccaatgcagagcaaatgaagagatcctctagcgcaaaggcctcaatgtttgcagctattggtgttggtgccgtattgcttgttattatgctcgttatcctagtagttatttgctggccacataactctccagtgctcaaagatgtctctgtaaacaaaccagataaccttgcttcagcatcaaacaacattcatcccaagcttgtgatcctccacatgaacatggccctctatgtatatgatgatataatgaggatgactgaaaacttgagcgaaaaatacattattggttatggagcctcaagtacagtctacagatgcgacctgaagaactgcaagccaattgcgattaaaaagctgtatgctcactaccctcagagcttgaaggaattcgagactgaacttgagactgttggaagcatcaaacaccggaatcttgtaagccttcaggggtactccctgtcaccatctgggaatctcctcttctatgattacatggaaaatggcagcctctgggacattttacatgcagcttcatcgaagaaaaagaaactcgattgggaggctcgcctcaagattgctctcggagctgctcaaggcctggcttatcttcaccatgaatgcagtccacgaataatccacagggatgtgaagtcaaagaatatcctcctagacaaagactacgaggctcatcttgctgacttcggtattgccaagagcttgtgtgtgtcgaagacgcacacatcaacgtacgtgatgggcaccattggctacattgaccctgagtatgcacggacatcccggatcaacgagaaatcggatgtgtacagctacggcattgtcttgctggagctgcttaccggcaaaaagcctgtcgacgacgagtgcaaccttcaccacttgatcctatccaaagccgcagagaacacggtcatggagacggtagaccaggacatcaccgacacgtgcaaggacctcggcgaggtcaagaaggtgttccagctggcgctcctttgcagcaagaggcagccgtcggatcgaccgaccatgcacgaggtcgcgcgcgtcctggacagcctcgtctgcccagcaggcccgcccccgaagcaggcgcaggcgcaggcacaggcacaggcgtcggagaagccgtccaccacggcgccgagctatgtcagcgagtacgtcggcctacgaggcggcggcggcggcagcgccctctcctgcaccaactcgtcgagcgcgtccgacgccgagctcttcatgaagtttggcgaggtgatctcgcggagcacggaatagtccaatagatcgacgatcattttgtgttacagtttacaataggtgtctggccggcgccctgtgatgtgactcgctgtaaatatgctgctgccttctcgttgggactccactaggcactagtagctatttttctccgttatgcacgtctctctctttttttttgctgggaaactcgaactgtaactaaaggaatggatttatgtgcaggctgcgtttactgacatgttttgtgattcagctgggacggttatgctattgctctgctcgatcggagcacactgttcaaggctggctggagatcatctgggcactgttactgttacgttatccttcctgggcttcctactcctggatcatgccactgctgcgctgcactgtcgcatgtattaccgtaccgacaaccgctgctgtaaaaaaacaaaaaaaaaactctcttgcttctcgggtttccctgttgaatccatggggaccgatggcaaggccgtgcccatgcagcgcatggaggcccgtctcatggagtgtcagggatgagtaca

SEQ ID NO: 218262 - DNA, 820 bp, Zea Mays
aaagaaagatttttacagatatttttaataatgacctcggtggaccctatgcatttcttgagttcaacagcttgataagtgggttcaatatcgtgcctatgtctcctatgtttaatgtcatggcatgggcacagccaagagtggctagcccacacggagcgaaccacacgggaaaagttgatgggaagaaacaaaaaagtcaagaaaaggcagttcctgcagcttcaaaatcaagtccggcttccaagaagagcaaggatgacgatgattctgatgaggacgagactgatgattctaacgaggacgagacagacgattctgatgagggtgagggtttgtctcctgaagaaggcgatgatgatgattcaagtgatgaagatgataccagtgacgatgaggaggaagacacttcaactcctaagaagcatgaggcaggcaagaagagagctgctgaaagttccgtgctgaaaactcctctatctgataagaaagcaaaagttgccacaccgtcagctcaaaagacaggtgtgccattgaacggactaacaaaactgtcgtcgaagattgtataggtgtgactctgttcaaggatagtcttgaggttctagaacagaagagtagtggtgtgcatcagtgtatctgtttaccggataatagtggttggttaggtgtgtgcagaaaaagtttagtgttatggtttttcaagttgcgttttctacatggccatggggaccatctaccgacattttctttttttgatttggtgaaaaaggaaaggatgtgcacctttgcaagcgggcatggagatgagctgcgctaa

SEQ ID NO: 218263 - DNA, 2426 bp, Zea Mays
gcagttaacacttaatgatatatcaaacaccttaatttaattagaaatggattacacgttcagtagtgaacaacgcgtgcgtttggggtggggagccgaagccgcttctagcggccacaatcggtataaaggcgaaacaaacgcagccgaagttgttcctcccgcaagctcccatccgcccgctaccccacgctctgcgcctctgcctagggttacgagcgacgctgcgccgtcggctggtgcattgacgagcgacgccgcgcggggttacgagcgacgccgtcggctggtgcgttactctcgtgtgcacagcaatggcgaatctccagagaggagaggaacccaagtgtacaagtgaaagaaatcaaaggattaaggtttaaggatgtcatcagaaactgcagctgcaccttctgaaactgaagcagctagagtgaatctcctaaaaagaaattcagatgatgttggatgggaatatggtgttcttgttgatgctaacaacaaagacaaggtgaagtgtaagttctgtgacaaggagatgaggggagggatttataggttgaaggagcatcttgcccatgttggaaagaatgtgaagaaatgcacgtctgcaacaccgcaggctctagaggctaaagagaagtgcaagaaagcaatagaggctgcaaaaaggaagagggaggagaagactgttcgtgagctagaacttagagaggaagtgaatgtatctagggttggagaggagtcagaagaagtcacttgtgttagaagctcacagcctcacaaattagggccaattgacaaatggacacgtgctattgatcctaccaaggctgattcattcaaacaacagcagctgaacaaggaattatggaaagaaagagagcatgaggtgcacaagtttattgcaagatgggcctataatcatggaatacctttcaatgcatgtgacaatgatgagttcaagcaaatgtgtgaagcaattggacaatttggaccaggacttacacctccaactcaagatgcctttcgaggtagtttgctggaagaagaatatgaaagaaccaagtgtttgttgcaggaacgtgaagccgagaagatgaaaaatgggtttgatgcaagtaccacgtgtttgatgcaagtagtcactgacaatgcctctaacaacatgggagcaaagaagctattgcttgagaagagaccacaaatattttggacctcttgtgcagctcacacaatcaacttgatgctccaaggaattggcaaattgcctcggttcaggaaagtgattgaccaagccttttggaaggatgtgaagctaatgttggctgtttttgagccattggtcaaagtcctccgtttggttgatggggatgtgaagccatccatgggtttcctttatggagagctactaaaggcaaaaagagagatcaaagaggcctttggcaatgttgagtttcgattcaaagatgttatggctgtaactgagaagaagatgaatggaagacttgattctccattgcatttgacagcttttttgctgaatccacactatagctatgctaacccatcaatatttgatgagcccaaaatgaatgaagccttcatatcttgtgtcgagcaattttattatcatgatgaggaccaacaagaacaggctgccaactttgaattgaaaaaatttcagaatagagaaggaccatttagcaagaagcttgcaagaacttttcaaaactatgattacaatccagcatcatggtggcagttatatggaactgaaacatcagctttacaaaagatggctacaaggatattatctttgacatcaagctcttctggttgtgaaagaaattggagtgggtttgaagggatacacactaagaagagaaataggctgactacaacccgcctcaacaagttggtctatattcagttcaataacaggctgatgaataacagagaaaagattaagtcaaagaaaatcactgatgttctcttgtctagtgatacaactgaagctcaaggttttctccaagagggtggagatgattgtgcacaagttgtctttagagatgaggaagatgagatggaaggtacagggataccttggtctgttattggagaggcagtgggagcagaagaacagcttgagccttgtagaagtgcaagagtgagagagctctatgaaggagaagagtttgagtctgaagaagaagagtatgaagatgaagatttgtgctatagtgaagatgaaatatgatctggaccatctccatctagtagtgaagccttttgtgatgccctggtcttatgaactgcagctgtgtcactttgtgtctgtgtgtcttcttttgtgtgagacctgaactaagaactatgtgcttgtgttgtcctttatttataaattgtgttctgcacttgtatta

SEQ ID NO: 218264 - DNA, 1692 bp, Zea Mays
gcagttaacacttaatgatatatcaaacaccttaatttaattagaaatggattacacgttcagtagtgaacaacgcgtgcgtttggggtggggagccgaagccgcttctagcggccacaatcggtataaaggcgaaacaaacgcagccgaagttgttcctcccgcaagctcccatccgcccgctaccccacgctctgcgcctctgcctagggttacgagcgacgctgcgccgtcggctggtgcattgacgagcgacgccgcgcggggttacgagcgacgccgtcggctggtgcgttactctcgtgtgcacagcaatggcgaatctccagagaggagaggaacccaaggaacgtgaagccgagaagatgaaaaatgggtttgatgcaagtaccacgtgtttgatgcaagtagtcactgacaatgcctctaacaacatgggagcaaagaagctattgcttgagaagagaccacaaatattttggacctcttgtgcagctcacacaatcaacttgatgctccaaggaattggcaaattgcctcggttcaggaaagtgattgaccaagccttttggaaggatgtgaagctaatgttggctgtttttgagccattggtcaaagtcctccgtttggttgatggggatgtgaagccatccatgggtttcctttatggagagctactaaaggcaaaaagagagatcaaagaggcctttggcaatgttgagtttcgattcaaagatgttatggctgtaactgagaagaagatgaatggaagacttgattctccattgcatttgacagcttttttgctgaatccacactatagctatgctaacccatcaatatttgatgagcccaaaatgaatgaagccttcatatcttgtgtcgagcaattttattatcatgatgaggaccaacaagaacaggctgccaactttgaattgaaaaaatttcagaatagagaaggaccatttagcaagaagcttgcaagaacttttcaaaactatgattacaatccagcatcatggtggcagttatatggaactgaaacatcagctttacaaaagatggctacaaggatattatctttgacatcaagctcttctggttgtgaaagaaattggagtgggtttgaagggatacacactaagaagagaaataggctgactacaacccgcctcaacaagttggtctatattcagttcaataacaggctgatgaataacagagaaaagattaagtcaaagaaaatcactgatgttctcttgtctagtgatacaactgaagctcaaggttttctccaagagggtggagatgattgtgcacaagttgtctttagagatgaggaagatgagatggaaggtacagggataccttggtctgttattggagaggcagtgggagcagaagaacagcttgagccttgtagaagtgcaagagtgagagagctctatgaaggagaagagtttgagtctgaagaagaagagtatgaagatgaagatttgtgctatagtgaagatgaaatatgatctggaccatctccatctagtagtgaagccttttgtgatgccctggtcttatgaactgcagctgtgtcactttgtgtctgtgtgtcttcttttgtgtgagacctgaactaagaactatgtgcttgtgttgtcctttatttataaattgtgttctgcacttgtatta

SEQ ID NO: 218265 - DNA, 1022 bp, Zea Mays
gcagttaacacttaatgatatatcaaacaccttaatttaattagaaatggattacacgttcagtagtgaacaacgcgtgcgtttggggtggggagccgaagccgcttctagcggccacaatcggtataaaggcgaaacaaacgcagccgaagttgttcctcccgcaagctcccatccgcccgctaccccacgctctgcgcctctgcctagggttacgagcgacgctgcgccgtcggctggtgcattgacgagcgacgccgcgcggggttacgagcgacgccgtcggctggtgcgttactctcgtgtgcacagcaatggcgaatctccagagaggagaggaacccaagcatcatggtggcagttatatggaactgaaacatcagctttacaaaagatggctacaaggatattatctttgacatcaagctcttctggttgtgaaagaaattggagtgggtttgaagggatacacactaagaagagaaataggctgactacaacccgcctcaacaagttggtctatattcagttcaataacaggctgatgaataacagagaaaagattaagtcaaagaaaatcactgatgttctcttgtctagtgatacaactgaagctcaaggttttctccaagagggtggagatgattgtgcacaagttgtctttagagatgaggaagatgagatggaaggtacagggataccttggtctgttattggagaggcagtgggagcagaagaacagcttgagccttgtagaagtgcaagagtgagagagctctatgaaggagaagagtttgagtctgaagaagaagagtatgaagatgaagatttgtgctatagtgaagatgaaatatgatctggaccatctccatctagtagtgaagccttttgtgatgccctggtcttatgaactgcagctgtgtcactttgtgtctgtgtgtcttcttttgtgtgagacctgaactaagaactatgtgcttgtgttgtcctttatttataaattgtgttctgcacttgtatta

SEQ ID NO: 218266 - DNA, 1086 bp, Zea Mays
gcagttaacacttaatgatatatcaaacaccttaatttaattagaaatggattacacgttcagtagtgaacaacgcgtgcgtttggggtggggagccgaagccgcttctagcggccacaatcggtataaaggcgaaacaaacgcagccgaagttgttcctcccgcaagctcccatccgcccgctaccccacgctctgcgcctctgcctagggttacgagcgacgctgcgccgtcggctggtgcattgacgagcgacgccgcgcggggttacgagcgacgccgtcggctggtgcgttactctcgtgtgcacagcaatggcgaatctccagagaggagaggaacccaagaatagagaaggaccatttagcaagaagcttgcaagaacttttcaaaactatgattacaatccagcatcatggtggcagttatatggaactgaaacatcagctttacaaaagatggctacaaggatattatctttgacatcaagctcttctggttgtgaaagaaattggagtgggtttgaagggatacacactaagaagagaaataggctgactacaacccgcctcaacaagttggtctatattcagttcaataacaggctgatgaataacagagaaaagattaagtcaaagaaaatcactgatgttctcttgtctagtgatacaactgaagctcaaggttttctccaagagggtggagatgattgtgcacaagttgtctttagagatgaggaagatgagatggaaggtacagggataccttggtctgttattggagaggcagtgggagcagaagaacagcttgagccttgtagaagtgcaagagtgagagagctctatgaaggagaagagtttgagtctgaagaagaagagtatgaagatgaagatttgtgctatagtgaagatgaaatatgatctggaccatctccatctagtagtgaagccttttgtgatgccctggtcttatgaactgcagctgtgtcactttgtgtctgtgtgtcttcttttgtgtgagacctgaactaagaactatgtgcttgtgttgtcctttatttataaattgtgttctgcacttgtatta

SEQ ID NO: 218267 - DNA, 2179 bp, Zea Mays
gtcatttttatgaattttcatgtaagccgtaagcacaaatgcatggtatatcctgggcttctggataccagcagtgagtaggaaaagaacaagatggcttgtgtgcagcacataggcatcagaattgctgatgatcgcatcagcagcgacgcatgaaacagagctcaaacgacgactccaaaaccgagctagtgtggccctgcggacagatctgagcctgggagcgtctcgtattcgtagtttacgccactgccgcgagtcaacagcactctctcggcgttcccttgctgccttgtttcttgcgatggcgtgctacaaagtacaagaacgttgctctcgccctccttgtcgtgtggaacgacggccaaacaatgcagctattggcgcgtccgccgccgcacccgcacgcatttatatgagccgccgtggcgcctggacgattgccgtgtcatgtcccagctccctaatcgttgtgttgacgacgcccgcaggtgacagccgatatcgggattcgacgtcactaagctcgtcggtgggccagccgtcgcggagtgtgcgccgctagctgttggtacatacgtcgtagccgcatggcgtgcaccgtctcctgctcgcgcgtcttcgtcgtcaggtgctcggcgtccccctcgggtggcggtggcggcggcaatgccgtgagggtgaacggcgcggcacaccgcgcgccgctgcaggtcggggcggcgctggagacgtccatcaacaggtcgctggcggagctgagtccgccgctgctgccgctgctgcccacggacgacgccggcgaggagcgcagccggcagaacatcccgacggagaagcagaccgtggacccgttccggcaggcgctgatcgtggagggcggcgtgcggtaccagcagactctggtggtgcggtcgtacgaggtcggccccgacaagacggccactctggagacggtgctcaacctcctccaggagaccgcgctgaaccacgtctggatgtcagggctgctcggcgacggcttcggcgccacgcacggcatgatcaggaacaacctcatctgggttgtctccaggatgcacgtccaagtcgaccagtacccgatctggggagaggtgctggacatcgatacctgggtgggctcgtcggggaagaacggcatgcggcgggactggctcatccgtggccgcaactccggcgacgtcttcgtccgcgcaacaagcacgtgggtgatgatgaacaaggtgacgaggaggctgtccaagatgccggaggaggtccgggccgagatcgcgccgtggttcatcgaccgccatgccatctaccaggaggaagccacggacaagatcatcaagctcgacagcaacgccatgtacgtcgactccgaccttaagcccaagcgaagtgatctggatatgaaccaccacgtcaacaatgtcaaatacgtgaggtggatgcttgagactcttcctgatcacttccagcagcagaaccagctcagcagcatcatcctggagtacaggaaagagtgtgggagctcagatgtcgtgcagtccatctgtcaacctgatgacgactcgattccaccgcaagaagatgtcagtatggccatcgggccttcgctctcgccggaactcatcagtggccaccacagcttggcaggtgcgctccagcacagcccgatgaagtacacgcaccttctgcagctgaaagcaggcgacaagtacgaggagattgtgcgagggagaactacgtggaagaaaaaatcatataaagccccctgacgtgtctctttgaaatgtgctttgctatactattaaaaaaagaaggaaaaggttggattccactactatttcgtagttaggccctgcccggtttcgtttataatccacctatggatgaaaataaacgagaatcccaccaaacgtctaaattattttcgtttcttcacagaatcaacagttcaactgttgaactaataaacgagaatcgaataatgaacacaaattccagcacgagtagctgagtgcgggctcccaagctagtccccatcaagtccagctccagcatcagctattcgttgccaaattgatatgtctcatataatgaagactaaatgcaaggatcaactaaccggccttctcttgagaggcatttagacgactcttgatccatgact

SEQ ID NO: 218268 - DNA, 701 bp, Zea Mays
cacggcttctctttttgttcatcatgctgattcttcgtaatgagaatgaagacaaagagattgaaagattttctgataggaaacgtaagacacaaagcaaacgtgaaggtcttgcgtcatatctcaaactagctccttcaaatttcccttctgaactggtgcaaggatctagaagagggcaagcaaccaacaagaaactccggtgggataaggagtcagatgagcaggcatttgaagcatttgagaagcttgaacaaaagcacaaggatggaagcaaggtggagaaggaaggtgatgacgaggatgagcaagaagaggaagtacaagaggaggaggaaaattcagacgatgactataatcaaaatatcgagtttgatgacgatgatgatgactggaaccaagaggatgaagcacaggaagacttctacgattaattatggatgagcatattttttctccttttttcctctccttttcacttgtgacttcacccagcaaaattattagagagcaatctttattctggtatttctagtcacgatggtcacgtgctttgttagaaactcaggaatatcagaacagtgaaagacgacgttgctaacttgcattactacgcatgacttcagacagccactaatatggagtgtgcttcctcgtcaaaacagagtgcacatcttgtcttttaaataattaaccaattt

SEQ ID NO: 218269 - DNA, 2345 bp, Zea Mays
aagcaccccctccggagtacaaggacgggagaggggcacggagcgatggaccagacggtgtcggcactgcacaagcggattgagacgctgtcgctgcaggcgagcgctctgcgggacgccttgcagcggagcgaggagaacacggacagcgcggtcgccgcccctcgactcgttcgaccaccacatctccgcgatcgaggcctccatccgtcccgcccaggttcggccactctccgcgttcccgtccggcgaggagggagaggtgacccgtactccgattcggccgtgtcgcaggtgagggcgcaggccatcacgatggcgaacgagaacatcgacaggaccatcgagaccgccgaggccatcctcgcgcagttcgagatcatccgccggactgaagctgtgatagtgaggggtccacgtgcggatctgaagagcttcctggaagctatggctctgctgaaaggcgtcatccacttcttttcctcaaataagaagtttaagagttgtgaaggagtactgaatcaagttaacaacctcttaaccaagtcaaagctgaagattgaggaggaattcaggcagttaatgagcacttacagcaaagctagtgagcccacacatctatttgattgctttccaaacccgctattggcatcagaagggaactctagagcagttggagagcaactatccaaaagctttgaaagtgctacatacaggactccaacactaattcccccaagaatattaccacttctgcatgatatagctcatcagttggttcaggatggaaatcaacagctgtgctatagaatatacagagatgctcgcagctcagcattagaactgagtcttcaaaaactgggcatagaaaagctaactaaacgtagcatgcagccgtggctggcctcaggaacctggaatcagattatgcacgttacagttaaagtattactagctggagaaagaaaaatttgtaatcagattttcgatggtatcactttcaacaaggatcaatgttttgctgaagtgacaggaagcagtgttatgactcttctcagctttggtgatgttattgctaaaagtaaaagatctcatgaaaatttgtttgtactgctggagatgtatggattaatgcatggacttaggtcagaggttgaagtgacatttcaaggaaagttttgctctgggatgcgggaggctgcattaagcctgactaagagcttggcgcaagctgtacaagaaactctggttgattttgaggtggcagttgaaaagaataattcaaagactaccgtacagaatggaaatcttcatccttttacaatcgaagtgattaattatgtaaaaggcctatttgattaccaatcaacactgaaaatactatttcagcaatctgaaagtgacagtgagactgaatctgaacttgcaactgtaatcatgaaggttatgcaggcctttcagaataacttgaatgggaaagctaagcagtacaaggatcctgcattgtatcacatatttcttatgaacaaccttcactatatggttacgtctgttagcaaatcagaatccaaagatatactcggtggtgactggattcagagacaccgtaagattgtgcagcaaaacgctaatcagtacaagagggtagcatgggcaaagattttccagacactctccatccaagtttcaggtggcaatagttcgtcatcaccatgtgatgttagcaaaactggagtttcaaggactatgatcaaagaacggtctgtacaatggttcaagtccttcaatatacaatttgaagagcttcattcaaagcagtctcaatggactatacctgatcaggaattgcgagatgaactgaggcttgccgtggctgaaattctcttgccagcatatatgtcttcgttagccgttttgggaatcttgttcaacgttcgaagaaccctcacaagtacatcaaatacacacaagaagaattggatcaattgttgggtcagttcttccaaggacactaagctggtgaacagaagcagttaacacagagcagtatagggagggaaaagccttgtctaggtaaagttttgtaccacagcttatgtcaaatgtttctacagaagaactacctacccttttgtttgcacgcccgtaaaatggcactgaactactgatgtagcctaactatggctcctccacaacacctgtatcgcgaaggactcacgttcttttactacttggctgaggctgagtactgttccatgctaacgtttgagaagacattggcatatatgcaacctcatgagtcaggatcctgttcccgatatcaatttgtggagttaataattttc

SEQ ID NO: 218270 - DNA, 1699 bp, Zea Mays
gaaggcgacgcagtggccgtacagtagtgtcacctgcacattgcagaccgcctcagcgcctcaccaagcgaaactcgttggcggctagggttttgctgcctcccgagcccaaaccctagagcacccgcgcccatcccatggcgtgctaggcttcgattgagactggggggattagtaccgcaggctgggattagagcaagcgccgagcggaaatggcatcgagtaaccaattcgatctacttggagacgtcgagaacgacgaccctgcccacctcctcgcagctgccgagaagaaggcggccgcggtgcctaagcccgcgcccgcgccggccaagttgcccaccaagcctccgccgcccgcgcaacctgggacactgtggatgctgttaatcctgaggagactactgccgtggtggaggatgagaagaaacctgaagatgcaccacagtctgaggttgagaaggacaaggagggcgcggagaatgaagaagaagaaaaggaacctgaggataaggagatgactttggaggaatatgaaaaggtactggaggaaaaacgaaaagctttactctcccttaaggctgaggagagaaaagttgaaattgacaaggagctacaggccatgcaacaactgtcagttaaaaaggatggcgatgaagtgtttatcaagctgggctctgacaaggacttgaaaaagaaagaaagtgctgaaagagaagaacggggcaagaagtccctgagcatcaacgagttcttgaagccagctgaaggcgaaaggtactataaccctagtggccgtggccgtggtaggggccgtggggggttccgtggtggttacaacggcggttatcggggaccagctgctgctccagcgatcgaagaccaggctcagttccctgccctggcctaagcacagctcgtgttctcgctcaagattgtgtcacttttgcggagtgcgtcagtcagtcctagtgttgttgctcccaagcttgctttccggattatgtgtatccaacattttctgatattatgtactggtgtgctcgtgattgcatggttttgctaagctcagctgaggggtgtcgtgttctgtttgcctggctgatggctgttgacagacttgtcacacatccttcgagcctgaccggtctccagatttatttacttttttcctcggatcagtcatgggaggaaatagtacaccattctttgcattagccattgagttgattacatcgttattttgtcagccatgtgcatatctagaggctaacatgttctttgatgtcgtcgagacggcggtccatgatctccgagacagcctgcaagaagacagtctcgcatcctcctccccgttccgccgcctcacggacgatctcttcgatggcggactccttggtcagggtctctctgcacatgatgctcccgatgtggaaggcggtgaggcccctctccacacccttcttcagcagcatggtggcgacgcgcagcgtgcgcgcgcactcgcgcgacacctcccacccgtggagcctcagcatagtcacgtcctcctccgcgtccagggaccgcacgtactccaccgtctcgtcgctgaagggctcccggcactgaggccagtagagccactcgaaagtgcagtcctcgaactgcatgccaggtcactccaagatgaagagaagtgggaacaaaaaatgaaaaa

SEQ ID NO: 218271 - DNA, 4914 bp, Zea Mays
gtggctatgtgcagattctgacgttgtcacagtactaacacagaggatcagaactaagcacagcagatcagatctgcgatccaagtatcgcagccggtgtaccaatggacttaaattacaggtgttgcagtgtccggcctctccgggagcaaagaggaggcgcagagccaggtgctgatcgggatggggctgctcgccggttccaccgtcttcctcctcaccctgctctggggaacctgtgtggtcgttggcaagtgtgacctcgggccaggccgtgaggcagtagatgtgacagacaccaagggcttcagcttgactggcactggtgttacgaccgacgtgcagaccagctacgcggcacggatcatggggctatctgtcatccccttcatcatcgctcagttccccaagatgttgaagacgcaccacgggcagcgcctcgctatgctgctggcccttgtcgtgtcgttcgcgctcgtgcttgcctactgcctgtaccaggttttccagccctggattcagaggaggaagctcgcgtacgcgaagcacaagcacgtgatctccgggatactgaggcacgcccagatgcagtcgctcggccgcctgctgaacgacgacggcacgcccaatgaacaagtcatcagaaagctgttccgcaagatcgacatggacgagagccggtccctgtcccgcgccgagctccacgccctcatcgtcggcatcaacttcgaggaggtcgacttcgacaggacggacgcggtggacaaggtcatggacgacttcgacacgtcccgcaacgacgtcgtcgaggaggaggagttcgtgcaggggatgaggaagtggctggacgaggccaggcgcagcgtgcccgtgggcggcgccttctccagcaagttcatccacgagtaccacgagaggacgaggcaggagcacgacgagctggtcgacaggtccgacgaggcggtggagagcgtggagaaccccgggtggtgcatagccaaggccgtggcgctgctgctgctgggctccgccgccgccgccgcgttcgccgacccgctcgtggacgccgtccacggcttctccaacgccacgcgcatcccgtccttcttcatctccttcatcgccctcccgctcgccaccaactccagcgaggccgtctccgccatcatcttcgccagcaggaagaagcagaggacctgctccctcaccttctccgaggtgtacggcggcgtgacgatgaacaacacgctgtgcctcggcgtgttcctggcgctcatctacttcaggaacctgacgtgggacttctcgtcggaggtgctcatcatcctgctggtctgcgtcgtcatggccctcttcaccagcttccggaccacgttcccgctctggacctgcctcgtcgcctacatgctctacccgctctcgctgatcatcgtctacatcctcgactatgtcttcggctggtcatagacctgattggctcaagtgaacacctggttttcagacagccgccggtgtttctgtttgacctccttgtaattttaactatatgtccagactttttctcatgtgatgctgtgatcatgttctactttctctaatccctcgtgtatccgaagcacacaacagtgcattcttcagctccacactcccgtgccagactcatttggcacgcctagcggctccggctgcggctctacccgaagccctgccctaccaaaccggcatcctttttaagtcacaaatggcccttaaatcaaagccacaaaaaaataatattatgaattgtaaattggaacagggatccctagatcgtaaatagaagtatagaaccataataaccgcaaaaatcataaaaaacagtggcagattatcattgctctgaaacggcgtagaagacacttttgagtgctatggacagacggtgcccaaagtcgacacgcttccccagaagcagagagctacacagaactaccgaagtacttgtacagaaggactacctgcacctgacgcgaaaaaaagcatgagatccctaagctgtcaataaaacagagttcatgtacaccaacggacgtgtcagcttcgcaaagagcacttcttttgagaatgcccaagaagatggcatcggccacactggacgatccgcttcggccgcttcatgctctcgatctttagaatcttcatcttgggtcggccaggaggcctccggatattgggcgggccaagcaccacatcggccttgctgaccgcaccttgtgaccagggagacgaatcgttccagtggctcctgtccgggataggatatattggctgggagtaggtttctcggtacttcatcacactgaagcagtcatcagcatagaggcgggggtcttcaccgcatgagagcagtgcggcggcggcatgtgcgcatgggatgccgtaaatttgccatcggcggcacgagcagaacctagcttgggtgtccacaatgttggttcgctccgatgacacaatctcaaactccaccttgtttgctcgaaggacttgatagcattgtgagtcatggatggcttcgaggataactttctcagctgacggaacaagaaccgagttgtatgactgtgccaggttctggcgttcagcaaaccagcaagccagttggtgcctgatgtgctcgatggtttgcacgatgggaagttcatggcagtcaagggacaagttatacaatatctcggttatcccaagactaaaatggccatatctgataccctggaagtaagaaaatgcccacaggtttggcggaaaacgctgtaaccatggcataacatcctgaacctgcatcatttcatttacctttgcatcaaattctgatgctgtgagagcatacacagcactccagaaaatgttaagcagtttagtattcttgaactcatcacggaaattctcactcacgtgtctcaagcaaaacccatgaaaagcagtggggaaattagatccgaccgctgcaaccacttgccgttttctctcagaaactatagtcaacaccggcatcttatctgtgttaactccgagcatcttcctcaattccgatataaaccaattccagttatcatcgctctcgcaatcaacaacaccgaatgctagagggaacatcatgtgatcagcatcaatagctgaagcacacagcaatgtcccaagatactttcccttcaagtcagccttgtcaatttctagaaggggcctgcacccatttaagaaaccataaatggatgcacgaaacgagacaaacagccgctggaaggcattccctggtccaatacctctataggttgcaacactaccaggattcgtcttaacaatctgctcacaatatgcaggaagaagtcggtatccatcctcaagagtaccattaactgcagccatgcttctctcctttccacgccatgcctgcatataagaaacagcgaccccatgctgctctcgaatatcctgcagtatctcctttggcttaatctgcgggttatccctgagtcttgcctcgacagacctagcaacccaaccaacagtagcctgctgatgatgcaggttaagaacaccctcacatttgtgctctccgtgcaaagtccggacagtgaaagttggaacgccggggcacttggcgatgtgcacacgccaagggcaaccttcttttgagcattttgcaatgaaacggctacgatcagatttcactacacggagttcatagtgcaaagcaatggccatgtccttgacagccctccgacatgtgtcaacatctgcaaactcttgaccaatgacaagggtccgcgaacctggtataaggttatgctctgactgaaccaaaatctggttgtcttccatcaatgagcagacccactaggtgaagaatatctgtttctctcaaccataaaaaaactttcaaataacttgatagcaacaaatgtgaattatctgtttagctgcagaaatactgacctgcacagcattaacaagagtaaattgtccattaaagcaacaacaaaaatagtttcattccaaacagggaaatggtcttgtggctaccgatcattcgtgcagggtacaaacgttagattagtgtcctgcctattggttactagtttaggccatctgctttgtgttggagtgtagaaactggatctatatactatatagcaatccaatgtcctgtttccagtagtaacatcgtcagtttgctaatcgatttgagggcaaagtttcctgaaatcaaaagttgagacaaaaggcctccctctaggctttgacagaaccacatctccaggagacctaacatgcctagaataagtgtgacttaaaaaattcgtgaaaaggtgacttcaatgtagtttgaagtcctttagtaacctgcattgtatgctggtgaaatctttagctacacctgcagaatggactactcagataccccccagatacatatttacaaaaaaaaaaaaacatcactgactaagtacggttagatttgcaatggtgggcagtggacacaatcagcttcctagtgattgaagccagcacatcgttgctgaaaacacaatggtctccagtaacaatggcttgctcctctcgaaaaacaaaacaaaacaaaaaccaatggtttccttttatctttgctgctgcctcccctttctcaacaataaattacgaaatgtaattatgtgttcagaagctacttcacttattcagcaaccaagtttgttttttaaaataataaacaactatcgaagtgaaaatccataattttggtgcgtgggggtttcagttgaactcgtgttttttggaggatacagagataacagtacccccgaccgcaaacagccaaacccttaacaaaaaattaggaatacaagccgactcccagggaaaaaaatccggtgccctctt

SEQ ID NO: 218272 - DNA, 4430 bp, Zea Mays
catcgatcgacgatatatacccaccctccactgaaatatccattcatttccatacactactaccattctcccaggcaaggcgaggcagggagctttccaggctccgtcgtcccgatgactgcgcagctataacctcgggggcgcggcagcatgcgtcttaacgaaggataaagacctgctaagatggccatggccatggccaggttcctctcgtggttgttcacatgcttcgcagctctcgccgtcctggaggccacggtccctgctcgttcatggcgcgctccgagtcccaccccgaggcacgaagcgaggaggttcgagcagaagacggacaggttctgggagtaccaggagcagagcaatacctgggtacaagtacgcgcgccgttcgacctcatgtcctgcatcaacggcacctgcacaaaggtaggatcgatcgggcggctggcgagggagcctggacgacacggccttcctcccgtccagagccaggaggaggaggaggaagacacgcggcgggttcagggagatggtgcagaagaagaccctgtcctgcctgtaaggaggagaatttccttgacaagaatgtcagagtcgtcagtctgggtgacagggcagagcggctccatctacgagaggttctggaacggggtggtgtgggtgattgctcctcatgagctccctgcctcggctgggtatgccaccgcaactttcattgtcaatacaactatccttgctctgtctgaagctggaaccctctaccagttgcagctaaatgagcatgcccagcctatctggacagagatggcattcaactcaagccagcagtcagcgaatcttggattaaaaacacaaagtcaagctatgcgtataagaaatgggattgtatccaatgatggaaggaaacttttcctgtctatcatgaatggatccctgcttgaggtaacagaaattcagcctctaaggtggaattaccatgggcgtcctccaggtgcagacgtgtcgtatatatctgatgctggaaatctgcggccagggaccctgttcacagtaagttccactggagacctctatgagtttgacaaagaaacaaagccatcatggaaaaagcatatatggagtgaagaactggcgaaaaatatctcattaaaatcatcggctggctttgctttgcatggtttgtcagggtctaactcagtgtctcttttcctgataagcaaggtatgttagaattttttttttatcataatggatccaagataataaagatgtgttacgtttgagagctcacccacaacataatctgctttaaaatgaaaattttctaagccatgctaactcttatattataaattccaggtggactgtttatgaagctaatgtactaaaaatttaaaaaatatctgcatatgtttagttggatatttaataacagaacatttacagtatggtgccacttcagtatgaacattactctcaacaacgaaattgaacattgatcatgattttaagcttcataaactaattatagataagcaaaaggaagaataaaacaacagaaattcaggaacaatattttcctagctaatccctctttttccactgcaagaacaaattttcccgtcttttgtttgttaaaggtggttatagattggcaggatggccttttagtggagcggcgcttgcatagaaggaagtggaagtgggacaaacatggagctcctacgggtcagagacttagttcaattgcagaagttcagaaggatgaacttaatgatgcgacttcaatgtttttaacgacaaccacaggaaaagtatatgagtatcagtttccaaaatatacaggtggggcccagagcaataagataagaggacaatggataaatcacatgtcccctgagcatgcaaaggttgcaagaaacgtcccaggtgtacatgttcaagtcggcagaatggtattcccactagatgatggtaggcttggggaactacattttcctgggatggggggtactgattttggtccgagtgcccaaagtaccataagaagaaaactatcaaacaagtacgagtggtccatcctagacgcaccagaaacagaaggttggaatgcagaatattgcaccgaagagcacggtccgacaaattgtattagtggagcaaagaatatagctgcagacacagaatcaaatgacttgagcaataacccaccttccaggaggcgtaaagtagaagagaagcagcactacctaaatgttaacagataccagcagagtgatgaaactgaatcatacaactttctatcaaggaccattgatcttaacttccacatgcgggtgatgcatgcagacagatcgcttttccttatagcagacaatggattgacttttgaatatctaaacagcaatggtgtttggttgtggttaagacatgaacatgttacagccatgaaaggaacactaggaagctacaatggcagtttgtatcttgtcgacgtgcatgggaacttacacattagagaaagaaatggagatgaactgttgtggattaactgcacagcgatgaagaagggaagacaggttgcaagtgggtctccatgggatggcatccctggtttattgcgcagagtgacaacagatgatgcactcttctttgtcaacaagcgaggcaggctgctacagttcacggttgcgctgcggaaattcaagtggaaggactgccacagtcctcctgacaccaagattgctttcatagtggaccaggaggtcttcagaagaaacatcatcttcgtgggacggccatgcggccatcgccgctgtccctggccggctccctgttcatggtgtccgagcacggggggctggtggagtaccacttcagcccacaggacgggtgggagtgggtagagcacgggacgccccaccggggcgtgaccctcgtcggcgcccctggcccgtgcttcgacggctcccagctgttcgtggtcggctccgacgggcacgtgtaccggcggcacatggaggggaggacgtggaggtggacgagccacgggcacccgccgtcggagccggccgccgttgacgaacagagctgcgccacaccggacacgggcgccggcgcgcactacgccgacgggttcagggggagctgcgacgggaaggtggcagccgtgcggccggtgccgttctcggaggacgccgtggtcttcgagctgcgagatggccggctggcggagctgcggcggccgccctccgcggacgggtgcggcgggtgggagtgggcgcggattatcggcacgccggccagcgcctgtatgaccagctactggacggccgtcgccacgtagccgccgccgggcgcgactcacggagctggcagtccgctggtcgcttggctgattgaggtctccttggaagttggaaatgatccacaacaacagcggtcacgtccatgtttcctcgaaagacggccacgtccacatgggtctaggccgtatgatggccagatttgggcgcccaaagaaaggcagaaaggaactctctcgaaaaaaaaaacggctaaccgttacattacatttgattgtctgtttggtaatgcatttttagaatactatagttttaaagcatatagtactatagtttacaattgtatataacataagtattacaatattattttaccacagtaaaattatagtatttcttaaaattgagatttgtttagttttattgaaaactaaagtatgtatagagagaacaaaagaaatatgtccaaaaataccatacttttaggtagaccatagtatttaaaattgtgttttaactgtaccaactaaacatattttggcttctaataccatagtaatacaatatcatcaaataccgcaatattgcttcaaaaccgcaaaaaaaaactaagcttccaaacagagcctaagtggtgtttggttctccttactaaagttaagtcataagactaattacatagatgaagactaaacgatgatacaaatttattaagcctagttaattcatcattagcaaatgtttaatataatattgcatggacgaaacatggactaattaacgcttaataggtttttcttgtcgtttagtcctgtattgtaattagactatatttaatacttctaactagcatttagacatgtcatacggtagggactaatttaatacttctaactagcttctatatatatttggtcttgttgcttatataagcatcagtgggagtaagtatggtttagttattattgatcaagagaaataaggtttggaagttaatatcacgtcccaaccaaaatattgtaggaaccaagtgggtctttcgcaataagcaagacgaacatgttgtggtgacaaggaacaaaggtcgacttgcggctaaggggtagtcacaagtcgaaggtttgg

SEQ ID NO: 218273 - DNA, 1737 bp, Zea Mays
cagatccaccgatccccctccccctcggatcctccccgcaaatcagatcccgccgggtgctcgccctgcccgcgtcccccgctgcttccctacctcgtcgcctcaagcggctcaagaaatcctccgctcaaaccaccgccaccgctagcaccaccgtcgctaccactactagcagcaggatcttcgaagtggtgccgtggcgctgccctgggtacacgttccaggagtcggggccggtgggcacgacgaacctgagccgcaccgaggtgcgcgcgctcatggcggagctcgccgctgacttcctgggaacgcctcgaccaggacgacgactcggttcgcggacgaagccagccgtagtactcccttctcagatatgcgcgctcgtggtgcaggagcgctcctggcgccccgccgcgacggtggccggggccccctcgctggcgtcccggtcgcgtcaaccacctcaatctcgctggcgtccgcctccgcgatgtcaagaggtggatcttgtttctgcagtgagttgctcatctggagacaatcgagcgtagattgttgaaggcacatctccaatattcctgcacaaaaaaacaatgcgcatcaactaacagaagtgcaacacactctcatctgagtgttcacatctttctttttttttggttgattcgtttaaacctcactatgtacatacaaggcagaatcacagtccctgcatcgttggcttgccaagttttgccctcttttgccacctcctaggtcaactattgctaatgctttcagtccagatggaaaaacacttgcgtccacaagatcattgtatacaaactgaactgaaagacatttattttgttagtggtgaggtgaccatactgtgaaattaattgactgtaatatagggaaatgtttgaaggttttgagtggacatcacagtatacaaactgaactgaaagacatctattttgttagttatcagcctcatcaaactgattgaaagacaccaaactgaactgaaagacaacaaacatgccaggtaactgtatcgcgaaagacaacaaacatcatacttttttcggctctgaggtcttaattttaaaaaatatcgctgaaccttgaaatacatattcaaaccattccttttgcagtggtatgtttctgcagccttttttgctagttggatttagtccagcatctgacactattatagttttcaatccatggatcgatgggttaaatggttattttaagctaaagcttgttttcctttacaagagggatttttatctaaaagaatatctttggagtggctctttgacattctatgaaactatcctttttatttgataccacatgtcaggcgttatattcaaatgtgcataaacaaatatactaattgttttagctgacctagagtttatgtagaagactatgataggctgtatgtatgagttgtttcttgctgtatatggattggtaatgaatagagaaaataggtttgctttgtagtattacaaaaatatatgtatctagggctggaaacgagccgagccgagctcgctcggctcggtgcggcttggtgcctgaacgagctcggctcggctcgcccattccacgagctggcgaaagtggctcggctcggctcgaccttggctcgcgagttggctcgactcggctcgcgagccatattctggtatttatcgttgcattatttgctaaattaacattatataaatttaaaat

SEQ ID NO: 218274 - DNA, 2423 bp, Zea Mays
ttcataaaagcataaagattagtggcccggaacctttgcggctttaccctcctggcctcctgtcctgccctgcctttccccccgcatgctctcgctcgctctctcgttctcgtggttctcccgagtcccgtgccgctcgagtgcgccgtctgcgtctctagtggcgacgactgggcgaccgccgccgccgccctacgcaaggtgcccagctctccattttcggtcccttcgccggacacgagcacccgccaggataatatgttgtccacgcatgaggcaaatgctgatcagtttgatcttctttcttatggtaatctaaggggactagaggctagtagaagttctgaggaatctaattttggaaatgacttaaaggatggttcttcagtttcttctgagaacttcggctcctcttgtctgcctggcgagagctatcaatctgccacagtagatcatgaaaaacgacctctttctgatgtcaagacatgccaaattgcttgcaaacgtccaaagcaaacagatcactgtacctggttatattcctttgaggaacaccctttgaccagtgaagtgggaatatcttctccagctttatatgatggattggttgagatcaaacaaccaaatgacattcctgcaattaatggtgccacaacctgcagtgactgtgggccagttgttacatatagccatgttgatgacattggttcgcctagaaagggtgtgccaattggacctgagcaccaggctgacattccagaatggaggcccctaaactctatgattgtacctggtgcttcagagttttgtgctaatctggattgtagttctgcttccacttcagagtctgttcccagaggtgatgactatgtaagtgacaagtggatcaggtactgtgttgttccggtgacatgctgctcatctcctgttgactgggctggagacagcaaaatagattgcaactgcagtgacgagggttctatgaggtgttccagacagcatattattgaagcaagggataaccttaaaatgatcttgggacaggacaggtttcgtgagttaggtctttgtgaaatgggagaggatgttgctctgagatggactgatgaggaggagaagctattccaaagagttgttttcttaaatcctgtctccttgggcaagaacttttgggaccaccttccggatgcatttcctaataaaactagccaggagtttgttagctactattttaacgttttcatgctcaggaaaagggctcagcagaacaggtctgacgtgttggctgtggacagtgatgatgatgaactgcatggtgaacctctagctgagcgggtggaaggggatcctgcagttgagtcctctacacatgaacattctgtcagcaattctctgcccatggatgatgaccataaagagtttgaaggagcacagtttgatggatctttgtgtgagaagtcagtatacaatgcagtcgagtgcagacatctaccaaatcagatgcctgcagattcaaatacggtgaacactgcactagatgtttgtgaccaagataatggagctcagtgttcagagtttcacatgtcactgccgagcgatacttcaaacagtcttggggatcaaagtgcatctgtataggagatgttgtgtggacaaggctctttggccgtcgagatgtccaaccaagaccatgaacaacaatgaaatggataacacattcagtttggatctgacatctacttcagatgggtgctgttttgccatggcttggagttgtaaattcagcttcatctggagttgatagttcatgaagttgtacattcttcaactactatgtacttttcgcggcattttgttagcacacttggaactcaactgagcttccacggggttttgctgcccccaccccctaccccccatccccattcgagaaatcaaccttgttgtatgtaccatctgttgtattttcatcgctgtatgtccattcgagaaactgaacatgtagattgtaagagttgccactgtctggattacccgcggtggttttcgtttgcagaccgagtgctttcggaatcgattcatgcaaataatgtgctaccgacagactccagttgaatccatttgatgtgatacgtttgtcacgactgcattcttttgttttaaagacagccagtgtaaggaatgtttggagtgtttggtttgaggaatgatgtagtccatcatcttttcactccttactttttttgtttggtttgtggaatggagtgagttaatctatcaccacctcattcctcatagttagttgtttagtactaatatgtagaatggagtcatcccactaaatttgaggaatgaacctatgatgcactactttattttagatagagtgattcatcaaaccaaacaccttagttgtgtttgtg

SEQ ID NO: 218275 - DNA, 2444 bp, Zea Mays
cataaagattagtggcccggaacctttgcggctttaccctcctggcctcctgtcctgccctgcctttccccccgcatgctctcgctcgctctctcgttctcgtggttctcccgagtcccgtgccgctcgagtgcgccgtctgcgtctctagtggcgacgactgggcgaccgccgccgccgccctacgcaaggtgcccagctctccattttcggtcccttcgccggacacgagcacccgccaggggactagaggctagtagaagttctgaggaatctaattttggaaatgacttaaaggatggttcttcagtttcttctgagaacttcggctcctcttgtctgcctggcgagagctatcaatctgccacagtagatcatgaaaaacgacctctttctgatgtcaagacatgccaaattgcttgcaaacgtccaaagcaaacagatcactgtacctggttatattcctttgaggaacaccctttgaccagtgaagtgggaatatcttctccagctttatatgatggattggttgagatcaaacaaccaaatgacattcctgcaattaatggtgccacaacctgcagtggtagttcagtgatcccttgccgtaatcatgatcaatcaattttagtggaaaacttagacatacctgattgggcgacttccttccctggttattttgaagactgtgggccagttgttacatatagccatgttgatgacattggttcgcctagaaagggtgtgccaattggacctgagcaccaggctgacattccagaatggaggcccctaaactctatgattgtacctggtgcttcagagttttgtgctaatctggattgtagttctgcttccacttcagagtctgttcccagaggtgatgactatgtaagtgacaagtggatcaggtactgtgttgttccggtgacatgctgctcatctcctgttgactgggctggagacagcaaaatagattgcaactgcagtgacgagggttctatgaggtgttccagacagcatattattgaagcaagggataaccttaaaatgatcttgggacaggacaggtttcgtgagttaggtctttgtgaaatgggagaggatgttgctctgagatggactgatgaggaggagaagctattccaaagagttgttttcttaaatcctgtctccttgggcaagaacttttgggaccaccttccggatgcatttcctaataaaactagccaggagtttgttagctactattttaacgttttcatgctcaggaaaagggctcagcagaacaggtctgacgtgttggctgtggacagtgatgatgatgaactgcatggtgaacctctagctgagcgggtggaaggggatcctgcagttgagtcctctacacatgaacattctgtcagcaattctctgcccatggatgatgaccataaagagtttgaaggagcacagtttgatggatctttgtgtgagaagtcagtatacaatgcagtcgagtgcagacatctaccaaatcagatgcctgcagattcaaatacggtgaacactgcactagatgtttgtgaccaagataatggagctcagtgttcagagtttcacatgtcactgccgagcgatacttcaaacagtcttggggatcaaagtgcatctgtataggagatgttgtgtggacaaggctctttggccgtcgagatgtccaaccaagaccatgaacaacaatgaaatggataacacattcagtttggatctgacatctacttcagatgggtgctgttttgccatggcttggagttgtaaattcagcttcatctggagttgatagttcatgaagttgtacattcttcaactactatgtacttttcgcggcattttgttagcacacttggaactcaactgagcttccacggggttttgctgcccccaccccctaccccccatccccattcgagaaatcaaccttgttgtatgtaccatctgttgtattttcatcgctgtatgtccattcgagaaactgaacatgtagattgtaagagttgccactgtctggattacccgcggtggttttcgtttgcagaccgagtgctttcggaatcgattcatgcaaataatgtgctaccgacagactccagttgaatccatttgatgtgatacgtttgtcacgactgcattcttttgttttaaagacagccagtgtaaggaatgtttggagtgtttggtttgaggaatgatgtagtccatcatcttttcactccttactttttttgtttggtttgtggaatggagtgagttaatctatcaccacctcattcctcatagttagttgtttagtactaatatgtagaatggagtcatcccactaaatttgaggaatgaacctatgatgcactactttattttagatagagtgattcatcaaaccaaacaccttagttgtgtttgtg

SEQ ID NO: 218276 - DNA, 8323 bp, Zea Mays
cacgcaactcctgctaccaccaccatcgccgctacagcggcgcatgcagcagccggcacgacgatgggggagcgagacgcgctcccgccgctgccgctcgccctcggtccgccgcatctaatcccgccggcgcccacccgcgacccgcgcgccatcgccttcctccctgacctcgtgggcttccactgggtcgcctacgctgccggctccttccttgtcgtatcccacctcccctccccttgccgggacgacaacaacaacgacagttgctccccgttcttccgccaggtcatcgacctccgcgcccccgtgtccgcagttgcttggtgccgccgcgggagcggagaggtcgccgccgctacagacaattctatacacatattccagcctgcgcccgcctcttctccaggttcgtttggatggctcctgagatggtctatcaccgagacgttcgccatcgttgctgtatcctggaccggctgcggcaatggcattgtggcagttggcgcaggtgtttccatgtgggcaagattggagtcctcctggcagctcgcttggaggtctacaccgcaggtgccgcaagcccttgtctccactacctgttccatgcaaggtcctgtcgcgacagtggcagctcttgctccagccgagggcagtgtgcctgttcttgtgtttctgaacgatgccaggagggggctggagcaagctgagcttgtgcatcctcagcctgtttgtatgatccagtggagatcctgttcgttatacccccatgatctgtctgagatcaggagagagatcctcatgacttgctgctttgatgggactgtccggctatggagtaaggatgaggtgtctaggtcgaagaagcagcgtggtttgctaatatcattcagtgtcattgcagtaatagaggtgaacaacactctgaatggagtcctcggagttgatattattgtgagatggtccatggaatctggcagcgttgtgtcaagggacgaacaaggtagattcaagttgttttcaggtgatttgagggagagccaggttggtaaatgtgagtggcttgtaagtcttggccccgggccttgcattagcttttgggctatccattgtttggatgatgtatttccgccaaggtacccacggattactttatggaaacagagcaaacttcagggctggggggattcctatgttaaatcaggtcctctaaaatctatggaacagtcaatttttgttgaggctgtcatctcaagaaggctatgctctggtccacctgcaacatgttttttgcttcatttgctggtggatgattcgtttgcttggtcaaccgtatccaccaaactgttagctgattctgggaaccatgctttaagtgattctgctaaaaatatcttgtgttgtttgactaaacctgtcaaacaagatggacataagggtagcatcagacaagtgtctgtccatccatatagctgcgaaatagagttagctgtctccatggattcaaacagaatgatatttttctggtctctgtcaactttctcaactctcataccgacaatgcatgcacctatgtatcctctatggaagctgttgtgcaaatttgatttgcgtaacatttctgaagatttcgagtactcatgtttgtgttgggcaccttctgttactcgtgataatagatttcttgttcttggatgggaaagtggagtcgattgtttcgtagttagaattcagaaagaagaggttctttcatgccagaagattttcacaatccccttccttgcagaaagcaatacagaagggccacctgacagcattcatacgataccattagcttctaaatgcagcaggtgttttgtgaacaacagtttcctagtagtatgtatatggaagaagaccttcaaaggtttctcatggaaagtagtattgcattcagaaaatcaatatgtcaatgggagatgcttgtgtggttttgctcctagctctctttccaccacaaaccaaggggcacatgcatgcttcagcaatgaaatgttttcagcagtggtttatgaaggttcttcagtctttccttctggcctggagggagaatataccacgtgcatttctgtaatgccgctgaataatactgtactgcctatacaacaacatgacccttacagaactgttccaggctatcatattgctactggttgctctgatggcactgtaaaactttggaagatgacttgtgcagaggactctttgcagactaagaaagaaagacacatctgggagctagtaggcatgtttggtgctcatcaaggaccaattgacatagtttcattgtcaggctgtggtagagttattactgttggcagaaatttgaagaaaaatagcacctccattcatatctgggaagcaacaaaaatcaggggagacgggaattttctgctaggagatacactaatgttgcaagaccatattgttggtttagatggactatccttaggtgatggacgatttctacttgcagtttatctagctaatgagttacgtatatattctcataagcacccgtccttccagaatgtactacacactaagaattcaaaagaagagcatctttggagctgtattgtattatcccattctcatcatgatattgttggctttctttggggaccaaaggcaactgttgtgcttgttcatgagaaccatctttcactcttcagttcatggctagtaactggagataatgagtacatgacccagatacattcttgtcctgtagttcatgagatgttgccatgtactaacaattttaacgaagctacttttggtaaactcaagttaccagaaaatttcaacagtggaaacattgatagcaataatgtcctgctaacagaccaacatagccactattctcatggtttatggagcttgctgcacatagctcatagattgagtggaccgttggcatcatatcacccaagagcacttatccagtatctttattcagctatagtcaaggtggttctaactgcttctaccatttatcatgctattgccctcgagcttcctaaatgggtaatcaaggtcactgataaatggcgcaaaccctttggaaagttcaagagagtgccagtagatggagttggggggtggggtggggggctaggtgaatggaaacgtgcggatgctgctctgcaccatcttgttcggtccatgaaagtgagtgaaacttcaaagggcgtgtcaaattacagtacatgccatagtattccagaacttcctttgtctgaatactttgcggcaacagtgtccaacaacatttctaccaaggggtttatgtggggtgagaatagaagtaacacaacttttaatttgttgtcaccttcaacttcatttctttacgaggatggcaatttaggtattaatactacaactagtgcatctgaaaaaccagacattgttgagctccttgacaagagtttcagcaaatatggtataagtgactcagagaaaaatcagatacttgcaatttctgatcttatggctggaatcactgatcagagccattcctctccctacaaaaatcttgacgaagcaggaagaaggttctgggttgctgtgcagttcgaacaattccatgctcttagaagatctgcagattcatccagtaatgaagggtgccgtgttgattctgcttccatagcctgggccttccaatctgattgtcaggatgatctacttaattctgtgcttcctgcagagccaacctggccagagatgcgaaagcttggtataggattatggtatacaaatgtgtcccaactaaggacaaggatggagaagttggcaaggttgcaatatcttaaaagcaaggatcccaaggattgtgctttgctctacatagcattgaacagaataaaagtgttggttggtcttttcaagattagtagagatgaaaaggataaacgtctatatgagtttctgtccagaaacttccaggaagaaaggcacaaggctgctgctctaaaaaatgcttatgtactaatgggaaggcaccaatgggagcttgctatagcttttttcctccttggtgatgatacttcatcagcagtgaatgtttgtgcaaagaaccttcaagatgaacagcttgccattgtaatttgtcggcttattgaaggatctggagggcctctggagcgtaatctcatttctaatgtgctacttccagatgcagttgagagaggagataactggctgtcaagcctgcttgagtggatgttaggaaattattgccagtccgtcaatagaatatttggttgccatccaaagttgcttattgatcaaaatgtgcttgcagacccagaattgggtcattattgtgcaattctctcagcaaaaagtagtttcagaaactctgttggtgaagctgtatctgcaaagttatctaagctttcatttgcagtggctgcatgtgccttgaataagtgcggactacctcttgaagcactagaatgcttgtctactaactcgagcatagatggcaaggatagcataatcgcacatggtgatggagaccacaagattttttatggaatactgagccctgtctctgcttctaagaattggctgtcttcatctgtcattagtggcattgagtccaaccttaaactaactatggcttcaaaatatctatctagccttctgagaaagcactcactctgttcacaattgaacgcaccattatctgaagaaaaggtccttaatgagtacaacaatcatcaaattgaaaaactgacgtgtgatattacaacagtaatctcaatatttgataaaaggttctccctcaaatttgctgatatagctgagaagatcctaatcttttgtagccatgatggtttattgtttctagcgtatgttttgttatggggtactaggtcaccagatgttgcaactgataattatattcttgaatgtcaccctctctgcccaattgattatctgttattgttttcattcaaagagagctgcaagttttttagtcgatatgttgtcctctcctccatgtgttctgttctgaatatggaggacaccaattctactgcatgggcacttaaagagagacataagtacattgtaataagtttgtcaaattacctgaatgtcagcaggttacttcttaaacatgacaaaagtggaaattatattctggatgacaggtcagctatgctggcagttatggatctgtttgagtacattatagagttttctttttcttggttgtattatgacataaaatcattacttatcatgataaatccagtcctagctacttctgttaatggggattcctttcaagtactattagatcaactgatgcatgctatatgccacaaaaatcatgatatatcatcaagtacaggaggaatgccccatgctgcattgagtaaaacacaactgaaaaagagtgtgaattcaaatcttttagcagatgagaagtggcatttgataggcgcttctgtgtgggttcggttgatatctgtgcttgaacatcgtctaagggaattctttgagaaagagggacttgaacatgaagctggtgttagtggttcagaattcaggggtcttatcacttctgttgctgcaaagtttgttatggattccattcattttgtgtcatcttcattagtaccactgcatgcatcgttcttgaggaagaatttaccgatgaattcaagttcaagtttgctcttctggttagagtccaagttgcctcagcaactcccagtcagtgatagctatgatcacctctcgaggatttcacagctttcaaacagtgagaatatggaggcattgtttaatattttgtgggaaatatctgttaatcctgtggatgtttgtaatgcctttgtgagtgaaggagttaattgtttttccttaagcaacacgaatgtcactagatcttggaaggacataagatgtcctgtggttgagtgtgataaaattattactgaaagaagtggagaggaacatgaacacagacttggctccaagagattgggacagggattcgctgaaaaagcctcttataatggtgaagtgttgtatgaaactaaaaggagggagttgatcatacaaaaagagtttcagagcccaagggaaattctaaggagaagcggggagcttcttgagtactgcattttaaccttttcagtggcgcaggcggtatgtcttaactctgtcaatgagaaacaagctgctattgctactaatcgaaagggccttgttttcttcaattggagtgacaagcagcataacaagagtttttcagagtacgtctggtcaggatctgattggccattagatggctgggctggctgtcagtctacacctactccaacttctatctctcctggtgttgatcttggtcggaaaaaagggtcacaacttggttcagttggagcaactacaggtttgagttctttagcaaagccaggaagagatctaactggtggtggagcatttggaattccaggctatgctggtattggggcctctgggtttgggtggggcgaacctgaagaatttgaggatttcattgatcctccagcaacacttgagaacatacattcaagagcattatcccgccatccctcattaccattgtttcttgttggttcaagcaatacacatgtgtatctgtgggagtttggtaaagctagtgctatggctacatatggtgttctacctgctgctaatattccaccgccttatgcactggcctccatatcatctgttcaatttgactgttatggacagcgggatgttgcctatgtgtctgcaagtagatcagttattgcttctgctggatatagttcaaatggttcaaatgttgttatatgggacacactgtctccaccagctacatctcaaacatctatcatgtgtcatgaagttgtcatggagttcaacagtgagttactaaaccgcaaggggccagtgcttgcatacagcagcctgactagggttgtggccgagaggtttttgggaggtgaatttgagtcctacccaggtggtttttgccatattagcaccatatcatcaggaggagctcggtctatttctgtgtttgatagtgatagaggctatgggtctatctcaccgcttgttgtaactggtgggaaaaatggagatatagctttgcatgattgccgcttcctttctactggaaagtccaagcatcatagagttaccactgagcatggtgtcgaggcatcttccatgcatgacatcaaatctagtacttttggtggtactgacagtgggatggtctggcatataccaaaggctcatctaggtagtgtcacaaaggtaacgaccatcccaaataccagcttgttcttaaccggaagcaaagatggagatgtgaaactttgggatgctaaaaactcccagctagtctttcactggacaaagatgcatgaacggcacaccttttttcaaccaacctccaggggctttggcggtgttgttagagctgctgtaacagatctccaggtgttgcctaatggtttcgtttcatgtggaggtgatggttctgtgaagcttgttcagataaaagatgatctcgctgcagcatatcagcgttaaaacaagcaaagagggaagaagacatgctagaaaatgcgatggatgcagttggtcacttgatatcattctattttgctttgctcattatacttttgagatgctttactcctttcaggggtggtatagcaaggaggaagctatgatttaagagcactagagcagacatctaggcaatttgacatcagcatttatacgtcgagtttttatacgagcctggtttgtggctagtcaaactgccctcagtggtttttttgaggcctgaattttcgcactttggacagggcaatgcggaccataattttttgtacatctgtacagtcaaatatcttgttttgttggccaggatgttgatggagggtgtaaagttgtaagctagaagtatggagataccaagctacaatacctttttgttacttaatacaaaagtgctgggtttagggttaatgtacaatggcagagcaaatggaccaaacaaatattgtatttggtacgggagtatgtatgcggtttgtcaaggggaccgcagtagttcatcattcaaaacaatattttgcattattttgtactgtagatttcactgtttctatagtgaagtttgaatatgagaatgtagatgagtaaattgctagagatagtcttagtgtgatcttttaatatcctgaaacctaaggtccaatcgaac

SEQ ID NO: 218277 - DNA, 7850 bp, Zea Mays
cgcaactcctgctaccaccaccatcgccgctacagcggcgcatgcagcagccggcacgacgatgggggagcgagacgcgctcccgccgctgccgctcgccctcggtccgccgcatctaatcccgccggcgcccacccgcgacccgcgcgccatcgccttcctccctgacctcgtgggcttccactgggtcgcctacgctgccggctccttccttgtcgtatcccacctcccctccccttgccgggacgacaacaacaacgacagttgctccccgttcttccgccaggtcatcgacctccgcgcccccgtgtccgcagttgcttggtgccgccgcgggagcggagaggtcgccgccgctacagacaattctatacacatattccagcctgcgcccgcctcttctccaggttcgtttggatggctcctgagatggtctatcaccgagacgttcgccatcgttgctgtatcctggaccggctgcggcaatggcattgtggcagttggcgcaggtgtttccatgtgggcaagattggagtcctcctggcagctcgcttggaggtctacaccgcaggtgccgcaagcccttgtctccactacctgttccatgcaaggtcctgtcgcgacagtggcagctcttgctccagccgagggcagtgtgcctgttcttgtgtttctgaacgatgccaggagggggctggagcaagctgagcttgtgcatcctcagcctgtttgtatgatccagtggagatcctgttcgttatacccccatgatctgtctgagatcaggagagagatcctcatgacttgctgctttgatgggactgtccggctatggagtaaggatgaggtgtctaggtcgaagaagcagcgtggtttgctaatatcattcagtgtcattgcagtaatagaggtgaacaacactctgaatggagtcctcggagttgatattattgtgagatggtccatggaatctggcagcgttgtgtcaagggacgaacaaggtagattcaagttgttttcaggtgatttgagggagagccaggttggtaaatgtgagtggcttgtaagtcttggccccgggccttgcattagcttttgggctatccattgtttggatgatgtatttccgccaaggtacccacggattactttatggaaacagagcaaacttcagggctggggggattcctatgttaaatcaggtcctctaaaatctatggaacagtcaatttttgttgaggctgtcatctcaagaaggctatgctctggtccacctgcaacatgttttttgcttcatttgctggtggatgattcgtttgcttggtcaaccgtatccaccaaactgttagctgattctgggaaccatgctttaagtgattctgctaaaaatatcttgtgttgtttgactaaacctgtcaaacaagatggacataagggtagcatcagacaagtgtctgtccatccatatagctgcgaaatagagttagctgtctccatggattcaaacagaatgatatttttctggtctctgtcaactttctcaactctcataccgacaatgcatgcacctatgtatcctctatggaagctgttgtgcaaatttgatttgcgtaacatttctgaagatttcgagtactcatgtttgtgttgggcaccttctgttactcgtgataatagatttcttgttcttggatgggaaagtggagtcgattgtttcgtagttagaattcagaaagaagaggttctttcatgccagaagattttcacaatccccttccttgcagaaagcaatacagaagggccacctgacagcattcatacgataccattagcttctaaatgcagcagctctctttccaccacaaaccaaggggcacatgcatgcttcagcaatgaaatgttttcagcagtggtttatgaaggttcttcagtctttccttctggcctggagggagaatataccacgtgcatttctgtaatgccgctgaataatactgtactgcctatacaacaacatgacccttacagaactgttccaggctatcatattgctactggttgctctgatggcactgtaaaactttggaagatgacttgtgcagaggactctttgcagactaagaaagaaagacacatctgggagctagtaggcatgtttggtgctcatcaaggaccaattgacatagtttcattgtcaggctgtggtagagttattactgttggcagaaatttgaagaaaaatagcacctccattcatatctgggaagcaacaaaaatcaggggagacgggaattttctgctaggagatacactaatgttgcaagaccatattgttggtttagatggactatccttaggtgatggacgatttctacttgcagtttatctagctaatgagttacgtatatattctcataagcacccgtccttccagaatgtactacacactaagaattcaaaagaagagcatctttggagctgtattgtattatcccattctcatcatgatattgttggctttctttggggaccaaaggcaactgttgtgcttgttcatgagaaccatctttcactcttcagttcatggctagtaactggagataatgagtacatgacccagatacattcttgtcctgtagttcatgagatgttgccatgtactaacaattttaacgaagctacttttggtaaactcaagttaccagaaaatttcaacagtggaaacattgatagcaataatgtcctgctaacagaccaacatagccactattctcatggtttatggagcttgctgcacatagctcatagattgagtggaccgttggcatcatatcacccaagagcacttatccagtatctttattcaggtgaatggaaacgtgcggatgctgctctgcaccatcttgttcggtccatgaaagtgagtgaaacttcaaagggcgtgtcaaattacagtacatgccatagtattccagaacttcctttgtctgaatactttgcggcaacagtgtccaacaacatttctaccaaggggtttatgtggggtgagaatagaagtaacacaacttttaatttgttgtcaccttcaacttcatttctttacgaggatggcaatttaggtattaatactacaactagtgcatctgaaaaaccagacattgttgagctccttgacaagagtttcagcaaatatggtataagtgactcagagaaaaatcagatacttgcaatttctgatcttatggctggaatcactgatcagagccattcctctccctacaaaaatcttgacgaagcaggaagaaggttctgggttgctgtgcagttcgaacaattccatgctcttagaagatctgcagattcatccagtaatgaagggtgccgtgttgattctgcttccatagcctgggccttccaatctgattgtcaggatgatctacttaattctgtgcttcctgcagagccaacctggccagagatgcgaaagcttggtataggattatggtatacaaatgtgtcccaactaaggacaaggatggagaagttggcaaggttgcaatatcttaaaagcaaggatcccaaggattgtgctttgctctacatagcattgaacagaataaaagtgttggttggtcttttcaagattagtagagatgaaaaggataaacgtctatatgagtttctgtccagaaacttccaggaagaaaggcacaaggctgctgctctaaaaaatgcttatgtactaatgggaaggcaccaatgggagcttgctatagcttttttcctccttggtgatgatacttcatcagcagtgaatgtttgtgcaaagaaccttcaagatgaacagcttgccattgtaatttgtcggcttattgaaggatctggagggcctctggagcgtaatctcatttctaatgtgctacttccagatgcagttgagagaggagataactggctgtcaagcctgcttgagtggatgttaggaaattattgccagtccgtcaatagaatatttggttgccatccaaagttgcttattgatcaaaatgtgcttgcagacccagaattgggtcattattgtgcaattctctcagcaaaaagtagtttcagaaactctgttggtgaagctgtatctgcaaagttatctaagctttcatttgcagtggctgcatgtgccttgaataagtgcggactacctcttgaagcactagaatgcttgtctactaactcgagcatagatggcaaggatagcataatcgcacatggtgatggagaccacaagattttttatggaatactgagccctgtctctgcttctaagaattggctgtcttcatctgtcattagtggcattgagtccaaccttaaactaactatggcttcaaaatatctatctagccttctgagaaagcactcactctgttcacaattgaacgcaccattatctgaagaaaaggtccttaatgagtacaacaatcatcaaattgaaaaactgacgtgtgatattacaacagtaatctcaatatttgataaaaggttctccctcaaatttgctgatatagctgagaagatcctaatcttttgtagccatgatggtttattgtttctagcgtatgttttgttatggggtactaggtcaccagatgttgcaactgataattatattcttgaatgtcaccctctctgcccaattgattatctgttattgttttcattcaaagagagctgcaagttttttagtcgatatgttgtcctctcctccatgtgttctgttctgaatatggaggacaccaattctactgcatgggcacttaaagagagacataagtacattgtaataagtttgtcaaattacctgaatgtcagcaggttacttcttaaacatgacaaaagtggaaattatattctggatgacaggtcagctatgctggcagttatggatctgtttgagtacattatagagttttctttttcttggttgtattatgacataaaatcattacttatcatgataaatccagtcctagctacttctgttaatggggattcctttcaagtactattagatcaactgatgcatgctatatgccacaaaaatcatgatatatcatcaagtacaggaggaatgccccatgctgcattgagtaaaacacaactgaaaaagagtgtgaattcaaatcttttagcagatgagaagtggcatttgataggcgcttctgtgtgggttcggttgatatctgtgcttgaacatcgtctaagggaattctttgagaaagagggacttgaacatgaagctggtgttagtggttcagaattcaggggtcttatcacttctgttgctgcaaagtttgttatggattccattcattttgtgtcatcttcattagtaccactgcatgcatcgttcttgaggaagaatttaccgatgaattcaagttcaagtttgctcttctggttagagtccaagttgcctcagcaactcccagtcagtgatagctatgatcacctctcgaggatttcacagctttcaaacagtgagaatatggaggcattgtttaatattttgtgggaaatatctgttaatcctgtggatgtttgtaatgcctttgtgagtgaaggagttaattgtttttccttaagcaacacgaatgtcactagatcttggaaggacataagatgtcctgtggttgagtgtgataaaattattactgaaagaagtggagaggaacatgaacacagacttggctccaagagattgggacagggattcgctgaaaaagcctcttataatggtgaagtgttgtatgaaactaaaaggagggagttgatcatacaaaaagagtttcagagcccaagggaaattctaaggagaagcggggagcttcttgaggcggtatgtcttaactctgtcaatgagaaacaagctgctattgctactaatcgaaagggccttgttttcttcaattggagtgacaagcagcataacaagagtttttcagagtacgtctggtcaggatctgattggccattagatggctgggctggctgtcagtctacacctactccaacttctatctctcctggtgttgatcttggtcggaaaaaagggtcacaacttggttcagttggagcaactacaggtttgagttctttagcaaagccaggaagagatctaactggtggtggagcatttggaattccaggctatgctggtattggggcctctgggtttgggtggggcgaacctgaagaatttgaggatttcattgatcctccagcaacacttgagaacatacattcaagagcattatcccgccatccctcattaccattgtttcttgttggttcaagcaatacacatgtgtatctgtgggagtttggtaaagctagtgctatggctacatatggtgttctacctgctgctaatattccaccgccttatgcactggcctccatatcatctgttcaatttgactgttatggacagcgggatgttgcctatgtgtctgcaagtagatcagttattgcttctgctggatatagttcaaatggttcaaatgttgttatatgggacacactgtctccaccagctacatctcaaacatctatcatgtgtcatgaaggaggagctcggtctatttctgtgtttgatagtgatagaggctatgggtctatctcaccgcttgttgtaactggtgggaaaaatggagatatagctttgcatgattgccgcttcctttctactggaaagtccaagcatcatagagttaccactgagcatggtgtcgaggcatcttccatgcatgacatcaaatctagtacttttggtggtactgacagtgggatggtctggcatataccaaaggctcatctaggtagtgtcacaaaggtaacgaccatcccaaataccagcttgttcttaaccggaagcaaagatggagatgtgaaactttgggatgctaaaaactcccagctagtctttcactggacaaagatgcatgaacggcacaccttttttcaaccaacctccaggggctttggcggtgttgttagagctgctgtaacagatctccaggtgttgcctaatggtttcgtttcatgtggaggtgatggttctgtgaagcttgttcagataaaagatgatctcgctgcagcatatcagcgttaaaacaagcaaagagggaagaagacatgctagaaaatgcgatggatgcagttggtcacttgatatcattctattttgctttgctcattatacttttgagatgctttactcctttcaggggtggtatagcaaggaggaagctatgatttaagagcactagagcagacatctaggcaatttgacatcagcatttatacgtcgagtttttatacgagcctggtttgtggctagtcaaactgccctcagtggtttttttgaggcctgaattttcgcactttggacagggcaatgcggaccataattttttgtacatctgtacagtcaaatatcttgttttgttggccaggatgttgatggagggtgtaaagttgtaagctagaagtatggagataccaagctacaatacctttttgttacttaatacaaaagtgctgggtttagggttaatgtacaatggcagagcaaatggaccaaacaaatattgtatttggtacgggagtatgtatgcggtttgtcaaggggaccgcagtagttcatcattcaaaacaatattttgcattattttgtactgtagatttcactgtttctatagtgaagtttgaatatgagaatgtagatgagtaaattgctagagatagtcttagtgtgatcttttaatatcctgaaacctaaggtccaatcgaac

SEQ ID NO: 218278 - DNA, 1794 bp, Zea Mays
cagcagcctatcacggccaaaaccgccaaaccctagttgtgcatggatagcccctcacgccagccgccaatgccccaatcccgtaatcgcagcctcgccccgctcgcatcttcctctccctctcagcactggtgctcaatctacaggttgtcccgctccctacacacccgccctccggtgtgaacctccatgacgtccacaaccactctccggtatgaatcccgcgtgcgcttacacgaagattgatctgctgtcgtgacctcatccagccgtgctgtggcagtggatcgaagttcgctccagctctgattgggggaaaatgactagggtatcaagtggaaaaacataatggtccaggttctactgcggcacctctttcaggctaagcatctaaacaacaatatgtaaattatccttttccaataaaatacatgcttaaatcgtggctgctaggcgaatggtcctactttggtcatcaaatgcaggttagcttaactttttctaatgcattattatttgtggtttccatcaaatgtacgttagcttatcttttagcaaatttgtagctgatgtcaattaactttttagtggaattttatctgctcattcttatattcaggaattccactactatatgtgccacttgaagttgttatgtcaaaataatatggtgaaaacgagcgtctattgggatctattttttatcttgcaaatgatcttcctgaaggaggtaatatattcttagatgaggtatatatcgtaatacttatagcataaacactcaagccactacaaactgccttcgtccccttcatcactgctaatgaccgtgacttggagacccgacagcggccctcgacgttgtcgccgccgagcccatgctggttccaccagtggtccaccacccggatgtggtccgccaagacgagcagtaacggtggcagcgaggcgaggtggtagatccagcaccgcttctgcacgaccatccattcctccacccagagcatgtacccaggcttgcctctcctcggggaacatgccgaggtcgtccgactggagcagaaggcgacatcgctcaacaagctggtcgaggagcagtgcgagagcataaacgatctcaagtccaagagggaagctgaaccttgttcttctgccatcatctagcatgcggcttacctttgtttgtgatgatggttatccagagcaactagctctcttgagcaacgactttgaattttcggaagttatgattgaagaaatatcagctgataattctggacgctctttcctaatcagaatttcagaatctaaagtgttttactactggtgtgctgagaagtcgaaggaagattgaatggaacttcttgcaaaggtcttcaagggagaagcggcttaaaatgtgtgagcaggtattttcggactcgtaccagaaagggaaaagctacaaaggttgacacagcgccgaagctgtgaagcaggaaagcttcggcatgttcgcagaaaagggaaccgacttaaagatgaaaaggccatttagacctcgatagagtgctatagaattatcaccaaatgtaaagggcatgtatgtaattttgtatgggttgtaccccgtgcctataaataggtgaacagtacccccgtactgttcacgttgacttggcatttgcttttgcgtcacacttgtattttcatctccttccaaaccgaaggtacatttataatttgatattgtctctatttctctataatgatataataaagttaaatgaatgatgttatatgattattcgtgct

SEQ ID NO: 218279 - DNA, 1854 bp, Zea Mays
atggatagcccctcacgccagccgccaatgccccaatcccgtaatcgcagcctcgccccgctcgcatcttcctctccctctcagcactggtgctcaatctacaggttgtcccgctccctacacacccgccctccggtgtgaacctccatgacgtccacaaccactctccgatctgctgtcgtgacctcatccagccgtgctgtggcagtggatcgaagttcgctccagctctgattgggggaaaatgactagggtatcaagtggaaaaacataatggtccaggttctactgcggcacctctttcaggctaagcatctaaacaacaatatgtaaattatccttttccaataaaatacatgcttaaatcgtggctgctaggcgaatggtcctactttggtcatcaaatgcaggttagcttaactttttctaatgcattattatttgtggtttccatcaaatgtacgttagcttatcttttagcaaatttgtagctgatgtcaattaactttttagtggaattttatctgctcattcttatattcaggaattccactactatatgtgccacttgaagttgttatgtcaaaataatatggtgaaaacgagcgtctattgggatctattttttatcttgcaaatgatcttcctgaaggaggtaatatattcttagatgagattgatatgtcaagatacgcttgtttcatttgagctcaatgttatctgaaaatatatagactgccttcgtccccttcatcactgctaatgaccgtgacttggagacccgacagcggccctcgacgttgtcgccgccgagcccatgctggttccaccagtggtccaccacccggatgtggtccgccaagacgagcagtaacggtggcagcgaggcgaggtggtagatccagcaccgcttctgcacgaccatccattcctccacccagagcatgtacccaggcttgcctctcctcggggaacatgccgaggtcgtccgactggagcagaaggcgacatcgctcaacaagctggtcgaggagcagtgcgagagcataaacgatctcaagtccaagagccatccgattctgggcccagaacactttgccaaacaaaaagttatcgctcttcatccttgataggctacagaagaaggatacatatgctgtattttcgtagcctgttgatcctgaagagagggaagctgaaccttgttcttctgccatcatctagcatgcggcttacctttgtttgtgatgatggttatccagagcaactagctctcttgagcaacgactttgaattttcggaagttatgattgaagaaatatcagctgataattctggacgctctttcctaatcagaatttcagaatctaaagtgttttactactggtgtgctgagaagtcgaaggaagattgaatggaacttcttgcaaaggtcttcaagggagaagcggcttaaaatgtgtgagcaggtattttcggactcgtaccagaaagggaaaagctacaaaggttgacacagcgccgaagctgtgaagcaggaaagcttcggcatgttcgcagaaaagggaaccgacttaaagatgaaaaggccatttagacctcgatagagtgctatagaattatcaccaaatgtaaagggcatgtatgtaattttgtatgggttgtaccccgtgcctataaataggtgaacagtacccccgtactgttcacgttgacttggcatttgcttttgcgtcacacttgtattttcatctccttccaaaccgaaggtacatttataatttgatattgtctctatttctctataatgatataataaagttaaatgaatgatgttatatgattattcgtgct

SEQ ID NO: 218280 - DNA, 1683 bp, Zea Mays
atagcccctcacgccagccgccaatgccccaatcccgtaatcgcagcctcgccccgctcgcatcttcctctccctctcagcactggtgctcaatctacaggttgtcccgctccctacacacccgccctccggtgtgaacctccatgacgtccacaaccactctccggtatgaatcccgcgtgcgcttacacgaagattgatctgctgtcgtgacctcatccagccgtgctgtggcagtggatcgaagttcgctccagctctgattgggggaaaatgactagggtatcaagtggaaaaacataatggtccaggttctactgcggcacctctttcaggctaagcatctaaacaacaatatgtaaattatccttttccaataaaatacatgcttaaatcgtggctgctaggcgaatggtcctactttggtcatcaaatgcaggaattccactactatatgtgccacttgaagttgttatgtcaaaataatatggtgaaaacgagcgtctattgggatctattttttatcttgcaaatgatcttcctgaaggagattgatatgtcaagatacgcttgtttcatttgagctcaatgttatctgaaaatatatagactgccttcgtccccttcatcactgctaatgaccgtgacttggagacccgacagcggccctcgacgttgtcgccgccgagcccatgctggttccaccagtggtccaccacccggatgtggtccgccaagacgagcagtaacggtggcagcgaggcgaggtggtagatccagcaccgcttctgcacgaccatccattcctccacccagagcatgtacccaggcttgcctctcctcggggaacatgccgaggtcgtccgactggagcagaaggcgacatcgctcaacaagctggtcgaggagcagtgcgagagcataaacgatctcaagtccaagagccatccgattctgggcccagaacactttgccaaacaaaaagttatcgctcttcatccttgataggctacagaaagggaagctgaaccttgttcttctgccatcatctagcatgcggcttacctttgtttgtgatgatggttatccagagcaactagctctcttgagcaacgactttgaattttcggaagttatgattgaagaaatatcagctgataattctggacgctctttcctaatcagaatttcagaatctaaagtgttttactactggtgtgctgagaagtcgaaggaagattgaatggaacttcttgcaaaggtcttcaagggagaagcggcttaaaatgtgtgagcaggtattttcggactcgtaccagaaagggaaaagctacaaaggttgacacagcgccgaagctgtgaagcaggaaagcttcggcatgttcgcagaaaagggaaccgacttaaagatgaaaaggccatttagacctcgatagagtgctatagaattatcaccaaatgtaaagggcatgtatgtaattttgtatgggttgtaccccgtgcctataaataggtgaacagtacccccgtactgttcacgttgacttggcatttgcttttgcgtcacacttgtattttcatctccttccaaaccgaaggtacatttataatttgatattgtctctatttctctataatgatataataaagttaaatgaatgatgttatatgattattcgtgct

SEQ ID NO: 218281 - DNA, 2394 bp, Zea Mays
atagcccctcacgccagccgccaatgccccaatcccgtaatcgcagcctcgccccgctcgcatcttcctctccctctcagcactggtgctcaatctacaggttgtcccgctccctacacacccgccctccggtgtgaacctccatgacgtccacaaccactctccggtatgaatcccgcgtgcgcttacacgaagattggtaatagtggcgacccagtcgcagccgtggaccttctcctcctcatcgcttgctcgttgtcgtcttttgcctacgtctgcacccgacgctgctacccttcgctcacctgttcatcatcctttcagatctgctgtcgtgacctcatccagccgtgctgtggcagtggatcgaagttcgctccagctctgattgggggaaaatgactagggtatcaagtggaaaaacataatggtccaggttctactgcggcacctctttcaggctaagcatctaaacaacaatatgtaaattatccttttccaataaaatacatgcttaaatcgtggctgctaggcgaatggtcctactttggtcatcaaatgcaggttagcttaactttttctaatgcattattatttgtggtttccatcaaatgtacgttagcttatcttttagcaaatttgtagctgatgtcaattaactttttagtggaattttatctgctcattcttatattcaggaattccactactatatgtgccacttgaagttgttatgtcaaaataatatggtgaaaacgagcgtctattgggatctattttttatcttgcaaatgatcttcctgaaggaggtaatatattcttagatgaggtatatatcgtaatacttatagcataaacactcaagccactacaaactgccttcgtccccttcatcactgctaatgaccgtgacttggagacccgacagcggccctcgacgttgtcgccgccgagcccatgctggttccaccagtggtccaccacccggatgtggtccgccaagacgagcagtaacggtggcagcgaggcgaggtggtagatccagcaccgcttctgcacgaccatccattcctccacccagagcatgtacccaggcttgcctctcctcggggaacatgccgaggtcgtccgactggagcagaaggcgacatcgctcaacaagctggtcgaggagcagtgcgagagcataaacgatctcaagtccaaggctagtgctgatctccttccctgatttatgaactgcattgagtcgcgtgcgagtttattttatttatgattttttcgtggtggtaactagtgttggtaaacaaaagtttacccccacctttctgctgcttttttctacctcagggaggtttttgatgctcgtaaatattttaacttcgtatgttatttatttaatttttttatcttaactgttgggagaaaagatgaggaaaagcgagagatgggcgtgaatgttggtgctccttgctctgtgctattaactcttcaggtttccgtaggcaaaaaatatacctggacaaatatgcataagggtgtcatttttaattctgttactgttatatgcattccatatttctcgtatatataattaatgatcgtgcctctgttttccctgtgcctcatggcttcgatttgttcattcgacagagccatccgattctgggcccagaacactttgccaaacaaaaagttatcgctcttcatccttgataggctacagaaagggaagctgaaccttgttcttctgccatcatctagcatgcggcttacctttgtttgtgatgatggttatccagagcaactagctctcttgagcaacgactttgaattttcggaagttatgattgaagaaatatcagctgataattctggacgctctttcctaatcagaatttcagaatctaaagtgttttactactggtgtgctgagaagtcgaaggaagattgaatggaacttcttgcaaaggtcttcaagggagaagcggcttaaaatgtgtgagcaggtattttcggactcgtaccagaaagggaaaagctacaaaggttgacacagcgccgaagctgtgaagcaggaaagcttcggcatgttcgcagaaaagggaaccgacttaaagatgaaaaggccatttagacctcgatagagtgctatagaattatcaccaaatgtaaagggcatgtatgtaattttgtatgggttgtaccccgtgcctataaataggtgaacagtacccccgtactgttcacgttgacttggcatttgcttttgcgtcacacttgtattttcatctccttccaaaccgaaggtacatttataatttgatattgtctctatttctctataatgatataataaagttaaatgaatgatgttatatgattattcgtgct

SEQ ID NO: 218282 - DNA, 1670 bp, Zea Mays
atagcccctcacgccagccgccaatgccccaatcccgtaatcgcagcctcgccccgctcgcatcttcctctccctctcagcactggtgctcaatctacaggttgtcccgctccctacacacccgccctccggtgtgaacctccatgacgtccacaaccactctccgatctgctgtcgtgacctcatccagccgtgctgtggcagtggatcgaagttcgctccagctctgattgggggaaaatgactagggtatcaagtggaaaaacataatggtccaggttctactgcggcacctctttcaggctaagcatctaaacaacaatatgtaaattatccttttccaataaaatacatgcttaaatcgtggctgctaggcgaatggtcctactttggtcatcaaatgcaggaattccactactatatgtgccacttgaagttgttatgtcaaaataatatggtgaaaacgagcgtctattgggatctattttttatcttgcaaatgatcttcctgaaggaggtaatatattcttagatgagattgatatgtcaagatacgcttgtttcatttgagctcaatgttatctgaaaatatatagactgccttcgtccccttcatcactgctaatgaccgtgacttggagacccgacagcggccctcgacgttgtcgccgccgagcccatgctggttccaccagtggtccaccacccggatgtggtccgccaagacgagcagtaacggtggcagcgaggcgaggtggtagatccagcaccgcttctgcacgaccatccattcctccacccagagcatgtacccaggcttgcctctcctcggggaacatgccgaggtcgtccgactggagcagaaggcgacatcgctcaacaagctggtcgaggagcagtgcgagagcataaacgatctcaagtccaagagccatccgattctgggcccagaacactttgccaaacaaaaagttatcgctcttcatccttgataggctacagaaagggaagctgaaccttgttcttctgccatcatctagcatgcggcttacctttgtttgtgatgatggttatccagagcaactagctctcttgagcaacgactttgaattttcggaagttatgattgaagaaatatcagctgataattctggacgctctttcctaatcagaatttcagaatctaaagtgttttactactggtgtgctgagaagtcgaaggaagattgaatggaacttcttgcaaaggtcttcaagggagaagcggcttaaaatgtgtgagcaggtattttcggactcgtaccagaaagggaaaagctacaaaggttgacacagcgccgaagctgtgaagcaggaaagcttcggcatgttcgcagaaaagggaaccgacttaaagatgaaaaggccatttagacctcgatagagtgctatagaattatcaccaaatgtaaagggcatgtatgtaattttgtatgggttgtaccccgtgcctataaataggtgaacagtacccccgtactgttcacgttgacttggcatttgcttttgcgtcacacttgtattttcatctccttccaaaccgaaggtacatttataatttgatattgtctctatttctctataatgatataataaagttaaatgaatgatgttatatgattattcgtgct

SEQ ID NO: 218283 - DNA, 951 bp, Zea Mays
cgaagattgcgaccagacttgcgttcgagctcggagctcctccctctatccacttgcaacggtcgagaggaagcggaggtccatatcgctcattcccgcccgtcccgcaaccaccaccgcggccgcggtgccatggcatccgccgccggcgccgccttgtgcccatgctctttctccaccgtactctcctcctccccctcaactcccttccgtcccgcaaggacgacgcctcgcccttctctccgcccgctgccgcgccgcgccaggctaccgctgcggccgggccactcggtactgaggtgcctcccgaaatgcgactcggggaagccggacggaggaggagatgctgggttatcgggtcggaaggcggcccggccagcgggtcagggaggacccaggcggcccgcacagttcggcgcgtcgtcgtgcggactcgcattcacgacggtggcgggggtgataatgctccaggcatcgcagcaggcgcttgccgccacgcagttcgctggcctgcagcctgcggacgtgctgggggatctcggggacgtcagtacaggttttgcttcagctttcctgttgatcttcttttctgagctaggggacagaacgttcttcattgcggcactgttagcagctagaagttctggagctgtcatttttctaggcacatttggagctcttgcggtaatgaccattatatctgtagttcttggtcgagcattccactatgttgatggcatcattccgttcagctttggtggtactgatttcccagttgatgacattgctgcggcatgtctcttggtttattatggggttactacattacttgatgcagcctcaggtgatgatgaaaagatcaatgaggagcaagaggagggagatcatggtcatgtgaaactagtgctgaacttaagctacgtgatggcacggttggttagaaaaaactcg

SEQ ID NO: 218284 - DNA, 1700 bp, Zea Mays
cgaagattgcgaccagacttgcgttcgagctcggagctcctccctctatccacttgcaacggtcgagaggaagcggaggtccatatcgctcattcccgcccgtcccgcaaccaccaccgcggccgcggtgccatggcatccgccgccggcgccgccttgtgcccatgctctttctccaccgtactctcctcctccccctcaactcccttccgtcccgcaaggacgacgcctcgcccttctctccgcccgctgccgcgccgcgccaggctaccgctgcggccgggccactcggtactgaggtgcctcccgaaatgcgactcggggaagccggacggaggaggagatgctgggttatcgggtcggaaggcggcccggccagcgggtcagggaggacccaggcggcccgcacagttcggcgcgtcgtcgtgcggactcgcattcacgacggtggcgggggtgataatgctccaggcatcgcagcaggcgcttgccgccacgcagttcgctggcctgcagcctgcggacgtgctgggggatctcggggacgtcagtacaggttttgcttcagctttcctgttgatcttcttttctgagctaggggacagaacgttcttcattgcggcactgttagcagctagaagttctggagctgtcatttttctaggcacatttggagctcttgcggtaatgaccattatatctgtagttcttggtcgagcattccactatgttgatggcatcattccgttcagctttggtggtactgatttcccagttgatgacattgctgcggcatgtctcttggtttattatggggttactacattacttgatgcagcctcaggtgatgatgaaaagatcaatgaggagcaagaggaggctgagttagcagtatcgaaattttctggaaatggtgcgggggtcatgtctgctgctggtactattgctagcacattcgtattggtttttgttgctgaatggggtgataaatcatttttctccacaattgcactagcagcagcttcatcccctctgggtgtcattgcgggatcactagctggtcatgccattgcaacattgattgcagttcttggtggctctttgctgggaacattcctgtctgaaaagattatagcatacattggagggagcctattcttggcctttgctgcgattaccatagttgagatagtgacttgaaaagggagttccagcttccacaattcataaaaagtactgatcttttgtcagggcaatgaaaaatcagcttgatcgtaatggtagtacattgatgtgttaccgaacatgattgtccacaggaacttcattgttcgtatgggacgtcctaggcttgcgtagagtgttttgtttctggtgatgagaatttctgcttctttatccaagaacaatgtttttgtcatcatcatgatttgtagtggaaacactgatagtcaggttggtcggaagatgggactgggagcaaaactatgaattccatgtagcttttgaacttcctcttacattatttacaagtatatgaatcagccttttcgtatttatggggaagacttccctggtttatgtcttccctagactttattcacactagttcaaccctttttatatgaatctaagtgttagattggaagccctaaccctaactagagttgggatgttgtattaataagtaggaacatatc

SEQ ID NO: 218285 - DNA, 1703 bp, Zea Mays
gctcctccctctatccacttgcaacggtcgagaggaagcggaggtccatatcgctcattcccgcccgtcccgcaaccaccaccgcggccgcggtgccatggcatccgccgccggcgccgccttgtgcccatgctctttctccaccgtactctcctcctccccctcaactcccttccgtcccgcaaggacgacgcctcgcccttctctccgcccgctgccgcgccgcgccaggctaccgctgcggccgggccactcgcgagtcggatcgtgtctgcaggtactgaggtgcctcccgaaatgcgactcggggaagccggacggaggaggagatgctgggttatcgggtcggaaggcggcccggccagcgggtcagggaggacccaggcggcccgcacagttcggcgcgtcgtcgtgcggactcgcattcacgacggtggcgggggtgataatgctccaggcatcgcagcaggcgcttgccgccacgcagttcgctggcctgcagcctgcggacgtgctgggggatctcggggacgtcagtacaggttttgcttcagctttcctgttgatcttcttttctgagctaggggacagaacgttcttcattgcgtttcatgtgtttgataggcactgttagcagctagaagttctggagctgtcatttttctaggcacatttggagctcttgcggtaatgaccattatatctgtagttcttggtcgagcattccactatgttgatggcatcattccgttcagctttggtggtactgatttcccagttgatgacattgctgcggcatgtctcttggtttattatggggttactacattacttgatgcagcctcaggtgatgatgaaaagatcaatgaggagcaagaggaggctgagttagcagtatcgaaattttctggaaatggtgcgggggtcatgtctgctgctggtactattgctagcacattcgtattggtttttgttgctgaatggggtgataaatcatttttctccacaattgcactagcagcagcttcatcccctctgggtgtcattgcgggatcactagctggtcatgccattgcaacattgattgcagttcttggtggctctttgctgggaacattcctgtctgaaaagattatagcatacattggagggagcctattcttggcctttgctgcgattaccatagttgagatagtgacttgaaaagggagttccagcttccacaattcataaaaagtactgatcttttgtcagggcaatgaaaaatcagcttgatcgtaatggtagtacattgatgtgttaccgaacatgattgtccacaggaacttcattgttcgtatgggacgtcctaggcttgcgtagagtgttttgtttctggtgatgagaatttctgcttctttatccaagaacaatgtttttgtcatcatcatgatttgtagtggaaacactgatagtcaggttggtcggaagatgggactgggagcaaaactatgaattccatgtagcttttgaacttcctcttacattatttacaagtatatgaatcagccttttcgtatttatggggaagacttccctggtttatgtcttccctagactttattcacactagttcaaccctttttatatgaatctaagtgttagattggaagccctaaccctaactagagttgggatgttgtattaataagtaggaacatatc

SEQ ID NO: 218286 - DNA, 5278 bp, Zea Mays
cgatcccggttgggaatggcctaaacgaacgaacaaggccactcggccccatccggcatccccgacccccgagcgtcttctttcgtctgctcgctctgcgctcgcatctaccatggagactagggtctagggtttagtgcgccgctgcctacatcgccgccatcctcaacttcctacgggatcctgacgaggcgccgtatcatcctcaacgccgcgaacctccgctcccacgttatcctcacgcccaccagtagctctcggcctctacctcgttaaggcttgatatttgactgggacactgggcaaattttaacaagtttcagcaatggggtttgataatgaatgcatcttgagtattcaatcccttcctggtgaatatttctgccctgtttgccggacacttgtatatccgaatgaggccctacaaactcaatgcacacatctctactgcaaatcctgcttggcatatgtagtggcaaccacacaagcttgtccttatgatggataccttgtaacagaagctgattccaagcctcttgtggaatcaaataaaacccttgctgagactattggcaaagtcgcggtctattgcctgtataataagagtggatgccaatggcatggagagctatctgcctgtgtcacacatggtactgcttgtgcatatgggaactctcctgttgtttgcaatcgttgtgggacacaaattgtgcatcgtcaagtgcaagaacatgctcaagtctgccatggcttacaatctcaaacacaacaagctgatggtagtcaggtgcagctggcaacggcaacaactcagccagtcatccaagattcatcacttgcctcagctggatctgctgcagctgcagctacaaccctaacaaagccatcttcaactacagccacagctgtaacagattctgcagcagcaacaggaggggcagctggtgcaaccacagcagctgtgccttcttcagcttcatctatttctgcttcccaaactccaacagctgagcagtggtaccagcagcagcagcagctccaatactcgcaatactaccagcagcagcaccctggatccaacccttacatgcagcaacatcaacaatatgaccaataccagcaggcatatcagcaatacatgcaacctccaatgcaagtaccatcccaaaatgtggtgcaaggatctgcacaacctgcttcttatgttcagcctcaagttcagtcctcccaggtgatgatgcaagcccaaagtcagccccaggtccatccattgacgagtcagccacagcttcaacagcatccagttcaaccccgaccccaaagtcaccctcatatttcccatgttcaagcaccttcaggtcagtcgcagcttcatcaaccaattcagtcagcccaagttccacaggtccaaccaagtcaagttcctctccaaccatctggtctccaagtacaatctgcagcacatccatctgctcctactcaagttggtaatcagcaatttgcgactcaagcaatggcgtatcaggtccagccacatgtacaagctcaacctccgcagcagcaacatattgttgcacatcaacaacatccacatatgcaagctttacccctacagcaaaatattcaacctaagatgcagctaaactctcaagttcagctacagcctccacatgtccagcagcaagcttacccacaatctcaggtctatcctcaacagacacatcatatgcactcccagaatactacatatgcacagcagcaaacccaaggtgctttgatgcaacctgtacatgtgtcccaccaacaaacacatgtttctcatcatcctgcaccgatgcgtcctccatcgtcaggccatcagccagctttgcagcatcctcaggcccagggaattcaacatacatcacaacatgaaaaacatattgggtttcatgctcagtggccaacaatgtattccaacattccttcccaagcaccaccacagggattgtctgtgcactcatctgtttcctcacaatcagttcaatcataccagcaaggaatgtcttcatcacaacagatgcattcccaacctggtcagccatatacacaacagcatgttactggcaatactggacaacatgttcaaacttctgctggcagacctatggcccatcttgcaccaacacagcaatttcagcagcaacatccagcaatgcttagaactgagtcacctgctgctgggcactctattgggcagggtcctttagatcttgaaaaacatacttcaaaatcagggaagttggataatgcaactattgctgctgtcggtgaaaataaaaatagtggtcctgagtcagttgtcatgagacctacaaagtcacaattgggtgatgaaaacatgaacagcgaacacaatggttttgttggtgttagaaaagatgcagtgcaaactggcattgtatcacacaatttagatggttcaattaggagggatgggaatactgaccaggcaggcaattcacatggcccacttgtgcagggaggcaaagatcacaaggcttcagatgcatctactgatcatgagaaaggacgactgtttcaacaggcatcactgcaaaatgcaggggcaccgggctcttatgtgcccccaggtgtggtaccacatccatctggaccagataaaatgcttcctcagcatatgacgaatcatggtcatatgcatggtttctctgaaaatatccgtcctccgctgcaacaaccatatggtgtgtttcattctggaacgataacaaggccatttggagagaaccagattcagatgccaatgccacagcctgggggtatcagacctggtgatggtatgattcgtccttgtttggttggcccattacctggacatcatggtgcagtgttgccttcttttgatcttgaacgtttgggtcagccacgtcctcttggaatgttgaacagcaatgactttggtggtgaggggttcaacgcttcagggggtgcagcgcctccatttgcaaaccacagaagtgcaggtttgcatgaggattttccaagaaagcaaaatgcaactgccagtcaccctgacttcctgtcacatggagcagaatttgatcatcacagggctattggaatgcctaatttcagaaatccaggcccatttgctcaagggacaagtggcggtcctggtggccctcctaaacaccagcttggctctggtgacatgcatccaggtgaccctcatcttgtcgctgaatatgctcagcatggatttcctaaaactgcagcacactttggtttgggtggattcttgagaaacgggaattctggttggtgccgaatatgcatgtttaactgtgggagtgcagagaatctggatttgcatgtacaaacaagggaacatcagcaatgtgcaatggacattgtcctgaaaatgaagcaagatgttgcaaaaaggaattatggagggcccaagtcattcaacaacaaaaaggtttctgggaagggccattttcgtgggaacaggcgctagtgttaactgattaaaattgatgtggttttgaaggttgctactggtgcttatggatgtgtcaatggcaatcgagaattgagatcttttcagacattctgttcatgcggttcagcgtatttgaagggaaacttgtaatggtcccaaacttttgttccatgttgatctgcagagttcacatggctatgtttacttcacgtatttttgccgaagttgttctgggattgcttaacatgctaatatccttcttctgtacgtgctgatttataactcctgtttctttcaactaggctcatgctttttctaatggcgacctaataatagaccatgctggaacttttacaaagagacttgtaattgtgtcatcagacatccataacatggtaaattttgttggaatcttttggtagggggctaatggaaacatgttgaagttactttcagtgcctgaaaattgtgctagttttgcatagtttaaatccaaaaaaatctaagggtgcattggacaaatagttttttttatgtcacagcccaatttgcttaatcatttattttaataaaattattgaatactgactctgtgatatgtccccattcaaaacaagaagggcaaaagtgctgcattcctgaataaacacaagggctagagttgttgacatgtcattgcatgacaacaaagcaatccaaatcaacaaaaataatctcattgaagcggttgcctattttgtgccttgagggatgcattagtgataaagggagacttggaagcctgcaaggaaacacaaaagcatgaagaggtttgagttgggatatgtactttgagtgttagcatgagatgggagggaatcgatggtaaacctaatttagaaccaaaacatgagttgtgctcaaatatagaaggaaaagaaagatatactggttttcatatgaatactggtatgtgcatcatatacgcagtaacgcagagcttgttgataccgaactggagttgtattattcacttctagttagttattcgagatagtgatggttttattgtcataggtttgatgttcagaataggacatcataggattctacaggctacaagcactaaatattatgggtaaaatacttaggtttccaattcactgctgctggacagatgtgattgtttgcatgtgacattttgctgatggtggcctttctctagatgtctgttttaaatcatctgtctttgctgtttgtttgctaaacagaaactgcaaagtgtaggataatttccagcagagggctcctgtcatacttgcatgtttccctaacgatgataaaccaatcaaaagtaaaaaggagaggcgcgtgaagcctaacctacgaaggctacgagtatgaagtcgattatccaatgaagcctcacttacgaaagctatgggtgcaaagttacacatcctgtgaagccttgacgagaagaagaattgctccaagcccttaagaagtcaaagaaccttcactaggtgcatgtatgtgctcgtgaaggccagtcgatcatgaggacccgttaataccatggaatttggatgaaccattgtattttaagccaaaaggtgtttggtagcctttaaaaactctgtatataatactgtggtattatcgatactatggttattttggggtatagaaaactttggtccagaccaaagtttctttgctgtgcgcaatatctgttgagtatgcaagccatggaactggtaaaaaaactgttaagcaaagaataggaag

SEQ ID NO: 218287 - DNA, 4304 bp, Zea Mays
cgatcccggttgggaatggcctaaacgaacgaacaaggccactcggccccatccggcatccccgacccccgagcgtcttctttcgtctgctcgctctgcgctcgcatctaccatggagactagggtctagggtttagtgcgccgctgcctacatcgccgccatcctcaacttcctacgggatcctgacgaggcgccgtatcatcctcaacgccgcgaacctccgctcccacgttatcctcacgcccaccagtagctctcggcctctacctcgttaaggcttgatatttgactgggacactgggcaaattttaacaagtttcagcaatggggtttgataatgaatgcatcttgagtattcaatcccttcctggtgaatatttctgccctgtttgccggacacttgtatatccgaatgaggccctacaaactcaatgcacacatctctactgcaaatcctgcttggcatatgtagtggcaaccacacaagcttgtccttatgatggataccttgtaacagaagctgattccaagcctcttgtggaatcaaataaaacccttgctgagactattggcaaagtcgcggtctattgcctgtataataagagtggatgccaatggcatggagagctatctgcctgtgtcacacatggtactgcttgtgcatatgggaactctcctgttgtttgcaatcgttgtgggacacaaattgtgcatcgtcaagtgcaagaacatgctcaagtctgccatggcttacaatctcaaacacaacaagctgatggtagtcaggtgcagctggcaacggcaacaactcagccagtcatccaagattcatcacttgcctcagctggatctgctgcagctgcagctacaaccctaacaaagccatcttcaactacagccacagctgtaacagattctgcagcagcaacaggaggggcagctggtgcaaccacagcagctgtgccttcttcagcttcatctatttctgcttcccaaactccaacagctgagcagtggtaccagcagcagcagcagctccaatactcgcaatactaccagcagcagcaccctggatccaacccttacatgcagcaacatcaacaatatgaccaataccagcaggcatatcagcaatacatgcaacctccaatgcaagtaccatcccaaaatgtggtgcaaggatctgcacaacctgcttcttatgttcagcctcaagttcagtcctcccaggtgatgatgcaagcccaaagtcagccccaggtccatccattgacgagtcagccacagcttcaacagcatccagttcaaccccgaccccaaagtcaccctcatatttcccatgttcaagcaccttcaggtcagtcgcagcttcatcaaccaattcagtcagcccaagttccacaggtccaaccaagtcaagttcctctccaaccatctggtctccaagtacaatctgcagcacatccatctgctcctactcaagttggtaatcagcaatttgcgactcaagcaatggcgtatcaggtccagccacatgtacaagctcaacctccgcagcagcaacatattgttgcacatcaacaacatccacatatgcaagctttacccctacagcaaaatattcaacctaagatgcagctaaactctcaagttcagctacagcctccacatgtccagcagcaagcttacccacaatctcaggtctatcctcaacagacacatcatatgcactcccagaatactacatatgcacagcagcaaacccaaggtgctttgatgcaacctgtacatgtgtcccaccaacaaacacatgtttctcatcatcctgcaccgatgcgtcctccatcgtcaggccatcagccagctttgcagcatcctcaggcccagggaattcaacatacatcacaacatgaaaaacatattgggtttcatgctcagtggccaacaatgtattccaacattccttcccaagcaccaccacagggattgtctgtgcactcatctgtttcctcacaatcagttcaatcataccagcaaggaatgtcttcatcacaacagatgcattcccaacctggtcagccatatacacaacagcatgttactggcaatactggacaacatgttcaaacttctgctggcagacctatggcccatcttgcaccaacacagcaatttcagcagcaacatccagcaatgcttagaactgagtcacctgctgctgggcactctattgggcagggtcctttagatcttgaaaaacatacttcaaaatcagggaagttggataatgcaactattgctgctgtcggtgaaaataaaaatagtggtcctgagtcagttgtcatgagacctacaaagtcacaattgggtgatgaaaacatgaacagcgaacacaatggttttgttggtgttagaaaagatgcagtgcaaactggcattgtatcacacaatttagatggttcaattaggagggatgggaatactgaccaggcaggcaattcacatggcccacttgtgcagggaggcaaagatcacaaggcttcagatgcatctactgatcatgagaaaggacgactgtttcaacaggcatcactgcaaaatgcaggggcaccgggctcttatgtgcccccaggtgtggtaccacatccatctggaccagataaaatgcttcctcagcatatgacgaatcatggtcatatgcatggtttctctgaaaatatccgtcctccgctgcaacaaccatatggtgtgtttcattctggaacgataacaaggccatttggagagaaccagattcagatgccaatgccacagcctgggggtatcagacctggtgatggtatgattcgtccttgtttggttggcccattacctggacatcatggtgcagtgttgccttcttttgatcttgaacgtttgggtcagccacgtcctcttggaatgttgaacagcaatgactttggtggtgaggggttcaacgcttcagggggtgcagcgcctccatttgcaaaccacagaagtgcaggtttgcatgaggattttccaagaaagcaaaatgcaactgccagtcaccctgacttcctgtcacatggagcagaatttgatcatcacagggctattggaatgcctaatttcagaaatccaggcccatttgctcaagggacaagtggcggtcctggtggccctcctaaacaccagcttggctctggtgacatgcatccaggtgaccctcatcttgtcgctgaatatgctcagcatggatttcctaaaactgcagcacactttggtttgggtggattcttgagaaacgggaattctggttggtgccgaatatgcatgtttaactgtgggagtgcagagaatctggatttgcatgtacaaacaagggaacatcagcaatgtgcaatggacattgtcctgaaaatgaagcaagatgttgcaaaaaggcaaaaactgaattatggagggcccaagtcattcaacaacaaaaaggtttctgggaagggccattttcgtgggaacaggcgctagtgttaactgattaaaattgatgtggttttgaaggttgctactggtgcttatggatgtgtcaatggcaatcgagaattgagatcttttcagacattctgttcatgcggttcagcgtatttgaagggaaacttgctcatgctttttctaatggcgacctaataatagaccatgctggaacttttacaaagagacttgtaattgtgtcatcagacatccataacatgaaactgcaaagtgtaggataatttccagcagagggctcctgtcatacttgcatgtttccctaacgatggtaaggatgacatgctttcataatgctgataaaccaatcaaaagtaaaaaggagaggcgcgtgaagcctaacctacgaaggctacgagtatgaagtcgattatccaatgaagcctcacttacgaaagctatgggtgcaaagttacacatcctgtgaagccttgacgagaagaagaattgctccaagcccttaagaagtcaaagaaccttcactaggtgcatgtatgtgctcgtgaaggccagtcgatcatgaggacccgttaataccatggaatttggatgaaccattgtattttaagccaaaaggtgtttggtagcctttaaaaactctgtatataatactgtggtattatcgatactatggttattttggggtatagaaaactttggtccagaccaaagtttctttgctgtgcgcaatatctgttgagtatgcaagccatggaactggtaaaaaaactgttaagcaaagaataggaag

SEQ ID NO: 218288 - DNA, 4049 bp, Zea Mays
cgatcccggttgggaatggcctaaacgaacgaacaaggccactcggccccatccggcatccccgacccccgagcgtcttctttcgtctgctcgctctgcgctcgcatctaccatggagactagggtctagggtttagtgcgccgctgcctacatcgccgccatcctcaacttcctacgggatcctgacgaggcgccgtatcatcctcaacgccgcgaacctccgctcccacgttatcctcacgcccaccagtagctctcggcctctacctcgttaaggcttgatatttgactgggacactgggcaaattttaacaagtttcagcaatggggtttgataatgaatgcatcttgagtattcaatcccttcctggtgaatatttctgccctgtttgccggacacttgtatatccgaatgaggccctacaaactcaatgcacacatctctactgcaaatcctgcttggcatatgtagtggcaaccacacaagcttgtccttatgatggataccttgtaacagaagctgattccaagcctcttgtggaatcaaataaaacccttgctgagactattggcaaagtcgcggtctattgcctgtataataagagtggatgccaatggcatggagagctatctgcctgtgtcacacatggtactgcttgtgcatatgggaactctcctgttgtttgcaatcgttgtgggacacaaattgtgcatcgtcaagtgcaagaacatgctcaagtctgccatggcttacaatctcaaacacaacaagctgatggtagtcaggtgcagctggcaacggcaacaactcagccagtcatccaagattcatcacttgcctcagctggatctgctgcagctgcagctacaaccctaacaaagccatcttcaactacagccacagctgtaacagattctgcagcagcaacaggaggggcagctggtgcaaccacagcagctgtgccttcttcagcttcatctatttctgcttcccaaactccaacagctgagcagtggtaccagcagcagcagcagctccaatactcgcaatactaccagcagcagcaccctggatccaacccttacatgcagcaacatcaacaatatgaccaataccagcaggcatatcagcaatacatgcaacctccaatgcaagtaccatcccaaaatgtggtgcaaggatctgcacaacctgcttcttatgttcagcctcaagttcagtcctcccaggtgatgatgcaagcccaaagtcagccccaggtccatccattgacgagtcagccacagcttcaacagcatccagttcaaccccgaccccaaagtcaccctcatatttcccatgttcaagcaccttcaggtcagtcgcagcttcatcaaccaattcagtcagcccaagttccacaggtccaaccaagtcaagttcctctccaaccatctggtctccaagtacaatctgcagcacatccatctgctcctactcaagttggtaatcagcaatttgcgactcaagcaatggcgtatcaggtccagccacatgtacaagctcaacctccgcagcagcaacatattgttgcacatcaacaacatccacatatgcaagctttacccctacagcaaaatattcaacctaagatgcagctaaactctcaagttcagctacagcctccacatgtccagcagcaagcttacccacaatctcaggtctatcctcaacagacacatcatatgcactcccagaatactacatatgcacagcagcaaacccaaggtgctttgatgcaacctgtacatgtgtcccaccaacaaacacatgtttctcatcatcctgcaccgatgcgtcctccatcgtcaggccatcagccagctttgcagcatcctcaggcccagggaattcaacatacatcacaacatgaaaaacatattgggtttcatgctcagtggccaacaatgtattccaacattccttcccaagcaccaccacagggattgtctgtgcactcatctgtttcctcacaatcagttcaatcataccagcaaggaatgtcttcatcacaacagatgcattcccaacctggtcagccatatacacaacagcatgttactggcaatactggacaacatgttcaaacttctgctggcagacctatggcccatcttgcaccaacacagcaatttcagcagcaacatccagcaatgcttagaactgagtcacctgctgctgggcactctattgggcagggtcctttagatcttgaaaaacatacttcaaaatcagggaagttggataatgcaactattgctgctgtcggtgaaaataaaaatagtggtcctgagtcagttgtcatgagacctacaaagtcacaattgggtgatgaaaacatgaacagcgaacacaatggttttgttggtgttagaaaagatgcagtgcaaactggcattgtatcacacaatttagatggttcaattaggagggatgggaatactgaccaggcaggcaattcacatggcccacttgtgcagggaggcaaagatcacaaggcttcagatgcatctactgatcatgagaaaggacgactgtttcaacaggcatcactgcaaaatgcaggggcaccgggctcttatgtgcccccaggtgtggtaccacatccatctggaccagataaaatgcttcctcagcatatgacgaatcatggtcatatgcatggtttctctgaaaatatccgtcctccgctgcaacaaccatatggtgtgtttcattctggaacgataacaaggccatttggagagaaccagattcagatgccaatgccacagcctgggggtatcagacctggtgatggtatgattcgtccttgtttggttggcccattacctggacatcatggtgcagtgttgccttcttttgatcttgaacgtttgggtcagccacgtcctcttggaatgttgaacagcaatgactttggtggtgaggggttcaacgcttcagggggtgcagcgtatcctgaaagacatgataataccgaagacagtcggaaacattttccagcaccagcccctctagatgatcagggcttgcgaagggaccctagacattttgagagagctttaggtagacctgatggtttccttgattcagtacctggaaggcctccatttgcaaaccacagaagtgcaggtttgcatgaggattttccaagaaagcaaaatgcaactgccagtcaccctgacttcctgtcacatggagcagaatttgatcatcacagggctattggaatgcctaatttcagaaatccaggcccatttgctcaagggacaagtggcggtcctggtggccctcctaaacaccagcttggctctggtaaccttcctgggaatttacattcttttgagggtgacatgcatccaggtgaccctcatcttgtcgctgaatatgctcagcatggatttcctaaaactgcagcacactttggtttgggtggattcttgagaaacgggaattctggttggtgccgaatatgcatgtttaactgtgggagtgcagagaatctggatttgcatgtacaaacaagggaacatcagcaatgtgcaatggacattgtcctgaaaatgaagcaagatgttgcaaaaaggcaaaaactgaattatggagggcccaagtcattcaacaacaaaaaggtttctgggaagggccattttcgtgggaacaggcgctagtgttaactgattaaaattgatgtggttttgaaggttgctactggtgcttatggatgtgtcaatggcaatcgagaattgagatcttttcagacattctgttcatgcggttcagcgtatttgaagggaaacttaaactgcaaagtgtaggataatttccagcagagggctcctgtcatacttgcatgtttccctaacgatggtaaggatgacatgctttcataatgctgttaaattattctaaaattagaacggctttatttttggggcggaggaattcattggttcatattggggatttttaggtaaatgtgtctattggtaaattggagttaag

SEQ ID NO: 218289 - DNA, 4447 bp, Zea Mays
cgatcccggttgggaatggcctaaacgaacgaacaaggccactcggccccatccggcatccccgacccccgagcgtcttctttcgtctgctcgctctgcgctcgcatctaccatggagactagggtctagggtttagtgcgccgctgcctacatcgccgccatcctcaacttcctacgggatcctgacgaggcgccgtatcatcctcaacgccgcgaacctccgctcccacgttatcctcacgcccaccagtagctctcggcctctacctcgttaaggcttgatatttgactgggacactgggcaaattttaacaagtttcagcaatggggtttgataatgaatgcatcttgagtattcaatcccttcctggtgaatatttctgccctgtttgccggacacttgtatatccgaatgaggccctacaaactcaatgcacacatctctactgcaaatcctgcttggcatatgtagtggcaaccacacaagcttgtccttatgatggataccttgtaacagaagctgattccaagcctcttgtggaatcaaataaaacccttgctgagactattggcaaagtcgcggtctattgcctgtataataagagtggatgccaatggcatggagagctatctgcctgtgtcacacatggtactgcttgtgcatatgggaactctcctgttgtttgcaatcgttgtgggacacaaattgtgcatcgtcaagtgcaagaacatgctcaagtctgccatggcttacaatctcaaacacaacaagctgatggtagtcaggtgcagctggcaacggcaacaactcagccagtcatccaagattcatcacttgcctcagctggatctgctgcagctgcagctacaaccctaacaaagccatcttcaactacagccacagctgtaacagattctgcagcagcaacaggaggggcagctggtgcaaccacagcagctgtgccttcttcagcttcatctatttctgcttcccaaactccaacagctgagcagtggtaccagcagcagcagcagctccaatactcgcaatactaccagcagcagcaccctggatccaacccttacatgcagcaacatcaacaatatgaccaataccagcaggcatatcagcaatacatgcaacctccaatgcaagtaccatcccaaaatgtggtgcaaggatctgcacaacctgcttcttatgttcagcctcaagttcagtcctcccaggtgatgatgcaagcccaaagtcagccccaggtccatccattgacgagtcagccacagcttcaacagcatccagttcaaccccgaccccaaagtcaccctcatatttcccatgttcaagcaccttcaggtcagtcgcagcttcatcaaccaattcagtcagcccaagttccacaggtccaaccaagtcaagttcctctccaaccatctggtctccaagtacaatctgcagcacatccatctgctcctactcaagttggtaatcagcaatttgcgactcaagcaatggcgtatcaggtccagccacatgtacaagctcaacctccgcagcagcaacatattgttgcacatcaacaacatccacatatgcaagctttacccctacagcaaaatattcaacctaagatgcagctaaactctcaagttcagctacagcctccacatgtccagcagcaagcttacccacaatctcaggtctatcctcaacagacacatcatatgcactcccagaatactacatatgcacagcagcaaacccaaggtgctttgatgcaacctgtacatgtgtcccaccaacaaacacatgtttctcatcatcctgcaccgatgcgtcctccatcgtcaggccatcagccagctttgcagcatcctcaggcccagggaattcaacatacatcacaacatgaaaaacatattgggtttcatgctcagtggccaacaatgtattccaacattccttcccaagcaccaccacagggattgtctgtgcactcatctgtttcctcacaatcagttcaatcataccagcaaggaatgtcttcatcacaacagatgcattcccaacctggtcagccatatacacaacagcatgttactggcaatactggacaacatgttcaaacttctgctggcagacctatggcccatcttgcaccaacacagcaatttcagcagcaacatccagcaatgcttagaactgagtcacctgctgctgggcactctattgggcagggtcctttagatcttgaaaaacatacttcaaaatcagggaagttggataatgcaactattgctgctgtcggtgaaaataaaaatagtggtcctgagtcagttgtcatgagacctacaaagtcacaattgggtgatgaaaacatgaacagcgaacacaatggttttgttggtgttagaaaagatgcagtgcaaactggcattgtatcacacaatttagatggttcaattaggagggatgggaatactgaccaggcaggcaattcacatggcccacttgtgcagggaggcaaagatcacaaggcttcagatgcatctactgatcatgagaaaggacgactgtttcaacaggcatcactgcaaaatgcaggggcaccgggctcttatgtgcccccaggtgtggtaccacatccatctggaccagataaaatgcttcctcagcatatgacgaatcatggtcatatgcatggtttctctgaaaatatccgtcctccgctgcaacaaccatatggtgtgtttcattctggaacgataacaaggccatttggagagaaccagattcagatgccaatgccacagcctgggggtatcagacctggtgatggtatgattcgtccttgtttggttggcccattacctggacatcatggtgcagtgttgccttcttttgatcttgaacgtttgggtcagccacgtcctcttggaatgttgaacagcaatgactttggtggtgaggggttcaacgcttcagggggtgcagcgtatcctgaaagacatgataataccgaagacagtcggaaacattttccagcaccagcccctctagatgatcagggcttgcgaagggaccctagacattttgagagagctttaggtagacctgatggtttccttgattcagtacctggaaggcctccatttgcaaaccacagaagtgcaggtttgcatgaggattttccaagaaagcaaaatgcaactgccagtcaccctgacttcctgtcacatggagcagaatttgatcatcacagggctattggaatgcctaatttcagaaatccaggcccatttgctcaagggacaagtggcggtcctggtggccctcctaaacaccagcttggctctggtgacatgcatccaggtgaccctcatcttgtcgctgaatatgctcagcatggatttcctaaaactgcagcacactttggtttgggtggattcttgagaaacgggaattctggttggtgccgaatatgcatgtttaactgtgggagtgcagagaatctggatttgcatgtacaaacaagggaacatcagcaatgtgcaatggacattgtcctgaaaatgaagcaagatgttgcaaaaaggcaaaaactgaattatggagggcccaagtcattcaacaacaaaaaggtttctgggaagggccattttcgtgggaacaggcgctagtgttaactgattaaaattgatgtggttttgaaggttgctactggtgcttatggatgtgtcaatggcaatcgagaattgagatcttttcagacattctgttcatgcggttcagcgtatttgaagggaaacttgtaatggtcccaaacttttgttccatgttgatctgcagagttcacatggctatgtttacttcacgtatttttgccgaagttgttctgggattgcttaacatgctaatatccttcttctgtacgtgctgatttataactcctgtttctttcaactaggctcatgctttttctaatggcgacctaataatagaccatgctggaacttttacaaagagacttgtaattgtgtcatcagacatccataacatgaaactgcaaagtgtaggataatttccagcagagggctcctgtcatacttgcatgtttccctaacgatggtaaggatgacatgctttcataatgctgatggtggatgtgcatgggtgctgactactgtttgaacgaactggccacgccttggctctcattttctgccagcatcggatgtttttgactgaccccagggcaccttatatctattgttgtgagggttaaattgtaaaatttctggcccgtggttcattccttaccaactaatgcactcaggtgtaaaagaaaattcctgtaatgtatacacaaacatttatatacaattttgcactgtaaatatactaatattagtttcaatggagtgcacccacaaattaatgtacct

SEQ ID NO: 218290 - DNA, 962 bp, Zea Mays
attggttttcaggagagaataatcaaagtactcgtctttcactctaacatgaagctagaaaccgaccacattgactatgataggatccttaattagcgttgggttagggtcttaggtagaatctttactactattaagaacacaaggggtaggctgtcattcctggttctgccattcccattcccaactcctgtgtgttttcattcccattcccaactcctatgtgtttgcattcccattcctaactgtgtcccgcgcatgcgttggaaaaagttgcctcctgttacggttttcagatggatcattcaccactagcttcattaccactattggcattgacttcaagataagaactgttgagttggatggcaaaaggattaagttgcagatctgggatactgcaggccaagaacgtttccgcacaattaccactgcctactacaggggagcaatgggcatcttacttgtgtatgatgtcacagacgagtcatctttcaataacataagaaattggatcagaaacattgaacagcatgcttcggataatgtgaacaaaattctggtggggaataaagctgatatggatgaaagcaaacggagcgcaaagacaaacctgaacgtcgagcaggttttcttttctatagcaagggatatcaaacagagactttcagagactgattccaagcctgaggatcgaactatcaagatcaaggctgaaggggaagctgatgcagcagaggcgcagaaatcagcttgctgcggctcttgaacggttgtggccgcaggatagtttcataatttttattctttgccagcaagtctctccttgttcttgagctatcacaattgttgtggtttggacaagtgggtgttacgtcagaactaattacttgctatattgcggaaaccctgctcttgataacgacgatcgcatatgcaactgggcgggtgggtggtttgat

SEQ ID NO: 218291 - DNA, 3042 bp, Zea Mays
gggttttaggcggttttgttgggggcattaggaggtgggtttgatacctgcctgggggatctgtttctgattcggttctggagtaaggatttgatccagtgaaggaaaggttgctctggccactgatggccggtgacattacttgcggatccttgctgcaaaaattgcagttgatatgggatgaagttggcgagagtgatgaggatcgtgacaaggtcctttatcagctggatcaggaatgccttgatgtttacaagaggaaagttgaccaagcaactaactctagggatctcctgatccaggctctggatgactcaaagatagaacttgctaggcttctttctggtcttggagaaaaagctattgcaagaacccctgagaagacaacaggaacaatcaagcagcagctagctgctatagcgccaacacttgagcagttgactaaacagaaaaatgaaagaagaagagagtttgttaatgtacaatcacaaattgatcaaatatgtggtgaaatcgctggcaccatagaggtgggtgaacaggtgacaacaccccaagtcaatgaggatgatttgacacttgagaggcttgaagattttcggtctcaactccaggagcttgagaaagagaagcttcaagaactcgctggtcagctctatgatctttgggatctcatggatgcccccaaggaagaaaggcgcatgtttgatcatgtgacctgcaacagatcagcatctgtggatgaagtcacagcacctggatctcttgctctagatttaattgaacaagctgaggttgaggttcaaaggttagaccagctgaagtacagcaagatgaaagaaatagctttcaagaagcaaaatgagctggaagatatctacgctggtgctcatattgtaatagacacagctgctgctcatgagaaaatattggcactgattgaggcaggtaacatagaaccatcagaactaattgcagatatggatgcccagatagcaaaagcaaaggaagaagcattgagtagaaaagatatccttgataaagtagaaagatggatgtctgcgtgtgaagaagaaagctggcttgaagattataaccgggatgacaacaggtataactctagccgaggtgcccacctgaatctgaagcgtgcagaaaaagctcgtatccttgttaacaagattccagcacttgttgaaactctagtggcaaagaccagggcatgggaggagaaccgtggtctgtcttttatgtatgatggtgtacctcttctagctatgttggatgagtatgttatgctcaggcaggaaagggaagaagagaagaaaagaacgcgggaacaaaagcgctacgttgagcagcaattgaacactgatcatgaagggccattcggatcgcgagtgagtccaaaccggcctgccagttcgaagaaggccattggcccaaagttgaatggcagcgtctcaaacggcactcctccaaacagaaggctctcaatcagtggccaacagaacggtggtggccatggcgtcaggtctggagggaaggatagcaagaaagacacggcgaagacagcatctcctgggaacagtgcagctgcaactgcacctgtgggtttgacagcaacagccaaagaagacgccgcctcccaaatttctgtcaccgatctggttccgagcacaccatgatctttaacctagcatcatatattagatataagtggacctttttctgttgttctattgttttctggtaatatattgtaatggcttcgtagagtaattatgatccccttcagctgctttggcacatcctggtgtaattcttgtttagttcccctaggcggtgctgtttcgacttgtcagacggtgtagtatagtcttactgagatgtattgtcattaatcagtgtgctggacgtataagctgttaaaaccttttctgttcccgtccttgagttttgcatctatgtgagcgtagcgtacttccaatattctctggaaactggattggcacagcgtacttccagtattatctggacactggattgcgcgtttcatttctgtagattcagttcactgattgcttccacaaggctgctatctaaagtattaaaaccattgggattctcagcccctagaggcgacatttcaatctacacacatgtgaattgaggtcaatactagattatctaaacagacgggaagcggcaacgtcacttgaaaaacagaactgtcaatgcgactggattggcctcgtgcaggtgagatttctgccattatgaaacgtgacacatttggcttccacaaaacagaggcacagatttacagaactgtcaatgcgactggattggcctcgtgcaggtgagatttctgccattatgaaacgtgacacatttggcttccacgaaacagaggcacagacgagtgcttcgatgatttagagatccacacaaaacgcacgcgccggtatggacttgagctctttcttaggtgcgttcgacagtgattaattctccgtcgtgaggattagtcggggcggccaccgctctcgtcttcagcgccgtcactgctcaggtcgcccccgtgagtgactcttgtagccttctctcccttcttgacccagcgcgctgctcgaaaccacagagctcggctaggtgttgagcaggggcagaggcagctgggacaatgcgagaggacagcgcgaccaccatcatggcaatcagctgctgctccgcgtcgtcgtgctggttggccgcacgcttcagggcggccagatggctggccgccgtgtcatggttgttgtccgagatagcgaccgcggcttcagacaatagttgcctcgacgcggccccggggtcggcggcgagcaggacgcggatgaagacgcaacggaggagtttgaaggtgaccagagctagacccggggacaaccagaggctgctgagacgggatccctcccagcaaggcggcgatatcaactaccacagtggtgccctgcctcacggcgcgcaggtacatcgcctgctgcgccgccacgtgct

SEQ ID NO: 218292 - DNA, 1668 bp, Zea Mays
gttattatgccaaaccaattgatacatataattgctaaactgaacgctcgtctgctgcgaaactgaacgctgagcgcgttcatacggagaggatctttcggcgtcaattctatcggttccggaggagtcagaccgatcgggacgatggggcgcttcgtcttcgtcctgctaatcctgatgtgctgttcctcctcccgattcacaggtgcctacgaccccatagatccgaacgggaacatcacgatcgtctgggattttcagagtctcgacgtcgcgggcatgaccccgtacacggtcatggtgagcatccacaactaccagatgtaccgacacatcgagcgtccggggtggcggctgagctggagctgggccggcaaggaggtcatctggagcacgacgggcgcggagacgacggagcagggcgactgctcccgcgtcggcagcgggggcagccgcccgcattgctgccagaagcggcccgtcatggtggacctgccgcctggcacgccgtacaacatgcaggtcgccaactgctgccggggcggcgtgctgtcgtctctcgtccagagcgacctgacgtccgccgccgcgttccagatggtggtcggcgagttcgccctcgccagggacagcggcggcaaggagcccgagaagccgtggcagttcgacatgggcgtgccggggtacacctgcagcaacgcgaccacggtggccccgaccaggatcaaggtcgacaagaaccgctacgtccaggcgctcctgacatggcaggtgacctgctcgtactcgcagtaccgggcgtcggcggcgccgtcgtgctgcgtctccatgacgaccttctacagcgagacgatcgtagattgcccgcggtgcagctgcggctgccaagggtccccaccgtcgccacaatgcgtcagcgtcgatcaacaacaaccatggttgccggccgtcggcgacgacgagccgtcgtcggcgccgatcgtctggtgctccgagcacatgtgcccgatccgggtgcactggcacgtgaagacgaactaccgcaagtactggcgggtgaaggtgacggtgtccaactacaacctggcgaggaactacagcgactggaacctggtgctgcagcaccccaacctgcggagcctgacgcagctgttcagcttcaactacaggcctctcgtcgagtacggcgcctacaacgacacggggatgttctgggggttacgttactacaacgagatgctgctgcaggacgggaacgtgcagtcggagatgatcctggagaaggagagcgacttcacctattccggtggctgggcgttcccgcggagggtctacttcaacggccaagagtgcgtcatgccgccggcggaccagtaccccgtactgcccaacggagcctcggctttgcgggggcatttttgcttcctgctgctactcttcttcgttgtggtgtagactcgtttgcttcagaaacttgctagctagcaaggctgtccgcataaatagcgtttatacgttttaacatttgggtttttttttcttgaaattaattcctgtacatagtattgtttctctttgttttaaatcgttactcgtctctccatgtgttctccccatgggttctcatgatatcatcagcacgaagtccataggatatactattattat

SEQ ID NO: 218293 - DNA, 2420 bp, Zea Mays
ccccgacgaaatggctgaaaatttgaaatccgtctcgctcctcgccgccgcacgcccgcaccgcaccatgctgcatctccttctgctgtcatgctgtgtgtagtgtgtaccacgaaacacaactccaatccagaatccacgcctcccaaagctctcctactctcaaacaccaccatagcatcggttcgccattaaaccggtcacctcgcctccctggcgctgcccctcttcctctccaccgcgttcgaatcccatgggtctctgtttcagcaagaagcagcaagagaagcgccgagacgtgcagccatccagtgacgccaagaagagcggatgccggaaatccggcagggacaccgtgcttgtcgccgatgccaagaaggctcctcaggcaaaggcgccagcacttcccaagaaggctgtagccaggccggaggaggcaacagctgacaagaggaccgtgttcgtcgtcaaggccgcggcagcggcggcggccgccgaggttgcggccgccgcgaagggaagacccgaggatgcgcaggcgaagagggcggcgccggaggaggagctgaggcccggcgctgtgggccgggcgccagtgcggacgtcgagctgcaccaaggaggagttggacgcgatcctgatccagtgcggccgcctcagccgtagctcgtcgtcgtccgggaaggcgccgtcgggcgagcaccggaggtacgccggatccaagcggagctacgacttcgaccacgagaggaggggcggtggcggcgacgtcgacgaatgcgattggggcagggagggggccgcggtggccaggccctcaccgcgccggaggtcgccagaacggaagcgctcgtcgagccacgatggccgtgctggcagcgggagcgggagccagagccggaggattagcaggtcaccggggcggcgagcggacgtcgttcccgccccggggagctccgcgaccggcgagcgaggcgcgaggcagcagccgggcaagatggtgtcggtcccggccagggagaaggggcgcgcgccgtcgcccgtgaaggctgcttcgtctggcaagaggtacccatcaccaaggtcaaactcgcccgcgagggcagcggcctcgggtaatgagaatgccggggtgcagtcgacgcacggtccctcgctgagccgcagcacctctaggaaggccgagcagtcgccgttccgtcgcaaccccatggcggaactcgacgagaacacgctcggcaaccaccaccaccataacagcaacggcaggcctctaaagaccgcggagcggacaaaggatcagatctccagctgccgaactgcgaaggagattgcggatgaggccgtggcttcggacaccaaagcagcgcctgcaaggatgaacgcgacccactcggtgagcattgtggccgagaacgtcaccaatccgaggccggggagccggtcgtcgaggcgctcctcacgcgacttcgagcacaatggcaacacctacgcatccctgttactggaggacatccagaaccagcagcagcagagcaccagcgctgccactgtcgctgcagcgccgaccttcgcgcttccggcgtgtgtgtcgaaggcctgctctatccttgaagcggtcgccgacctcaactcctcgtcgtccgagaacaagaacttcgagctggagaggtcggtcaacgataaggaatccgtcaacggcaggtacggcggaaagggtgcggtcaccctcgtgatggagtcggaggtcggcgtgaaggacgatctcatggagccgagcatgcacaagtacgtctcggtgcgtgacattcgtggggagaccgagccgcaggagtcagcagggagcaacagctttgccggcaacgcctggacgtgctcgtgggagcccaattccgtcgactccgcagaccggacctggacggcctcgcagtcgtacaacggcgacgaggtggagcagtcatggcagagcaagcagaagccgtcgtcatccaaggagcccagccacgttggttctactagcgatgttcaggtccagcgcgtgcggggtgctcaccgcctccgcggcagcagcagtgctgtcaacggccagtccgatgttcggggtgtctcggcgagttcgtcgatcgcttaaggatgcaactggaggttttaggagtcatatgctccagttggtcacggtatcaagctgttgtggcaagataggttgctgtttcagactagtgtttaagcgtttggattctttgcttagtttgatgatatactctcctcgttctttttttatttatcacgttttagttaaaaataaactaacgaaaacgaagacagtacattgtttagatgtgatcaagcagtgatattggcaatgtatactcttccgttcacttgctaatgcttagcgtcagcaaacatatctgcacgta

SEQ ID NO: 218294 - DNA, 737 bp, Zea Mays
cccgtggaagcgctcccggccacccgaggtcgggcaagcttccctagtttggaagggacacgagcggatccgagcgaagcgaccgcgcgtccgcgccctccgtcgccaccaccatccgctccgccgccgctccatcgtcgtccacattgctgccatccgctctgccgctactccatcgtcgtccttccccgaagcagtcgtgagcgagacgtgaggcgacggtgccctccaccaccgccaccgtctcggatttgtcgtcattcaccgccatctctgcctcagtttgctgtcctccaccaccgtcttccgcggcactatgtacaatacaatgttgtctccaagacccagtacatggtcttctccaagatccagtacaagatcgtctcctccaagatttgaaccccaacgctagtgagaggaagttgctggtttcagtttggggcacagtttttggatcaagtggaggcaacacatgaaaccaacatggagaagaaaaatgaaatggcattccacatgaagcttgtgaaaaagagttaaactcgtaatttattctagtgcagaagttcctaaccaagagatttgtattccattttttatattatattgtctatctatatgtgtgaataaaggtgaccttatatgatgtgatgatgtatgaattagcttcaatggatattatatggtattcaaattaaactttacatgaattatatgtggtgcattatttttggatgttt

SEQ ID NO: 218295 - DNA, 1129 bp, Zea Mays
ttgctgtcggtcccctgaactgagatcgatgcttcgagtgcaagaaaattatgctgccggtcgctaagctaggttgttgttgttggatcggcacgcaccggtagcgggtggagagcttcatcgagcaccaggacgcgtgcaactccagccggatgcgcggcgaggcggtggtggtggccgtgcccgtgcccgtgccgccgccgtcggcgctcccggtcatccgtcccgccgtcccgcggcatccgcccacggtggcagtagcaccgccgccgccgccggtgctccagctcctccccgcctccgcggcggcatcagcgccgcggactagtagcgccacgacgaccgcctctccgtccaccaccacaaccgcgtcccaccaccaagcaaaaccccacgcggcgacaacaacaaagctgcagctctccatcggccccatcgtcacggctgcggcggcggcggccgtcgactgcggcgaggacgagtccgaggcggaggagctgcggcgcgcggtggaggagaaggccgcggcggacgcggcgcgggagcgggcgcgcggggaggccgcggcggcggagcgcgcgctggacgaggcccgccgcgccaggcagcgtgcccgggccgacctcgagaaggcgtgcgcgctgcgggaccacgccgctcgcctgctcgggcaggtcacctgccacgcgtgccgccaccgctcgctcgccgtcgccgtggtcaggggtgccgccgagggccacgccgccggccccgcggtggcctgcgactccatcaggggaggaggcttaggagcaggcatctagctagctccaccactcgtgcatgccattgccatgcatagttcatgtgtgtagatcaagctaagctaattcgtaggccggacttgtgcatagtgtcgtgtggcgattactgcttgcaaccacgcacccactttggtttctagggtgctacaacttgcaactttggcctggtaaaggtatggtgaatgagatcatgcacgttaaaaacggagtgtgtattggatatgttctcacacttggtaagggaatgaatctaaaacactcggtaaaggtacagaagtaggtattgactttcttaagtatttgtcctttgattttcctctagt

SEQ ID NO: 218296 - DNA, 5519 bp, Zea Mays
aaatcataatcctggttgggtgtatattatatagaggagttagatggatcaagcccattacaatagtgaaagacagtgttgcgaatcaaagggagcacttgattttgctccttgcaaacattgacatgagacaacagggtactgccgatcatagtgagagacatgttcacatgatacgtagtagcacagtgatatatttgaggaacaaaattttccataattataactcctggtgtcgatacttacatctggagtcaaacattaggatccaaagggatgcccccacacaacagccagagcttctgtacataggactgtatttactgatatggggtgaagcttccaatgttcgcttcatgcctgaatgtctttgctacatctttcaccatatggcaagagatttacatgacataatatctgatacaagccaaggatcatttgagccaccgttccagggagaggggagtgacgatgcatttctgcagctagtgatccaacccatctatagtgttatgcagaaggaagctgcaaggagcaaacgtggtaaggtgagccactcattgtggagaaactacgacgacttgaatgaatatttttggtcaaaaaaatgcttcaaaaaacttggatggccgatggatccaacagctgacttttttgcagaacctaccagagccaagaatgaaactgagcaacatggtcacgtgattaggagaagaagggcatcaaaaacaaattttgttgaagttcgtacatttttgcatatgttcagaagttttgatcgtatgtgggccttctttatattggggttccaggccatggtaatcattgcctggagcccttctgggtcactttcttctatatttgaaccaaatgttttcaaaaatgtattgacaatctttataacagcggcatttctgaacttccttcaagccacgctagagttaattctcaactggaaagcttggaagagcctggagtgctcacaaaggataagatatatcctaaaatttgctgtagctgttgcctggttgataattcttcctactacgtactcaagctctattcaaaatcccacaggccttgtgaagtttctcagcaattggattcaaaatttgcagaatgaatcaatttataattatgctgttgccctttacatgttaccaaacatattcagtgccctgtttttcatgtttctaccaattcgacgggccttagagcgctcaaattctcgcattattaggttccttttatggtggacacagccaaagttatatgttgctcgaggcatgtatgaagacacttgctcacttcttaagtatactacgttctggatcctgctgcttatatgcaagctcgccttcagttattatgttgagattgctcctttagttgaacctaccaggataatcatgtcactggaaaggccgccttatgagtggcatgagttcttcccaaacttgcggcataatttaggtgttgtggttactgtatgggctccaattgtcatggtgtacttcatggacacacaaatatggtatgccattttctccacaatatgtggtggagtctatggtgcattcagccgcttgggtgagatacgaacccttgggatgttgagatcaagatttgaggcaattccaagagcatttggcaaaaaacttgtacctgatcatggcagtcacttgaaaggagatgaggaggacaaaaacccacccttcgataagtttgctgacatatggaatgcatttattaattcattgcgagaagaggacttactaaacaatagggagaaagatctattggttgttccttcatctggtggtcaaacaagtgtttttcagtggcctcctttccttcttgccagtaagattccaattgcacttgacatggcaaagagtgtcaagaaaaaagatgatgaacttatgaagaggataaagcaggatccttatactgagtatgctgtaatagaatgctacgatacattattagatatcctttacagcattattgttgtacaaagtgataagaaagttgttgatagaatacgtgaaagcatcaaagatagcatccaccggaaatcactcgtgaaagaattccgattggatgaacttcctcaactaagtgctaagtttgataagttgctaaatctactgaaggaatatgatgagaacgatcctgtaaatagaaacacacatattgccaatctgttgcaggatataatggaaatcatcacacaggatattatgaaaaatggaaaaggtatcttgaaggacgagggccaaaaacaacaactgtttgcaaaattaaatctggattcattgaagcatgttgcttggagggagaagtgcattaggcttcaattgttgttgacaacaaaggaatctgccatatatgtaccaacgaacttggaagctcggcgtaggatcaccttttttgcaaactcactttttatgagaatgccaagggcaccacctgtccgtagcatgatgtccttcagtgttttaactccatacttcaaagaggaggtgctcttttcaccagaagatcttcataggaaaaatgaggatggtatatcaatactgttctacctacggaaaatatatccagatgaatttaggaacttccttcagcggatagattttgaagtgaaggatgaagaagaacttaaagataagatggatgagatctgtaattgggcgtcttataggggtcaaactctcaccagaacagtaagaggaatgatgtactacagaaaggcacttgaaatccaatgccttcaagatatgacagatcctgctaaagttgaccgagacagatcaataggatcctaccaagagttgcaatatgatattgaaatggcacaagctattgctgatatcaaattcacttatgttgtctcatgtcaagtttatggcatgcaaaagaaatcaaaggatttaaatgaaaaaaggcgctatcagaatatcctcaatctcatgataatgaacccatcactacgagttgctttcattgaggagatcgaaggtctaaccagaaatggagcaactgagaagacatattgttccgttcttgtcaaaggtggtgaaaagtatgatgaggaaatttaccgcataaagcttcctggcaatccaacagatattggagagggaaaacctgaaaaccaaaatcatgccataatcttcaccaggggagaagcacttcaggccattgatatgaatcaggataattatattgaggaggcgtttaaaatgagaaatgtgctggaggagtttgagagtagaaagtatgggaagagcaaacccactatattaggcttacgtgagcacatttttactggaagtgtttcgtcgctggcttggtttatgtccaatcaagagaccagttttgttactattgggcaaagagttctggcaaatcctctcaaggttcggttccattatggccacccagatatttttgatagactcttccatatcaccagaggaggcataagtaaagcttcaaagactataaatctgagtgaagatatattttcaggttttaattcaaccatgagaggaggaaatgttacacatcacgaatacatgcaagttggtaaggggcgtgatgtggggatgaatcagatttctagcttcgaagctaaggtggccaacggtaacggtgaacaaacattaagtcgtgacatttatcggcttggacgcagatttgacttctacagaatgttatctttctattttactacagttgggttctattttagtagcatggttactgtacttactgtctatgtgtttttatatgggaggctttatctggttatgagtggtctggaaaagtctattatgctggatccacgaaatcagcagaatgtcaaggctctcgaaaatgcactggcttcacagtctattttccagctaggtctgctgcttgtcctccctatggtcatggaagttggcttagagaaagggttccgcacagcattaggagagtttgtaatcatgcagcttcagttggcatctgtgttcttcacattccagcttggcaccaaaacccactactatgggagaacaatactccatggtggtgcaaaatacagaccaacaggtcgtggattcgttgtgtaccatgcaaagtttgctgaaaattaccgtatgtactcccgtagccactttgttaaaggactggaactcttgatacttttggttgtatatctagtctatggaagttcctatcgcagctcaaacatatacctatttgtcacctgctccatatggttccttgttgcttcatggctcttcgcgccatttatcttcaatccatcatgctttgaatggcagaagactgttgaggactggacagattggaggaagtggatggataacagagggggaattggcatgtctgtggaacaaagctgggaagcctggtgggtaactgagcaagatcacctcaggaagactagcatccgagcttttgtgttggaaatcatcctttcacttcgatttttgatctaccagtatggcattgtctaccatctgaacatagcagatcaccacaaaagcattatggtatatggagtatcatgggtggttatgctccttgttcttgtagtgctgaagatggtttcaatagggcggcagaaatttggaacagacctacagcttatgttccgcattctcaagggccttctcttccttggttttgtctctgtgatggcagtcctatttgtcgtcttacaccttactatttctgatgtcttcgctagtatccttggatacttgcctactggatggtgtcttcttctgattggacaagcatgctcaccattgattaggaggaccctgctgtgggactccatcatggagctcggaaggtcatacgagaatataatgggtctcgtcctcttcctgccaattggtttcctgtcgtggttccccttcgtctctgaattccagacacggctgctgtttaaccaggcatttagccggggcctccagatctcaaggatccttgctggtcagaaggatgttagcgagttcgagttcaagtgaccaatttcatccctcttgcaagcaaaccaaactcactttcatgtatttgtttacgatgatcgattttgggtgtctgtactctagtatattttcatcacgtttactactataatactgtctgtacttgagaatgttttgcctctgtaaactgacatgtagaatttctgtaatatatttatggaatttgataacttccatccatgcactgaacgctttgaatggaccattattactaaaggggtaacaaatttatcattgtaaggtcaaacatgtttgggctggaagttttgctattcaatactccaaacatgtttgtaagtgttagatactcatttaaggtttggggttttctcactgtaattacctttgcacccatttgtaatgggtctagctcacttaactcaaatttattaatacaatgcacaaccctaatccaaggttagggtttctatacggtatagagctagg

SEQ ID NO: 218297 - DNA, 6335 bp, Zea Mays
cctcgagccctcctcctgcctggctgcctccctcttaaaacgaagatgccttccccagctcccctctcttgcccaccttgcttcctcgccaccaccactttccccaccgctgcggcactagtcagtcagcaccagcaccttcgtcaccctgcgcttgtgcgcggcaacaccaacgcgcgccgtcgggatcggcggcaccgctggaaatggcgagcgccggcgccggcccgtcggggccggtgcggtccatatcccaaacggggcggtcgcggacgatggggcgtatgcccacgcgcgccttcaccatacgtccggacggatcctccggtgaggacggcgtcgatatcgtggaggaggagctcgtgccctcgtcgctcgcgcccattgtacccatcctccgcgccgccaacgagatcgaggaggagaacccgcgcgtcgcctacctatgtcgctttactgctttcgagaaggctcatcatatggaccaaaactcaagtggacgaggtgttcggcaattcaaaacatacctcttgcataggcttgaaaaggatgaacatgagacaaagcgcagtcttgctacaactgatgcaagggagatacagaagttctatgcgcagtactgcagaaaatatctagaacaagatcatgataagaggaaaccggaagagatggctagatactatcagattgcgtccgtcctatatgatgttatgaaaactgttacacctggcaaaaatgagtatgatgattatgctaaagatattgaaaacgaaaaagcatccttttcacagtacaatattctaccccttaatatttctgctcgagaacaaccaataatgaaaattcctgagatcaaagcagcagtgaagctccttgagcagataaatggccttccaatgccaaggattgaattaccacaaagctctgacagaaaaacagtgtccgacaaaatggacagacctgtggttaaggatttgcttgattggcttcggcaaacatttggatttcagaaagacagtgttgcgaatcaaagggagcacttgattttgctccttgcaaacattgacatgagacaacagggtactgccgatcatagtgagagacatgttcacatgatacgtagtagcacagtgatatatttgaggaacaaaattttccataattataactcctggtgtcgatacttacatctggagtcaaacattaggatccaaagggatgcccccacacaacagccagagcttctgtacataggactgtatttactgatatggggtgaagcttccaatgttcgcttcatgcctgaatgtctttgctacatctttcaccatatggcaagagatttacatgacataatatctgatacaagccaaggatcatttgagccaccgttccagggagaggggagtgacgatgcatttctgcagctagtgatccaacccatctatagtgttatgcagaaggtcaaaaaaatgcttcaaaaaacttggatggccgatggatccaacagctgacttttttgcagaacctaccagagccaagaatgaaactgagcaacatggtcacgtgattaggagaagaagggcatcaaaaacaaattttgttgaagttcgtacatttttgcatatgttcagaagttttgatcgtatgtgggccttctttatattggggttccaggccatggtaatcattgcctggagcccttctgggtcactttcttctatatttgaaccaaatgttttcaaaaatgtattgacaatctttataacagcggcatttctgaacttccttcaagccacgctagagttaattctcaactggaaagcttggaagagcctggagtgctcacaaaggataagatatatcctaaaatttgctgtagctgttgcctggttgataattcttcctactacgtactcaagctctattcaaaatcccacaggccttgtgaagtttctcagcaattggattcaaaatttgcagaatgaatcaatttataattatgctgttgccctttacatgttaccaaacatattcagtgccctgtttttcatgtttctaccaattcgacgggccttagagcgctcaaattctcgcattattaggttccttttatggtggacacagccaaagttatatgttgctcgaggcatgtatgaagacacttgctcacttcttaagtatactacgttctggatcctgctgcttatatgcaagctcgccttcagttattatgttgagattgctcctttagttgaacctaccaggataatcatgtcactggaaaggccgccttatgagtggcatgagttcttcccaaacttgcggcataatttaggtgttgtggttactgtatgggctccaattgtcatggtgtacttcatggacacacaaatatggtatgccattttctccacaatatgtggtggagtctatggtgcattcagccgcttgggtgagatacgaacccttgggatgttgagatcaagatttgaggcaattccaagagcatttggcaaaaaacttgtacctgatcatggcagtcacttgaaaggagatgaggaggacaaaaacccacccttcgataagtttgctgacatatggaatgcatttattaattcattgcgagaagaggacttactaaacaatagggagaaagatctattggttgttccttcatctggtggtcaaacaagtgtttttcagtggcctcctttccttcttgccagtaagattccaattgcacttgacatggcaaagagtgtcaagaaaaaagatgatgaacttatgaagaggataaagcaggatccttatactgagtatgctgtaatagaatgctacgatacattattagatatcctttacagcattattgttgtacaaagtgataagaaagttgttgatagaatacgtgaaagcatcaaagatagcatccaccggaaatcactcgtgaaagaattccgattggatgaacttcctcaactaagtgctaagtttgataagttgctaaatctactgaaggaatatgatgagaacgatcctgtaaatagaaacacacatattgccaatctgttgcaggatataatggaaatcatcacacaggatattatgaaaaatggaaaaggtatcttgaaggacgagggccaaaaacaacaactgtttgcaaaattaaatctggattcattgaagcatgttgcttggagggagaagtgcattaggcttcaattgttgttgacaacaaaggaatctgccatatatgtaccaacgaacttggaagctcggcgtaggatcaccttttttgcaaactcactttttatgagaatgccaagggcaccacctgtccgtagcatgatgtccttcagtgttttaactccatacttcaaagaggaggtgctcttttcaccagaagatcttcataggaaaaatgaggatggtatatcaatactgttctacctacggaaaatatatccagatgaatttaggaacttccttcagcggatagattttgaagtgaaggatgaagaagaacttaaagataagatggatgagatctgtaattgggcgtcttataggggtcaaactctcaccagaacagtaagaggaatgatgtactacagaaaggcacttgaaatccaatgccttcaagatatgacagatcctgctaaagttgaccgagacagatcaataggatcctaccaagagttgcaatatgatattgaaatggcacaagctattgctgatatcaaattcacttatgttgtctcatgtcaagtttatggcatgcaaaagaaatcaaaggatttaaatgaaaaaaggcgctatcagaatatcctcaatctcatgataatgaacccatcactacgagttgctttcattgaggagatcgaaggtctaaccagaaatggagcaactgagaagacatattgttccgttcttgtcaaaggtggtgaaaagtatgatgaggaaatttaccgcataaagcttcctggcaatccaacagatattggagagggaaaacctgaaaaccaaaatcatgccataatcttcaccaggggagaagcacttcaggccattgatatgaatcaggataattatattgaggaggcgtttaaaatgagaaatgtgctggaggagtttgagagtagaaagtatgggaagagcaaacccactatattaggcttacgtgagcacatttttactggaagtgtttcgtcgctggcttggtttatgtccaatcaagagaccagttttgttactattgggcaaagagttctggcaaatcctctcaaggttcggttccattatggccacccagatatttttgatagactcttccatatcaccagaggaggcataagtaaagcttcaaagactataaatctgagtgaagatatattttcaggttttaattcaaccatgagaggaggaaatgttacacatcacgaatacatgcaagttggtaaggggcgtgatgtggggatgaatcagatttctagcttcgaagctaaggtggccaacgatttgacttctacagaatgttatctttctattttactacagttgggttctattttagtagcatggttactgtacttactgtctatgtgtttttatatgggaggctttatctggttatgagtggtctggaaaagtctattatgctggatccacgaaatcagcagaatgtcaaggctctcgaaaatgcactggcttcacagtctattttccagctaggtctgctgcttgtcctccctatggtcatggaagttggcttagagaaagggttccgcacagcattaggagagtttgtaatcatgcagcttcagttggcatctgtgttcttcacattccagcttggcaccaaaacccactactatgggagaacaatactccatggtggtgcaaaatacagaccaacaggtcgtggattcgttgtgtaccatgcaaagtttgctgaaaattaccgtatgtactcccgtagccactttgttaaaggactggaactcttgatacttttggttgtatatctagtctatggaagttcctatcgcagctcaaacatatacctatttgtcacctgctccatatggttccttgttgcttcatggctcttcgcgccatttatcttcaatccatcatgctttgaatggcagaagactgttgaggactggacagattggaggaagtggatggataacagagggggaattggcatgtctgtggaacaaagctgggaagcctggtgggtaactgagcaagatcacctcaggaagactagcatccgagcttttgtgttggaaatcatcctttcacttcgatttttgatctaccagtatggcattgtctaccatctgaacatagcagatcaccacaaaagcattatggtatatggagtatcatgggtggttatgctccttgttcttgtagtgctgaagatggtttcaatagggcggcagaaatttggaacagacctacagcttatgttccgcattctcaagggccttctcttccttggttttgtctctgtgatggcagtcctatttgtcgtcttacaccttactatttctgatgtcttcgctagtatccttggatacttgcctactggatggtgtcttcttctgattggacaagcatgctcaccattgattaggaggaccctgctgtgggactccatcatggagctcggaaggtcatacgagaatataatgggtctcgtcctcttcctgccaattggtttcctgtcgtggttccccttcgtctctgaattccagacacggctgctgtttaaccaggcatttagccggggcctccagatctcaaggatccttgctggtcagaaggatgttagcgagttcgagttcaagtgaccaatttcatccctcttgcaagcaaaccaaactcactttcatgtatttgtttacgatgatcgattttgggtgtctgtactctagtatattttcatcacgtttactactataatactgtctgtacttgagaatgttttgcctctgtaaactgacatgtagaatttctgtaatatatttatggaatttgataacttccatccatgcactgaacgctttgaatggaccattattactaaaggggtaacaaatttatcattgtaaggtcaaacatgtttgggctggaagttttgctattcaatactccaaacatgtttgtaagtgttagatactcatttaaggtttggggttttctcactgtaattacctttgcacccatttgtaatgggtctagctcacttaactcaaatttattaatacaatgcacaaccctaatccaaggttagggtttctatacggtatagagctagg

SEQ ID NO: 218298 - DNA, 6302 bp, Zea Mays
gcgcccaaagccacaaagcgaaaaagcgcgctccacactcagcaccaccactgccgcccgcctcgagccctcctcctgcctggctgcctccctcttaaaacgaagatgccttccccagctcccctctcttgcccaccttgcttcctcgccaccaccactttccccaccgctgcggcactagtcagtcagcaccagcaccttcgtcaccctgcgcttgtgcgcggcaacaccaacgcgcgccgtcgggatcggcggcaccgctggaaatggcgagcgccggcgccggcccgtcggggccggtgcggtccatatcccaaacggggcggtcgcggacgatggggcgtatgcccacgcgcgccttcaccatacgtccggacggatcctccggtgaggacggcgtcgatatcgtggaggaggagctcgtgccctcgtcgctcgcgcccattgtacccatcctccgcgccgccaacgagatcgaggaggagaacccgcgcgtcgcctacctatgtcgctttactgctttcgagaaggctcatcatatggaccaaaactcaagtggacgaggtgttcggcaattcaaaacatacctcttgcataggcttgaaaaggatgaacatgagacaaagcgcagtcttgctacaactgatgcaagggagatacagaagttctatgcgcagtactgcagaaaatatctagaacaagatcatgataagaggaaaccggaagagatggctagatactatcagattgcgtccgtcctatatgatgttatgaaaactgttacacctggcaaaaatgagtatgatgattatgctaaagatattgaaaacgaaaaagcatccttttcacagtacaatattctaccccttaatatttctgctcgagaacaaccaataatgaaaattcctgagatcaaagcagcagtgaagctccttgagcagataaatggccttccaatgccaaggattgaattaccacaaagctctgacagaaaaacagtgtccgacaaaatggacagacctgtggttaaggatttgcttgattggcttcggcaaacatttggatttcagaaagacagtgttgcgaatcaaagggagcacttgattttgctccttgcaaacattgacatgagacaacagggtactgccgatcatagtgagagacatgttcacatgatacgtagtagcacagtgatatatttgaggaacaaaattttccataattataactcctggtgtcgatacttacatctggagtcaaacattaggatccaaagggatgcccccacacaacagccagagcttctgtacataggactgtatttactgatatggggtgaagcttccaatgttcgcttcatgcctgaatgtctttgctacatctttcaccatatggcaagagatttacatgacataatatctgatacaagccaaggatcatttgagccaccgttccagggagaggggagtgacgatgcatttctgcagctagtgatccaacccatctatagtgttatgcagaaggaagctgcaaggagcaaacgtggtaaggtgagccactcattgtggagaaactacgacgacttgaatgaatatttttggtcaaaaaaatgcttcaaaaaacttggatggccgatggatccaacagctgacttttttgcagaacctaccagagccaagaatgaaactgagcaacatggtcacgtgattaggagaagaagggcatcaaaaacaaattttgttgaagttcgtacatttttgcatatgttcagaagttttgatcgtatgtgggccttctttatattggggttccaggccatggtaatcattgcctggagcccttctgggtcactttcttctatatttgaaccaaatgttttcaaaaatgtattgacaatctttataacagcggcatttctgaacttccttcaagccacgctagagttaattctcaactggaaagcttggaagagcctggagtgctcacaaaggataagatatattcagtgccctgtttttcatgtttctaccaattcgacgggccttagagcgctcaaattctcgcattattaggttccttttatggtggacacagccaaagttatatgttgctcgaggcatgtatgaagacacttgctcacttcttaagtatactacgttctggatcctgctgcttatatgcaagctcgccttcagttattatgttgagattgctcctttagttgaacctaccaggataatcatgtcactggaaaggccgccttatgagtggcatgagttcttcccaaacttgcggcataatttaggtgttgtggttactgtatgggctccaattgtcatggtgtacttcatggacacacaaatatggtatgccattttctccacaatatgtggtggagtctatggtgcattcagccgcttgggtgagatacgaacccttgggatgttgagatcaagatttgaggcaattccaagagcatttggcaaaaaacttgtacctgatcatggcagtcacttgaaaggagatgaggaggacaaaaacccacccttcgataagtttgctgacatatggaatgcatttattaattcattgcgagaagaggacttactaaacaatagggagaaagatctattggttgttccttcatctggtggtcaaacaagtgtttttcagtggcctcctttccttcttgccagtaagattccaattgcacttgacatggcaaagagtgtcaagaaaaaagatgatgaacttatgaagaggataaagcaggatccttatactgagtatgctgtaatagaatgctacgatacattattagatatcctttacagcattattgttgtacaaagtgataagaaagttgttgatagaatacgtgaaagcatcaaagatagcatccaccggaaatcactcgtgaaagaattccgattggatgaacttcctcaactaagtgctaagtttgataagttgctaaatctactgaaggaatatgatgagaacgatcctgtaaatagaaacacacatattgccaatctgttgcaggatataatggaaatcatcacacaggatattatgaaaaatggaaaaggtatcttgaaggacgagggccaaaaacaacaactgtttgcaaaattaaatctggattcattgaagcatgttgcttggagggagaagtgcattaggcttcaattgttgttgacaacaaaggaatctgccatatatgtaccaacgaacttggaagctcggcgtaggatcaccttttttgcaaactcactttttatgagaatgccaagggcaccacctgtccgtagcatgatgtccttcagtgttttaactccatacttcaaagaggaggtgctcttttcaccagaagatcttcataggaaaaatgaggatggtatatcaatactgttctacctacggaaaatatatccagatgaatttaggaacttccttcagcggatagattttgaagtgaaggatgaagaagaacttaaagataagatggatgagatctgtaattgggcgtcttataggggtcaaactctcaccagaacagtaagaggaatgatgtactacagaaaggcacttgaaatccaatgccttcaagatatgacagatcctgctaaagttgaccgagacagatcaataggatcctaccaagagttgcaatatgatattgaaatggcacaagctattgctgatatcaaattcacttatgttgtctcatgtcaagtttatggcatgcaaaagaaatcaaaggatttaaatgaaaaaaggcgctatcagaatatcctcaatctcatgataatgaacccatcactacgagttgctttcattgaggagatcgaaggtctaaccagaaatggagcaactgagaagacatattgttccgttcttgtcaaaggtggtgaaaagtatgatgaggaaatttaccgcataaagcttcctggcaatccaacagatattggagagggaaaacctgaaaaccaaaatcatgccataatcttcaccaggggagaagcacttcaggccattgatatgaatcaggataattatattgaggaggcgtttaaaatgagaaatgtgctggaggagtttgagagtagaaagtatgggaagagcaaacccactatattaggcttacgtgagcacatttttactggaagtgtttcgtcgctggcttggtttatgtccaatcaagagaccagttttgttactattgggcaaagagttctggcaaatcctctcaaggttcggttccattatggccacccagatatttttgatagactcttccatatcaccagaggaggcataagtaaagcttcaaagactataaatctgagtgaagatatattttcaggttttaattcaaccatgagaggaggaaatgttacacatcacgaatacatgcaagttggtaaggggcgtgatgtggggatgaatcagatttctagcttcgaagctaaggtggccaacgatttgacttctacagaatgttatctttctattttactacagttgggttctattttagtagcatggttactgtacttactgtctatgtgtttttatatgggaggctttatctggttatgagtggtctggaaaagtctattatgctggatccacgaaatcagcagaatgtcaaggctctcgaaaatgcactggcttcacagtctattttccagctaggtctgctgcttgtcctccctatggtcatggaagttggcttagagaaagggttccgcacagcattaggagagtttgtaatcatgcagcttcagttggcatctgtgttcttcacattccagcttggcaccaaaacccactactatgggagaacaatactccatggtggtgcaaaatacagaccaacaggtcgtggattcgttgtgtaccatgcaaagtttgctgaaaattaccgtatgtactcccgtagccactttgttaaaggactggaactcttgatacttttggttgtatatctagtctatggaagttcctatcgcagctcaaacatatacctatttgtcacctgctccatatggttccttgttgcttcatggctcttcgcgccatttatcttcaatccatcatgctttgaatggcagaagactgttgaggactggacagattggaggaagtggatggataacagagggggaattggcatgtctgtggaacaaagctgggaagcctggtgggtaactgagcaagatcacctcaggaagactagcatccgagcttttgtgttggaaatcatcctttcacttcgatttttgatctaccagtatggcattgtctaccatctgaacatagcagatcaccacaaaagcattatggtatatggagtatcatgggtggttatgctccttgttcttgtagtgctgaagatggtttcaatagggcggcagaaatttggaacagacctacagcttatgttccgcattctcaagggccttctcttccttggttttgtctctgtgatggcagtcctatttgtcgtcttacaccttactatttctgatgtcttcgctagtatccttggatacttgcctactggatggtgtcttcttctgattggacaagcatgctcaccattgattaggaggaccctgctgtgggactccatcatggagctcggaaggtcatacgagaatataatgggtctcgtcctcttcctgccaattggtttcctgtcgtggttccccttcgtctctgaattccagacacggctgctgtttaaccaggcatttagccggggcctccagatctcaaggatccttgctggtcagaaggatgttagcgagttcgagttcaagtgaccaatttcatccctcttgcaagcaaaccaaactcactttcatgtatttgtttacgatgatcgattttgggtgtctgtactctagtatattttcatcacgtttactactataatactgtctgtacttgagaatgttttgcctctgtaaactgacatgtagaatttctgtaatatatttatggaatttgataacttccatccatgcactgaacgctttgaatggaccattattactaaaggggtaacaaatttatcattgtaaggtcaaacatgtttgggctggaagttttgctattcaatactccaaacatgtttgtaagtgttagatactcatttaaggtttggggttttctcactgtaattacctttgcacccatttgtaatgggtctagctcacttaactcaaatttattaatacaatgcacaaccctaatccaaggttagggtttctatacggtatagagctagg

SEQ ID NO: 218299 - DNA, 6339 bp, Zea Mays
ggcgcccaaagccacaaagcgaaaaagcgcgctccacactcagcaccaccactgccgcccgcctcgagccctcctcctgcctggctgcctccctcttaaaacgaagatgccttccccagctcccctctcttgcccaccttgcttcctcgccaccaccactttccccaccgctgcggcactagtcagtcagcaccagcaccttcgtcaccctgcgcttgtgcgcggcaacaccaacgcgcgccgtcgggatcggcggcaccgctggaaatggcgagcgccggcgccggcccgtcggggccggtgcggtccatatcccaaacggggcggtcgcggacgatggggcgtatgcccacgcgcgccttcaccatacgtccggacggatcctccggtgaggacggcgtcgatatcgtggaggaggagctcgtgccctcgtcgctcgcgcccattgtacccatcctccgcgccgccaacgagatcgaggaggagaacccgcgcgtcgcctacctatgtcgctttactgctttcgagaaggctcatcatatggaccaaaactcaagtggacgaggtgttcggcaattcaaaacatacctcttgcataggcttgaaaaggatgaacatgagacaaagcgcagtcttgctacaactgatgcaagggagatacagaagttctatgcgcagtactgcagaaaatatctagaacaagatcatgataagaggaaaccggaagagatggctagatactatcagattgcgtccgtcctatatgatgttatgaaaactgttacacctggcaaaaatgagtatgatgattatgctaaagatattgaaaacgaaaaagcatccttttcacagtacaatattctaccccttaatatttctgctcgagaacaaccaataatgaaaattcctgagatcaaagcagcagtgaagctccttgagcagataaatggccttccaatgccaaggattgaattaccacaaagctctgacagaaaaacagtgtccgacaaaatggacagacctgtggttaaggatttgcttgattggcttcggcaaacatttggatttcagaaagacagtgttgcgaatcaaagggagcacttgattttgctccttgcaaacattgacatgagacaacagggtactgccgatcatagtgagagacatgttcacatgatacgtagtagcacagtgatatatttgaggaacaaaattttccataattataactcctggtgtcgatacttacatctggagtcaaacattaggatccaaagggatgcccccacacaacagccagagcttctgtacataggactgtatttactgatatggggtgaagcttccaatgttcgcttcatgcctgaatgtctttgctacatctttcaccatatggcaagagatttacatgacataatatctgatacaagccaaggatcatttgagccaccgttccagggagaggggagtgacgatgcatttctgcagctagtgatccaacccatctatagtgttatgcagaaggaagctgcaaggagcaaacgtggtaaggtgagccactcattgtggagaaactacgacgacttgaatgaatatttttggtcaaaaaaatgcttcaaaaaacttggatggccgatggatccaacagctgacttttttgcagaacctaccagagccaagaatgaaactgagcaacatggtcacgtgattaggagaagaagggcatcaaaaacaaattttgttgaagttcgtacatttttgcatatgttcagaagttttgatcgtatgtgggccttctttatattggggttccaggccatggtaatcattgcctggagcccttctgggtcactttcttctatatttgaaccaaatgttttcaaaaatgtattgacaatctttataacagcggcatttctgaacttccttcaagccacgctagagttaattctcaactggaaagcttggaagagcctggagtgctcacaaaggataagatatattcagtgccctgtttttcatgtttctaccaattcgacgggccttagagcgctcaaattctcgcattattaggttccttttatggtggacacagccaaagttatatgttgctcgaggcatgtatgaagacacttgctcacttcttaagtatactacgttctggatcctgctgcttatatgcaagctcgccttcagttattatgttgagattgctcctttagttgaacctaccaggataatcatgtcactggaaaggccgccttatgagtggcatgagttcttcccaaacttgcggcataatttaggtgttgtggttactgtatgggctccaattgtcatggtgtacttcatggacacacaaatatggtatgccattttctccacaatatgtggtggagtctatggtgcattcagccgcttgggtgagatacgaacccttgggatgttgagatcaagatttgaggcaattccaagagcatttggcaaaaaacttgtacctgatcatggcagtcacttgaaaggagatgaggaggacaaaaacccacccttcgataagtttgctgacatatggaatgcatttattaattcattgcgagaagaggacttactaaacaatagggagaaagatctattggttgttccttcatctggtggtcaaacaagtgtttttcagtggcctcctttccttcttgccagtaagattccaattgcacttgacatggcaaagagtgtcaagaaaaaagatgatgaacttatgaagaggataaagcaggatccttatactgagtatgctgtaatagaatgctacgatacattattagatatcctttacagcattattgttgtacaaagtgataagaaagttgttgatagaatacgtgaaagcatcaaagatagcatccaccggaaatcactcgtgaaagaattccgattggatgaacttcctcaactaagtgctaagtttgataagttgctaaatctactgaaggaatatgatgagaacgatcctgtaaatagaaacacacatattgccaatctgttgcaggatataatggaaatcatcacacaggatattatgaaaaatggaaaaggtatcttgaaggacgagggccaaaaacaacaactgtttgcaaaattaaatctggattcattgaagcatgttgcttggagggagaagtgcattaggcttcaattgttgttgacaacaaaggaatctgccatatatgtaccaacgaacttggaagctcggcgtaggatcaccttttttgcaaactcactttttatgagaatgccaagggcaccacctgtccgtagcatgatgtccttcagtgttttaactccatacttcaaagaggaggtgctcttttcaccagaagatcttcataggaaaaatgaggatggtatatcaatactgttctacctacggaaaatatatccagatgaatttaggaacttccttcagcggatagattttgaagtgaaggatgaagaagaacttaaagataagatggatgagatctgtaattgggcgtcttataggggtcaaactctcaccagaacagtaagaggaatgatgtactacagaaaggcacttgaaatccaatgccttcaagatatgacagatcctgctaaagttgaccgagacagatcaataggatcctaccaagagttgcaatatgatattgaaatggcacaagctattgctgatatcaaattcacttatgttgtctcatgtcaagtttatggcatgcaaaagaaatcaaaggatttaaatgaaaaaaggcgctatcagaatatcctcaatctcatgataatgaacccatcactacgagttgctttcattgaggagatcgaaggtctaaccagaaatggagcaactgagaagacatattgttccgttcttgtcaaaggtggtgaaaagtatgatgaggaaatttaccgcataaagcttcctggcaatccaacagatattggagagggaaaacctgaaaaccaaaatcatgccataatcttcaccaggggagaagcacttcaggccattgatatgaatcaggataattatattgaggaggcgtttaaaatgagaaatgtgctggaggagtttgagagtagaaagtatgggaagagcaaacccactatattaggcttacgtgagcacatttttactggaagtgtttcgtcgctggcttggtttatgtccaatcaagagaccagttttgttactattgggcaaagagttctggcaaatcctctcaaggttcggttccattatggccacccagatatttttgatagactcttccatatcaccagaggaggcataagtaaagcttcaaagactataaatctgagtgaagatatattttcaggttttaattcaaccatgagaggaggaaatgttacacatcacgaatacatgcaagttggtaaggggcgtgatgtggggatgaatcagatttctagcttcgaagctaaggtggccaacgatttgacttctacagaatgttatctttctattttactacagttgggttctattttagtagcatggttactgtacttactgtctatgtgtttttatatgggaggctttatctggttatgagtggtctggaaaagtctattatgctggatccacgaaatcagcagaatgtcaaggctctcgaaaatgcactggcttcacagtctattttccagctaggtctgctgcttgtcctccctatggtcatggaagttggcttagagaaagggttccgcacagcattaggagagtttgtaatcatgcagcttcagttggcatctgtgttcttcacattccagcttggcaccaaaacccactactatgggagaacaatactccatggtggtgcaaaatacagaccaacaggtcgtggattcgttgtgtaccatgcaaagtttgctgaaaattaccgtatgtactcccgtagccactttgttaaaggactggaactcttgatacttttggttgtatatctagtctatggaagttcctatcgcagctcaaacatatacctatttgtcacctgctccatatggttccttgttgcttcatggctcttcgcgccatttatcttcaatccatcatgctttgaatggcagaagactgttgaggactggacagattggaggaagtggatggataacagagggggaattggcatgtctgtggaacaaagctgggaagcctggtgggtaactgagcaagatcacctcaggaagactagcatccgagcttttgtgttggaaatcatcctttcacttcgatttttgatctaccagtatggcattgtctaccatctgaacatagcagatcaccacaaaagcattatggtatatggagtatcatgggtggttatgctccttgttcttgtagtgctgaagatggtttcaatagggcggcagaaatttggaacagacctacagcttatgttccgcattctcaagggccttctcttccttggttttgtctctgtgatggcagtcctatttgtcgtcttacaccttactatttctgatgtcttcgctagtatccttggatacttgcctactggatggtgtcttcttctgaaaaagaaatgctctagtgtgctgaggctactgcagattggacaagcatgctcaccattgattaggaggaccctgctgtgggactccatcatggagctcggaaggtcatacgagaatataatgggtctcgtcctcttcctgccaattggtttcctgtcgtggttccccttcgtctctgaattccagacacggctgctgtttaaccaggcatttagccggggcctccagatctcaaggatccttgctggtcagaaggatgttagcgagttcgagttcaagtgaccaatttcatccctcttgcaagcaaaccaaactcactttcatgtatttgtttacgatgatcgattttgggtgtctgtactctagtatattttcatcacgtttactactataatactgtctgtacttgagaatgttttgcctctgtaaactgacatgtagaatttctgtaatatatttatggaatttgataacttccatccatgcactgaacgctttgaatggaccattattactaaaggggtaacaaatttatcattgtaaggtcaaacatgtttgggctggaagttttgctattcaatactccaaacatgtttgtaagtgttagatactcatttaaggtttggggttttctcactgtaattacctttgcacccatttgtaatgggtctagctcacttaactcaaatttattaatacaatgcacaaccctaatccaaggttagggtttctatacggtatagagctagg

SEQ ID NO: 218300 - DNA, 2052 bp, Zea Mays
cttcaagcaagtctcagccatgcaacatcttacagtgatagccttcgtggctgcttctctcattgcaagcattccacatgccaaaagtgctgatctgaactctgacaaacaggctcttctcgcatttgctgcatcactgcctcgtggcaggaagctcaactggagctccaccacacctgtctgcacttcttgggtgggggtgacatgcacgccagataagagccgtgtacatacactgcgcctacctgctgtaggactttttggtccaataccatcagacacccttgggaagcttgatgccctggaggtattgagccttaggtcaaatcgccttactgtcgacctccctcctgagaataactcactttctggacctattcctgacctccaacttcccaaattgagacatttgaatttgagcaacaataacctcagtgggccaataccaccttctttgcagaggtttccattaagttccttcttagggaatgcttttctgtgtggctttcctttggaaccatgttttggaactgcacctattccttctccagtatcaccaccatcacccaataagatcaagaagagcttctggaaaaagatcagaactggtgtgataattgcaattgctgctattggaggggtattgttgcttattttgattctcatgctcgtgatatgtattttcaagagaaagggacacactgaacctaccacagcttcgtccaaaggaaaagctattgcaggtggaagggcagaaaatcctaaggaagactacagcagtggtgttcaggaagcagagaggaataaattggttttcttcgggggtagttcatataattttgacttggaggatttgttgagagcttctgctgaagtccttggaaaaggaagttatggaaccacctacaaagctgttcttgaggatggaaccacagttgttgtcaaaagattgaaggaagtggtggttagcaagaaggactttgaacagcagatggagataattggcagggttggccagcatcaaaatgtcattccattgcgggcttattattactccaaggatgagaaattgttggtgtttgattatgtcccatctggtagccttgctgttgttttgcatgggaataaagctgatggaagggctccattgaactgggagacaagggtcaagatatctctggacgtagcccgtggaatcgcacatcttcatgctgagggaggagggaagttcatccatggcaacatcaaagcgtcgaacgtccttctatcgcagaacctcgacggtcgcgtctccgagttcggcttggcacagatcatgaccactccacagacgtccctgccacagcttgtcggataccgagcaccagaagtcctcgagacgaaaaaaacgatccagaagtccgacgtctacagctttggtgtcttgctccttgaaatgctaaccggaaaagcccctctcaggtctcccggtcgcaaggattccgtagagcacctcccaaaatgggtgcggtctgtggttcgcgaggagtggaccgcggagatcttcgacgtggacctgctgaggcaccccaacgtcgaggacgagatggtacagatgctccagatcgcgatggcgtgtgtggccgccgaccccgagcagcggcctaggatggacgaggtgatcaggaggatcacggagatccggaattcttactcttcttcttctgggacaaggacgcccctggaggacaggccagagaccgcgcaagcaccgtgatagtagtttagcaagagatgttagctaggttgcatagtgaattggttatagagcttcggcaaagttgatagccacctgcatagcgcagtttccgtcggttccatatcgtttccagtaaatctgttgtgcattttcttttttccgtcggttccagtaaatctgattgacagtccatgccattgtattgctaagttaaatcagtatctcttctgattttcataggatagtgtcgttctgtaatttgacataatctcctgaggccgtgattaatgatttgaatttcccttctatttgtg

SEQ ID NO: 218301 - DNA, 954 bp, Zea Mays
gtcgttttgggtttcgccaaaagggaataaagctgatggaagggctccattgaactgggagacaagggtcaagatatctctggacgtagcccgtggaatcgcacatcttcatgctgagggaggagggaagttcatccatggcaacatcaaagcgtcgaacgtccttctatcgcagaacctcgacggtcgcgtctccgagttcggcttggcacagatcatgaccactccacagacgtccctgccacagcttgtcggataccgagcaccagaagtcctcgagacgaaaaaaacgatccagaagtccgacgtctacagctttggtgtcttgctccttgaaatgctaaccggaaaagcccctctcaggtctcccggtcgcaaggattccgtagagcacctcccaaaatgggtgcggtctgtggttcgcgaggagtggaccgcggagatcttcgacgtggacctgctgaggcaccccaacgtcgaggacgagatggtacagatgctccagatcgcgatggcgtgtgtggccgccgaccccgagcagcggcctaggatggacgaggtgatcaggaggatcacggagatccggaattcttactcttcttcttctgggacaaggacgcccctggaggacaggccagagaccgcgcaagcaccgtgatagtagtttagcaagagatgttagctaggttgcatagtgaattggttatagagcttcggcaaagttgatagccacctgcatagcgcagtttccgtcggttccatatcgtttccagtaaatctgttgtgcattttcttttttccgtcggttccagtaaatctgattgacagtccatgccattgtattgctaagttaaatcagtatctcttctgattttcataggatagtgtcgttctgtaatttgacataatctcctgaggccgtgattaatgatttgaatttcccttctatttgtg

SEQ ID NO: 218302 - DNA, 1707 bp, Zea Mays
aaaaaaaatgctagtgctactgccagttatcagatgccatattcctcgctgtgaacaaacaaagtgccatctgcagcagccgtttattgccaaatgaatacatacatgattgaagatatggattcagcatacgactccgatgcatctgaagaaggggatgatgatggtgatgatctctctgtaaggcagggcacaccatatactcacattcatgagatagttttctccacaatcgataagccaaagctccttagtcagctatctgcattgctatctgacattggattgaacatcagagaagcacatgttttctctacccatgatggctattctcttgatgtttttgttgttgatggctggcctgttcaggatgctgatggtttgcacaaagcactggaagcatccattctaagaaatgagggttcatggtctggttcatctcattcctcagccgctgaaagaacactgcccttccaagttaaaggtggtgagtgggaaatcgacaaacgacttctgaagatgggagggatggttgcttctggttcttgtggggacttgtatcacgggacttaccttggtgaggatgtagctgttaaagttataagagctgagcatttgaataagaatgtttggaacgagtttacgcaagaagtatatatactaagagaagttcaacataaaaatgttgtgcgattcattggtgcatgcacaaaaccaccccaattttgcataattacagttgatgtatgccgagggatgtgctacttgcatgaaaggggtatcatccatagagacttgaagactgcaaaccttctaatggacaaagatcatgttgtgaaagtggctgattttggtgtagctcggttccaggatcaaggaggtgtcatgacagctgaaactggaacatacagatggatggcacctgaggttataaaccatcaaccctatgataacaaagcagatgttttcagctttgctattgtcatctgggagctgataacgtctaagatcccgtatgaaagcatgacccctctccaagcggctgtaggtgtgagacagggattgcgcccaggacttccaaagaagacgcatccaaaggtattggacttgatgcagagatgctgggaagcagacccatctgcccggcctgctttcccagacattttagccgaactggaggatcttttggcacaggttcagggaacaccgggaaagacggcccatgctccatcaaataactcgaacacgaaagattaacccccatgcacacatacctgacgtttttctgaattcagtgatctgccatgtttaggattcgagtcgctaattacgaggaatgtagcatatcgatttttttccctggatggttttgcttgtgtacatttgaacaatcttcttggggcctattttttatggtcacctcattgttcttacataggggaaattggctcgagcgtttgggaggattacgtattatgacaacggctgataatttaccgcctacaacatgggtggatatttttcatgcattattatcccagtagctgccattccaagaaaggcataatgctttactcgccttaggttccttttggaatggacactggcgtgttcagctccagtggtcaaagcaccactccctcccgtttagaccttgttcgattgtttccattatagattacatgagattagaaaaaaattatgaaa

SEQ ID NO: 218303 - DNA, 1756 bp, Zea Mays
gccatattcctcgctgtgaacaaacaaagtgccatctgcagcagccgtttattgccaaatgaatacatacatgattgaagatatggattcagcatacgactccgatgcatctgaagaaggggatgatgatggtgatgatctctctgtaaggcagggcacaccatatactcacattcatgagatagttttctccacaatcgataagccaaagctccttagtcagctatctgcattgctatctgacattggattgaacatcagagaagcacatgttttctctacccatgatggctattctcttgatgtttttgttgttgatggctggcctgttcaggatgctgatggtttgcacaaagcactggaagcatccattctaagaaatgagggttcatggtctggttcatctcattcctcagccgctgaaagaacactgcccttccaagttaaaggtggtgagtgggaaatcgacaaacgacttctgaagatgggagggatggttgcttctggttcttgtggggacttgtatcacgggacttaccttggtgaggatgtagctgttaaagttataagagctgagcatttgaataagaatgtttggaacgagtttacgcaagaagtatatatactaagagaagttcaacataaaaatgttgtgcgattcattggtgcatgcacaaaaccaccccaattttgcataattacagaatacatgtctggaggaagcctatatgactttgtgcacaagcagcataatgttctaaacctcaggactttattaaagtttgcagttgatgtatgccgagggatgtgctacttgcatgaaaggggtatcatccatagagacttgaagactgcaaaccttctaatggacaaagatcatgttgtgaaagtggctgattttggtgtagctcggttccaggatcaaggaggtgtcatgacagctgaaactggaacatacagatggatggcacctgaggttataaaccatcaaccctatgataacaaagcagatgttttcagctttgctattgtcatctgggagctgataacgtctaagatcccgtatgaaagcatgacccctctccaagcggctgtaggtgtgagacagggattgcgcccaggacttccaaagaagacgcatccaaaggtattggacttgatgcagagatgctgggaagcagacccatctgcccggcctgctttcccagacattttagccgaactggaggatcttttggcacaggttcagggaacaccgggaaagacggcccatgctccatcaaataactcgaacacgaaagattaacccccatgcacacatacctgacgtttttctgaattcagtgatctgccatgtttaggattcgagtcgctaattacgaggaatgtagcatatcgatttttttccctggatggttttgcttgtgtacatttgaacaatcttcttggggcctattttttatggtcacctcattgttcttacataggggaaattggctcgagcgtttgggaggattacgtattatgacaacggctgataatttaccgcctacaacatgggtggatatttttcatgcattattatcccagtagctgccattccaagaaaggcataatgctttactcgccttaggttccttttggaatggacactggcgtgttcagctccagtggtcaaagcaccactccctcccgtttagaccttgttcgattgtttccattatagattacatgagattagaaaaaaattatgaaa

SEQ ID NO: 218304 - DNA, 1697 bp, Zea Mays
ctctggaagaagcttttcagaaacaaagctgggaggttccagagcgcgcagaggttcagctcgtttgactccagcgtccctcttaccccggtccaactccaagacaggagcaaggaggacgaagccggtcagagcagcgacctgaacgtcacgctctttgacatggacgccatcgctctctccactgacaacttcgcggcgtggaacaagctcggggaaggcggcttcggcgcggtgtacaaggggcaactggaaggagggcaggcggtggcggtgaagcggctgtccaagtactcgacgcagggactgggcgagttcaagaacgaggtgatgctcatcgccaagctgcagcacgtgaacctggtcaggctcctgggctgctgcgtccatggagaggagaggatgctggtgtacgagtacatggagaacaagagcctcgacaacttcatctttggtacagacaagaaccgatccgcgcagctgcactggtccaagaggttcgacatcatcctgggcatcgcacgcgggctcctgtacctgcaccaggactcccggtacaaggtgatccaccgggatctcaaggccggcaacatcctcttggacaaggacatgaaccccaagatctccgacttcggcgtggccaggatcttcggcgacgacaccgactcgcacaccaggaaagtcgtcggaacatacgggtacatgtccccggagtacgccatggacggcgtcttctcggtgaagtccgacgtgttcagcttcggcgtgctggtgctggagatcgtcagcggcaggaagaaccggggcatgtacagcagcggcgagcagacgagcctcctcagccaggcgtggaggctgtggagggaaggcaacgcgctggcgctgctggacgaggcggtggtccgcgccggcacgcaccggagctccgaggtgctgcgctgcgtgcaggtggcgctgctgtgcgtgcaggagcggcccgacgaccggccgcacatggcggcggtgttcctggcgctgggcaacccgagcgcggtgctcccgcagcccaggcacccgggctactgcaccgaccggggctccgcctccaccgacggcgagtggtcgtccacatgcaccgtcaacgacgtcaccgtcaccatcgtggaaggacggtgacgccacgtggcggctctctcagccctgagccgtgctagctgccgggatactgccgcgccttcggtgatttgtgaatagcttgactgatatatgggcaggggttgacaaccccccaaagcgcaaagctgtgtgtgtgtgtgtgtgattgtgatctggatggtattgaaacttcgctcaggtttgatcttgcactcaaacagcagcttcaggaactcggtgtcatcctcagctccggtgaaattagtggtctccagttcctccagcgaggcagtgaatgcagagtgagaccgtctccagacatttacagccatgactgcacagtgatttcttcagaagaaaacaacacacactgtcacactgtaccatgcataatttaagtgcagcacttgagtatgttttagttgtttactgtctcctgtcaattttattttgttttgaagttgttacatttgtgtgtgcgcgcgcgttaagaaggcggcttgagtatcataattagcttgatggtactgtaaattatgagcagataattaaattgctttgtg

SEQ ID NO: 218305 - DNA, 3211 bp, Zea Mays
tctaggttaacaagtgcggaaaacttgaaacttggcttgaagacatgtgggcttgtatgaagcagttcaaagatgcagtctgtggtgtgatgaatgagccaggccctattgcaactaaactacttgctctaaagtttgtggaaacatggattttgtgttgcacacctcaagccaacagtgaccaagtacagccaactgagggtaccattttccagtttaaagttaacaagtgaatgggcaatatttttttgaaagagaatgactttcacattgacaagtacaccttacatacaggaaaaaactggagatttgatacttcacgatcatctcaatttcatcctagccttgatcctgctattttggaagctgatgcacatcgagctctcctcctcctcctggatattctgcgaacagcttatgcccatcgagggtccttcctagttggcaccatcaactctcttgcagcagttgtaaagatccgaccgatttactatgaccgcgtgttgccagttttgcttgattttgaccctggcttggagactgcaaagggggcacattcagcaagcctgcggtatgctgtaagagcagcttttttggggtttctacggagtccccaccaggcaatgattgagtctaaagacatattggtaaggcggctgcgtgttctcagccctggtgaggcaatggaacaaaatattaggcaggcagagaagatgtctagaaatatagagcgtgcttctcgtgctagcaaggatgagtctacatcatgggagatgccttatggagatataaatcggaagaaacctgctgttcgatcaagtgatacttttactacgtctgatggcatagctaagagagcaagatttgacatgtctgccacttcaaacctgccagttctgggattgtctgattattctgatatgcaggctgacaatgatgccagtgtgggtcattcatccgatccagctatattgaataatgaagtgtctcctgtcgagaagatgattgaaatgattggcgctttgcttgctgaaggagaaagaggagctgaatccttgggtattcttgtctcaacagtagaggcagatgtcatggccgacattgtgatagaaacaatgaaacatctaccggaagcttcatttcatttagcaacaaataacggtgtccagcaactgaattttaaatattcctctggtctcgtaacacaaaaccttccagccaattcagactccacactattcactgcacaatctacacccacagcagatggagtcagcatctcaccatctgatgcctttgttatgactagcgttcatgatgctaagcgtgatccaagaagggaccctcgtcgcctcgatccgcgtcggatagtttcatcttctgctgtaaattcgatacaggtgaagatggaaaccaatagtgtgcatcaaacagataatttgtcgaacacactctactccaattctcggaaggctgaaaactattcagactatcaaggagatttacacaaaaatgaaggtgaacagcagtcagcttctcaacctaatcaaacaattgccaaagacaagttggagcttctggatgttgtcactgaaccggagccaacatttgaagtcgaggcaccagtggatgtcaggattcattcttctgatgttgatgaagatatagtgaaacccatgtcttcagtggttaattcacttgacgaatccgatagcatggatttagaggttgacccctttttaccagctccaaaggcaccaacaccagacgacaccaatgatgacttgccaattattacatctcagttggaattaagtgaaaaagggaaaatctcaattaacaaactagccattggccggatacttgatgattacaagaaaaatagtttcaatgccagattttctttgcttgctcatttgatcgcgcagagtgctgctgatgataacattatggatttgattcagaggcacattatctttcactcacatgatcaggaggggtatgaactggcaatgcatgtgttgtatcagctgcagagtatcagtgttgctaattcaccagaaagctctacctccacctctaaacattacgagaagttctttatatcacttgcgaggtccttgattgattcactgcctgcttcagacaaatcttttagcaaacttttatgcgatgcaccatatctacctgagtctttgtttagattactggaggatctttgcatgtcagaagacaacagccaacaattaaaggatggagatggggaccgtgttacccaaggcctgggaactgtatggagccttatcttgggtcggcctccgcttcgccatgtttgcttggatattgctctgaagtgtgctgcccactctcaagatgaagtcaggggaaaagcagttagattggttgcaaaaaggctctatgatctaacatatgcaacagaaaaaatagagcagtttgccatagagagccttgtgggagttgctaatgagcatactgtggacacagatattaattcgaaatctttgaaagaatcgacagctgagattgaggtaggtagtcagggaacttcagtaagtggctcccagatcccagatactgagttctctgaaaatgggccattcaagacatcatcggtttctacaaaacagtcagcagtatctgtatctgaggcaaagcggcgtacttctttgttctttgcactttgcaccaagagatctagtcttcttcaacatctgttcaatgcttatggaaggtccccaaaagttgtcaagcagtgtatccattggcatatgcccaaccttataagaaatctggggccctcgtgtcctgaattgctgaacattattcataatccacctgaaggcagtgaacatcttattaccttgacactgcaaacattgactgaagattcaaatccctcagctgacctagttgctgctgttaaacaattatataataccaagctgaaggatgcatctattctgattcccttactgccttcatttccaaaggaggaggtattgcctatatttcctaggctagttgatctcccgcttgagagattccaagacgtacttgctcggatattgcagggaactgctcatactggtccagcattgactcctgctgaagttctcattgcaattcatgatattaaccctgaaaaagataaagttgccctaaaaaagctgctgatggagactcatttcag

SEQ ID NO: 218306 - DNA, 3409 bp, Zea Mays
gttaacaagtgcggaaaacttgaaacttggcttgaagacatgtgggcttgtatgaagcagttcaaagatgcagtctgtggtgtgatgaatgagccaggccctattgcaactaaactacttgctctaaagtttgtggaaacatggattttgtgttgcacacctcaagccaacagtgaccaagtacagccaactgagggtaccattttccagtttaaagttaacaagtgaatgggcaatatttttttgaaagagaatgactttcacattgacaagtacaccttacatacaggaaaaaactggagatttgatacttcacgatcatctcaatttcatcctagccttgatcctgctattttggaagctgatgcacatcgagctctcctcctcctcctggatattctgcgaacagcttatgcccatcgagggtccttcctagttggcaccatcaactctcttgcagcagttgtaaagatccgaccgatttactatgaccgcgtgttgccagttttgcttgattttgaccctggcttggagactgcaaagggggcacattcagcaagcctgcggtatgctgtaagagcagcttttttggggtttctacggagtccccaccaggcaatgattgagtctaaagacatattggtaaggcggctgcgtgttctcagccctggtgaggcaatggaacaaaatattaggcaggcagagaagatgtctagaaatatagagcgtgcttctcgtgctagcaaggatgagtctacatcatgggagatgccttatggagatataaatcggaagaaacctgctgttcgatcaagtgatacttttactacgtctgatggcatagctaagagagcaagatttgacatgtctgccacttcaaacctgccagttctgggattgtctgattattctgatatgcaggctgacaatgatgccagtgtgggtcattcatccgatccagctatattgaataatgaagtgtctcctgtcgagaagatgattgaaatgattggcgctttgcttgctgaaggagaaagaggagctgaatccttgggtattcttgtctcaacagtagaggcagatgtcatggccgacattgtgatagaaacaatgaaacatctaccggaagcttcatttcatttagcaacaaataacggtgtccagcaactgaattttaaatattcctctggtctcgtaacacaaaaccttccagccaattcagactccacactattcactgcacaatctacacccacagcagatggagtcagcatctcaccatctgatgcctttgttatgactagcgttcatgatgctaagcgtgatccaagaagggaccctcgtcgcctcgatccgcgtcggatagtttcatcttctgctgtaaattcgatacaggtgaagatggaaaccaatagtgtgcatcaaacagataatttgtcgaacacactctactccaattctcggaaggctgaaaactattcagactatcaaggagatttacacaaaaatgaaggtgaacagcagtcagcttctcaacctaatcaaacaattgccaaagacaagttggagcttctggatgttgtcactgaaccggagccaacatttgaagtcgaggcaccagtggatgtcaggattcattcttctgatgttgatgaagatatagtgaaacccatgtcttcagtggttaattcacttgacgaatccgatagcatggatttagaggttgacccctttttaccagctccaaaggcaccaacaccagacgacaccaatgatgacttgccaattattacatctcagttggaattaagtgaaaaagggaaaatctcaattaacaaactagccattggccggatacttgatgattacaagaaaaatagtttcaatgccagattttctttgcttgctcatttgatcgcgcagagtgctgctgatgataacattatggatttgattcagaggcacattatctttcactcacatgatcaggaggggtatgaactggcaatgcatgtgttgtatcagctgcagagtatcagtgttgctaattcaccagaaagctctacctccacctctaaacattacgagaagttctttatatcacttgcgaggtccttgattgattcactgcctgcttcagacaaatcttttagcaaacttttatgcgatgcaccatatctacctgagtctttgtttagattactggaggatctttgcatgtcagaagacaacagccaacaattaaaggatggagatggggaccgtgttacccaaggcctgggaactgtatggagccttatcttgggtcggcctccgcttcgccatgtttgcttggatattgctctgaagtgtgctgcccactctcaagatgaagtcaggggaaaagcagttagattggttgcaaaaaggctctatgatctaacatatgcaacagaaaaaatagagcagtttgccatagagagccttgtgggagttgctaatgagcatactgtggacacagatattaattcgaaatctttgaaagaatcgacagctgagattgaggtaggtagtcagggaacttcagtaagtggctcccagatcccagatactgagttctctgaaaatgggccattcaagacatcatcggtttctacaaaacagtcagcagtatctgtatctgaggcaaagcggcgtacttctttgttctttgcactttgcaccaagagatctagtcttcttcaacatctgttcaatgcttatggaaggtccccaaaagttgtcaagcagtgtatccattggcatatgcccaaccttataagaaatctggggccctcgtgtcctgaattgctgaacattattcataatccacctgaaggcagtgaacatcttattaccttgacactgcaaacattgactgaagattcaaatccctcagctgacctagttgctgctgttaaacaattatataataccaagctgaaggatgcatctattctgattcccttactgccttcatttccaaaggaggaggtattgcctatatttcctaggctagttgatctcccgcttgagagattccaagacgtacttgctcggatattgcagggaactgctcatactggtccagcattgactcctgctgaagttctcattgcaattcatgatattaaccctgaaaaagataaagttgccctaaaaaaggtcacggatgcttgcacggcttgctttgagcaacgcacggtatttactcagcaggttttggagaagtcacttaatcaattggttgacagaataccaattcctcttctttttatgagaacagttattcaagcgcttgatgcttttcctgctttggttgattttgtcatgggaatactctccaggctcatcgataaacagggcactgaaaatagcacacaacaacaat

SEQ ID NO: 218307 - DNA, 1963 bp, Zea Mays
cttcgctgacctctaaacctaaccgcccatgggcaaaggggcccctcctgccgttgccacagccacctccgtccctgaggcgccggtcttccaccccacagacgaggagttcgccgaccccctcgcctacgtcgcccgtatccgccccctcgccgagccctacggcatctgccgcatcgtcccgccgtcctcatggtccccgccttacgccctcgacttcaaggctctctccttccccaccaagaggcagcccatccaccgcctcctcgcccgccccgcccccgctgaccccgacaccttcctcctcgactatcgccgtttcctcggggcttcctccgcacatcgccgtggccgcaggaagggccttcccaagtcgccctctctctcggatggtcgcccgctcgacctctgccgcctgttccatgctgtcaagcgcttcggcggttactacggtgcctgtgaggggaagcgctggggcgacgtcgtccgcctcgttgatgataaggcgccaatgcacatatcagagtgcgccaagcacgtgcttgcgcagctatattacgagcatctctatggctatgagaagttcgccaacccacagcatgggaacaagggaaggaagcagccacggcccggatctgatgatcgaccatcggtttctcgttcacaggacgaagagagcaacatatctgttactggggagatggttgaggaggttacaggccggaaaaggagaaatttctcacgcaaggaattaggcagagggacatctcatggtcgttatggccgtgttgttaacatcactggaaataatgtggcatctgctgttgcccagaagcggacgaggaggaactctgatgctgtggttaccacagtcgatgaggtgtctgctggtgtccggaagcggaaaaggagaaagtctgatgccgcgtctaccgtgtttaatgatgaagtggatcaagtttgtgagcagtgtagtagtgggttacatggggatgtcatgctcctatgcgatcgctgtgataaaggctggcatttgtactgtttgtcgccgccgctcgagcgagtgcctccagggaattggtattgctcagattgcctcaactccgatagagattgttttgggtttatccaaaggaggaagtcctgcttgcttgagactttccggcggtttgacgacagggtgagaaagagatggtttgggcagaggaatcccagccgtattcaaattgagaagcagttctgggagattgtggaggggaaggcaggggaacttgaggttatgtatgggagtgacttggacacttcaatttatgggagcgggtttcctcgtcttggtgatacagtgccatcatctatggacctagagacgtggcagaaatactgttcaagcccgtggaatttgaacaattttccgaatctgcctggctcagttcttaggacagtcaaggataaaattcctggtgtcatggtcccatggctctacatagggatgctgttttcgtcattttgttggcatgttgaggaccattgtttctattcaataaattatttgcattggggtgagccaaaatgttgggtatggggtgcctggagcaaaagcaaatgcctttgagcaggttatgcgccaggccttacctgatctgtttgatgcacaaccggatctgctttttcaccttgtcacaatgctgaatccatctattttacaagcaaatagcgttccagtatatagcgtgatgcaggaacctggaaacttcatcatcaccttccccaggtcattccatggtggcttcaatttaggtttgaactgtgccgaggctgtaaattttgcccctgctgattggttacctcatggtggaattggggctaatctatatcgtttataccgcaaagcgcctgtcttgtcacatgaggagcttctgtatgtggttgcaaaggtttctcccggcccttcttccgcttccta

SEQ ID NO: 218308 - DNA, 3857 bp, Zea Mays
tccccccacccaaccgtaccctcccgcccctctcctcctcctgcaccttcgccggagcaccaccccctcgccgtcttgcgcccccgcctccctcgcacatctcactccttaccgtaccctccgcctacctctgctccccttatccatcctcgagctcacctgccgcgtggatcgcctcggcacattttgcttcttattatttttttttacctccccgcctgagcgttagctggttggcggatgtacgtgtcctgaccggagatgaagattcctctgtcttgaggggttgatctcggggagccgcctttagtggccggccgtccttggccccgccgcgtcggccatggacatggagaggggggcgggaagcgagcaggggtcgcccgatagcgaaatgggcgaaggcgacaacgatagcgtcggctacggcgcggagatggaggtggacgccgggagcggctcggctccggcgagctcggcgtccgcatcggcctcggtctccgcgtcggcgtacgcggcgcgcgccggcgccttcgacggggtcgaccctttcgagggcatggagttcgacgacgaggaggacgcctggacgttctataacgtctacgcccaccgcgtgggcttcagcacccggatcagcgtcatgcaccggtcgcgccgggacggctccgtcatgtcgcgccagttcgtctgcgccaaggagggcttccgcacttaccgcgggaagaatgaggtttcccgtgctgatgccgcagacgctggcgacgacgatagtgggaggggtcggaggacacgcgctgtcacccgggttggctgcaaggccatgatccgggtgaagaagcaggacaatggccgctggagtgtgactaagctggagactgcacataaccatcccctggtccccacgaaccaggcacactgcctgcgtccgcacaagccactgtcggagtgtggaaagcaccgtccttttgggggccatcgaaatggcggctcgcttctggcaattgagccaccgccaccacctcttacgccgcctgtgcctcacacaagcgtagctcaagtggttcctcagtatttttcggatggtatcgggaatgccactagagtaattttggattatgtcaaacgcatgcaagctgaagatccagcgttcttttatgccatgcaatttgttgaggggcgtccagtgggtaatgtgttttgggctgatgcgagggctaggacgacatacaaagactttggagatgccgttgtcttggatgactactgcaaaaggagcaagcatgaactgccacttgtcgcttttactggagttaatcaccattgccagccaatcctatttggctgtgccatcatggcacataacaatgaagtatcctttgtttggttgtttgagacatttctcttagcaatgtctggatgccaccctacatctcttattatggagcatgataatgttttaaaaccagctgctttgaaagtatttcctctaactaggctccagttttgtaagtggcacatcatgaacgaagcacatgataagctgtcatatctcctagatgcatttccatcattccatgacgactttattaattgcatcaatatgtctgagacaataaatgagtttgaagaaaattggaaggcattaatttctaaggccagctctcaaaaaagtgaatggcttgacttggtgtacaattgccgtcatcattgggtcccggtatatctgagagatacattctttggggatgtgtcgttaaagctgcagtgttctagcaggagttcgttgtttgaaggttatattagtgccaaaactgattcacagtcattcattcagcaatatgaaaaagctttagactgttgttatgagaaggaggtgaaggaagaatttgaaacaaaatattcacttccggatattaagacatcatctcctatagaaaagcaaggagcagagttatatacgaggtcaatgtttttgaaattccaacaggaattgatatgtgccactgcttacactgctgaaatggtgaaagaggagggcaatgcttcaatttatacagtggccatatctgaaggaagtgagaagtctgtaacagttcagttctgttcttctggaagttctgcgacatgtagctgtcggatgtttgaatattttggtattgtctgcaggcacatacttactgtgtttggtgtaagaggtgtctctgcacttccttctcattattttgtaaaaagatggacaaagaatgcattggatagaagcttaggcaagaatgttgatgaagttagcagagaggagctcaaggaggagccaagaagtagcgctgaagatggtgagcaatccctgacatggcgttacaacagtttgtgtcatgaagcactaaggtatgctgaagagggagcatcatcattagaggtttatattgtggcgatgcaagctcttcaagaggctgctaacagggttaatatggccaagagaggtattggacaggtagcaccattagcggtaatgccaattgcagcacaaccaccagaaagttttgcaagaaatcaggagattacttccaataagcaaaagaagagaaaaaagaattcaagtagctcaagggagaacgccacatcaaatcaacttatttgataagttttctgggttacctgaccaaaatgcaccagcaacttcaactggaaatctgcaaggtggagtaacaaaatccataggggctgattcacgaataaaagagagtcatgaattatcccaagctaatggtaacaggggatgcagtgtaaatacattaaactctagtgctgcgcgacagctcgtgactgtccctattggattgtgccttccacccactgatggctccgagatatctgcggcttgtttgaactctgtagactctggagatatcagtagcaatggcaagttatcacttggtcttcatcaatctcagtcatctgcacaacagccagctacaccgtcacagacaaaaacacttgacagtattgattgtcgtgcaaatcctgagggttcatctataagggctgcagccattgcagccggtgcacgcattggatcaccatctgatgcagctacaatcataaaagcggctcagtcaaaaggcgccatctacattaggcctggggaaataatcccgaattacctgaaaccactagcaccaaaaccactttcctcgctaccaccgatgaacccagggcagctcagacgatttggtgattctgctgccgcgaaggatgcaatcttcggttcttcggatggcacggacgatgacgacgaggaagacactgatgacgaggaggacgacgagctgactgacaacgatgcagaacatgaataatcttctccccctgcactaacctctcctaatggtatgtgacgtggtgatcttcaacaacctcttcaaccaatggaatcttgtagagcatagctgtatacatgtttatagtctgtatttaaggccccagctgccacctccatgagccaagaattcttctttgatctctctctctcacttagcatgcctagaagccccacttatttgacctaaggacaaacattggactccttaatctccttttttcttctgttggctcctggcgaggttggtggtggtgggtctgatggtcagttcacatgtgtagctggttagctatgttatgtacagcatgagttgtacgctggcgaactgctttcaacagtccaaaattttgtaccctgtttttctcttgctggaaagggatttgttggaactgagctcacaggtcctttgttgattggacttggcttggaagagtggttggttcgttgctggaaaaaaaaaatcaaaattgattctttg

SEQ ID NO: 218309 - DNA, 1378 bp, Zea Mays
ttcgttcgttgtctcccgcgccggctcggaaccctctcgtcgtcgcgctcactgtgtagcacatcctctccggtgtacggctccaacgacaagggctcaagatgatgtgtgcggagtcggatggagtggcttcgcatgctggacgttggcggcgttgtgcttgaagttgaagacgttgtggtcaaccacgtcgtcgcttccagaccgaatctggttttgggcacgcagaatgacttcatacaatttgtcttatcaaccatgttatgtatgaactataggcactgatggttctgacttcaatatgtgcatacatgatggttgaaagggaattaggcttacacctttttcctaattgattttggtggttgaattgtccaacacaaataattggactaactagtttgctctagtctataagttttacagatgccaaaggttcacaacaagccaataaaaagaccaaagatgggttcaaataaagagagctaaagacatcccaaagacaccctggtctggcgcaccggactgtccggtgcaccagggcactcgacgctgaacttgctaccttcgggaaaatgggaggtcgctccgctataattcaccggactgtccggtgaagcaccggacagtgtccggtgtgccagcggagcaacaactacttcgtacgcaacggtcgactgcaacgcatttaatgcgcgcctgcgcgcgcagaggacagagcacgcacagaaggcgcaccagacagtctacaggacctgtccggtgcaccaccggacagcccagaggccccaccagtcagagctccaacggtcagaacccaacggccggctgacgtggctggcgcaccggacagtgtccggtggcgcaccgaactgtccggtgcgccatgcgacaacaaccttctaacgaccactttttggtggttggggctataaataccccaaccaccccacattcaatggcatccaagttttccaccttcaacacattacaagagctatagcattcaattctagacacaacaaaggagatcaaatcctctcccaagtccggaatcactccaaatcaaatagtgactcgagagagtgacatttgtgttcatttgagctcttgcgcttggattgcttcttttctttctcattcttcttgtgatcaactcaattgtaaccgaggcaagagacaccaattgtgtggtggtccttgcggggactttgtgtcccatttgattgagaagagaagctcactcggtctaagtgaccgtttgagagagggaaagggttgaaagagacccggtcttggtgaccacctcaacgaagtgaccgtttgagagcgggaaagggttgaaagagactcggtcttggtgaccacctcaacgggg

SEQ ID NO: 218310 - DNA, 1268 bp, Zea Mays
taatcacccttgcaaattgactttatatatggaagcgggtatggacgtatggttggattcctgcgtggcgcactgggccctcggtgagagggaaagattctaacaactaaagaaaaacaaaattgccatggtggcccccacagtttttgttgttacgacaacaccaaaaaatgaagggcaaaaccaagcgaagccaggccaagcaactttcttgttgtcctttcgtctcacagcggcagcaggatccattagatgctcgggtggagcactgagccttttccggcggtgagttgagctgagcagaaccgtgctacctagccaatccacaggaggaagagaggagaacgggagccctttttatgacaagaagggaggcgccaggcgtgtgattaacagttttgaagggagagttacctgcatctgcatggaagagggaggcgacccgcagcttccgagcatctccgcacgcaccacgtccgaaggcgcggggggcgtcgacttggatctccttgagcagctactgtctgacgacaacggctggctcgaggtggtctcacgctcgcccaactcggtagcgtttcctccactctcagccttcttctcggctgacgtgacagccaccacagtgacgacgacggcgacggcagcgccggccgcgaacgccagctggtgaattcagacgggtggcgcgagcccctcctccgtggaggagcagttcagccaggccctgtcctacatccgagatacgcagagcgacggcgacgtcctcgtgcagctctgggtgccggtcaaccacgatgacgggaaactggtgctgaccacaagcgagcaaccgttcacgctcgaccaccgctccgacagcctcctccggttcagggaggtgtccaccaagtaccagttctcggccaatgttaagtcgggggattcgccggggctgtcagggagggtctttatcggcaggctccccgagtggtcgccggacatcaggtacttcaccagctacgagtatcccagggtaagggatgcacaatacctcgatgtccatggcaccatgggtctgccagtgttcgagaagggaagctacaactgcctgggcgtcatcgagctgatcatgataaggcagaagataaacttcacctctgagctcaacaccatttgcagtgctctccaggcagttaatctcagaagtacagaagtttcaagcattccacgcataaagatcggagcacaaatttgagatgttcctgaagtgataaattacactaaat

SEQ ID NO: 218311 - DNA, 1389 bp, Zea Mays
taatcacccttgcaaattgactttatatatggaagcgggtatggacgtatggttggattcctgcgtggcgcactgggccctcggtgagagggaaagattctaacaactaaagaaaaacaaaattgccatggtggcccccacagtttttgttgttacgacaacaccaaaaaatgaagggcaaaaccaagcgaagccaggccaagcaactttcttgttgtcctttcgtctcacagcggcagcaggatccattagatgctcgggtggagcactgagccttttccggcggtgagttgagctgagcagaaccgtgctacctagccaatccacaggaggaagagaggagaacgggagccctttttatgacaagaagggaggcgccaggcgtgtgattaacagttttgaagggagagttacctgcatctgcatggaagagggaggcgacccgcagcttccgagcatctccgcacgcaccacgtccgaaggcgcggggggcgtcgacttggatctccttgagcagctactgtctgacgacaacggctggctcgaggtggtctcacgctcgcccaactcggtagcgtttcctccactctcagccttcttctcggctgacgtgacagccaccacagtgacgacgacggcgacggcagcgccggccgcgaacgccagctggtgaattcagacgggtggcgcgagcccctcctccgtggaggagcagttcagccaggccctgtcctacatccgagatacgcagagcgacggcgacgtcctcgtgcagctctgggtgccggtcaaccacgatgacgggaaactggtgctgaccacaagcgagcaaccgttcacgctcgaccaccgctccgacagcctcctccggttcagggaggtgtccaccaagtaccagttctcggccaatgttaagtcgggggattcgccggggctgtcagggagggtctttatcggcaggctccccgagtggtcgccggacatcaggtacttcaccagctacgagtatcccagggtaagggatgcacaatacctcgatgtccatggcaccatgggtctgccagtgttcgagaagggaagctacaactgcctgggcgtcatcgagctgatcatgataaggcagaagataaacttcacctctgagctcaacaccatttgcagtgctctccaggcagttaatctcagaagtacagaagtttcaagcattccacgcataaaggagcatgattcactgacttgtgaaccattacctttatgggaaaagaaaaactccataagcagccctctggccgtctgactgaatctctaaaaatgttgtgattggcttcttatatttcttctcatcgccttttatcaggaagaccatcaaaccaaactattcaaacttca

SEQ ID NO: 218312 - DNA, 2218 bp, Zea Mays
cgtaatactcatcagtgcttcattcacctagcaagctcaggcgacctctcgctgctgagctagctgagctgaggatggcggcagcgtggaggccgcgtgacaacgatgacgacgacgaggacgatgcgggcggcggagccgatgatgatgatccgcacaggagtggccctaggcctacgcagacccgtgttgtaagaggatttgtggaccaagaaagtattcaacaaatattccactatctggaaccacttattagtagggtggtgcgagaggaaatccagaacatcttttcgcattgtcacaatgatcacatgccaatcaggtctcttcctctacgcatccgagaggcacatgtcttgccccatctgaagctagtctttgctaagcagcttaagcaaccaatcttcacaaacaacaaaatcgttgatatagcgaacaacccaattgaaatccatctcatggacacgacaaccaactctatgatcccaccagcagatactcaccttggaccatcatcagtagtaagactagaagtgctggttctgaacggtgattttcagtgtgaggaccgtgatgtgtggacggctgaccagtttaatgcagtggttctgaaggctagagaagggaagagaccattgctcgtgggctcactcaatgtccctatgaacaatcatggagtggctgtgattgatgatgtgttctttactgataattcgagctggataaggtgccggaagtttcgaattggtgtgcgcatcatgcccgcggatcatcttggatcaagagtcaaagaggcagtgagtgagagcttcaccgtcagagatcatcgtggtgaatcgtacaaaaaacactatcctcctttgatgactgacaacatatggaggctcaagaacattggaaaagatggaccaatcgataagaggttgcagtctgaggggattaggaacgtccaggacttcttgaagcttaacaccatagatcctgaaaaactccaagctctcgtcggcatgtcagataagcaatggaacacaacgctgaatcatgcaaaaacgtgtgacatgggacggaaatgttacactttcaagactgtagggtgtgacattacctttaaccccataggagaggtcttacgggcaagaattggagaccatacatttcctctgcaagaactgcacccatatcaactgttccatgtgaagcaactggccgctcaggcataccagatgtgggatcaactggaagaagtacccaatgaaaaattatttgctgcaaataagagctttgttccaagaagtagttctgatcaggagcggactgagagccaagcagagagcatgatcagctcagggtcgcagaatactaagtatcttgactacacaggaactgctacctctggtgccgcagcaatgccgaacagctgcagcacatcagattctataggagctgctccagctgatgatgccatgctctggagaccgagcataccaccagaatgtaacttcagctggcaggactcagcagcttgttgggattaagtggattaacctttcatcgatgttgcttgtttcctgtttccaataatggcatgtttgatccatagtacttattgtactattgggtgaaatgttatgcttttgaacatgcgactgcttgcacgcggtttttcaattcaataaaactatgtgaacacaaggtcgttgatatatgcccttgtagtttaggtttgtgataaataattatcaacagagtagcatcttcctacacgacagattgaacaccaaatcagtgctcaagagaagaaatatggatctaggctcctacacatgtgaaaattgcatacgacagaaagaggaaacatgggatcatctatttctgaaatgtagcttcgacaagagatgttgggtaatggtcgggatcacgtcaacccagtccttgaacccacacaatgcaatctgtggtatgcgaaggaagttcacacaaccctggtccatggagacagttatcacaatgatatggtgcatttgaaaatgcagaaatcagtggatcttgaaaaacactcctccgaccacctagcggtgtaaaatcatgttcgttcaagcgatgaaccttaacacctacaagatgcaggatatggtagcttaaaatgtcagacaatggatacacacattgtaatacgagattgtaatctataaacacatatatagaaaagtaataaaat

SEQ ID NO: 218313 - DNA, 1827 bp, Zea Mays
atggcacacccatcgctcccggcccgcggaaccgggagccccggaaagagctcaacgccgcctaggagctcgctccacccaagaaacggtgcgcagagcgcccggttcctcccccgcctgcgtgcgacggccttggtgatggcgtaccgtcggaagcaggccatccagcgatcggccaccttcgtcgaggaccaccgccagacgtcgtcgggcggctccgcgtcgccggccgtcgcgtccccgcgcgccacgcggttcgcggacgacagccgccgcccagaccgctcctcttgcctcgccgcgcaggccatggcgacctcgtccgacgcgcgtggggatggggacctaacgctaccttccttcagcgagcgcctccccaccgcggcggcggcgtcccagtgcgccgccgagccgagtagcccggtgcaggaccctgtcacccatctctacacatccacgacgagcctaaacgacgaggggcccaagtacgacctcgagctatccaagaaagaccaccggaagcatgggttctgggggcttgtggctcagaaagccaaagtcatgctggacgaaaacggcacaccacgccctcaggctaagacctctgaatcgctctggtcctacgatcgggtccaaggatcgttgggaggcaggctggacatcagagggaagatcaaggacgttcttcagcaggagggcctgctggtggtggccgacagcacgacgcccggcaccagcggcggtgtcgtcgtcgctgcccggaagctgcagatcaggaggaaggcgtgcagcatggcgaacctgactccggccacccccgacatggagtcccctcggatcatcaaggcctctcgcgacgtagcgaacgccatggcggccaagttgaagctgctgcagcgggagctcaaggcactgaaggccgacctgtccttctccaaggagtggtgcgcgcagctggaggaagagaaccggctgctccgggacggcaaccacgacgccgacgaggacctgcagctggagacgctgctcgcggagaaggcgcggctggcgcacgagaacacggcgtacgcccgcgagaaccggttcctgcgggaggtcgtcgagtaccaccagctcaacatgcaggacgtcgtcggcctcgacgacgacgatatcgacgccgacgccgattacgacgtggagttggaggctgagcagtaccaagatcgccgcaggtccctgccgttccaccaactcgtgctggaggaagaggagcaccaggcggccgatccgggcaccgagccgcagtcgccgtctcggtgcacggagtcgccgcgaatgctaagcacgaacagcggcggcagccctgaccacgagtcgtcgcagcggatgctgaacacgaacagcggcgtcgggattgcaatcgaatcccctaggaataggatgctcagcacaaacagcggcgagtcgacccagagcttcgatcaagaatgatgctccttttttgccagaaacgagcaaacgacgaagggcggctgatggttcttcgtctctgatttgtcattgcgatttattagattctaattcacctgatcaatccttctttcgactccagtcccattgtagttttctcgcttatatctagtgaccaaatactctttcggatgagagtgatttctgcggttcagtcccattgtacttttctcgcttattgtgctattcagcacatctcattcgatggcattgacagcttgcaaatgactattcttatatcgtgcagctgtaccacgtttggatccacccaccgtggagagatcaaaacatatacttgccaaaagtcaaagcaac

SEQ ID NO: 218314 - DNA, 2144 bp, Zea Mays
  misc_feature (2144)..(2144): n is a, c, g, or t
catgtgttggatgaaagaatggacccatttcttggtagattggctagaccagtcaccattgaccaatcatggtttaccgcccagggtgatctgtccttgctcaacagaccggcttccagtgacactaagacttctgcagagcttaacaatggtttaatcgagttcaacgatgcaactgcgccatcgccaggattgtcgtgtcataattgctctagtgtcgcaagcaacttcaaaccatttgcaactgtagtgtcagggctgcatcaacacttcttggatgcaaatgtagaagttacttacgcagaatacttggatttgatgaaagtggaagtcgatcagcagcttaataagctcatcgaggatataagggtcctcaagagctataacgtggctcataaatgtgacctaaatgacccgtgctctacactaggccatgttgggaagctgactgagatagacgaggggttcaacagcttgaagttgctgctggttgtggtgttccgacaaattagagagatgctcacactggttaattcttcaattcatgattttcagtgggagcatgagttacagttagaaattactggctttattattggagactgtgtcagaggtcttaaggatgaactagagaggaagttgtatgagcaaagctccattgtgaacagtctaagaaaaaattcgcaagaaactgtggctcagtgtgcttccatccgtgaagacctgattgctatttctaatatgctattaccttcagaagaggaacaccatattcctctgtgtagacatgaaagtttgggtaattggagcgacagatggaagttcagctttttcagaaagataccacaaaaggatcactctctatcttcctctgaggaaaatcagaaatctgcaacacagaaatctataagtcccagtgaagttatttcagaaaaatctgacttccgacatctgaagggcatgactggacaagaaattcttaactatttcagatctgagatcagtaaattgaaaatgttgcatgagctggatttgcaggagaaaacagaagagctgttcaaattcaaacgagagaaatggtcactggctctcaagtacgatgtagaatttgagcctttgaggaagagattccctgaagtcatttcaagatttgaccaaattatgtccaatggaatggaagcacctacaatcagtactagtgatgcagttgatgaaaggagcagattgaatagtagaattgattcactatactgtgaaaaccagcatcttaggaatttgcttgcagagaagacaaagaatgttcaggaattatcctgccagatatctgatgccagcaagaaaatgtcatctcaatattatctagagaaagaacatttgagacaagtcaagaacattaaagaagagtatgaggatctatatgttgaaagtacaataagagatgaaatttaccaaactgttacaagcaaattggttgatagtcatagggacatcttggaggagactacccaaattttgcatgctaaagtttcctcacttgaagctgcacattcagaaaaggacatggcgctgtgtttatctaacgaagaaaataggaagctgaaggaaaagttgtcaatactagaaaaggtgcatttcatcaaagataatcagcatgatcaattgctaatgaaacaagagagtgaggaaatgatactccgtgatattgagatggagccccacgtgccgccacaaagatcatgtcagatttctgatcaggatatgcagtatgaagaactcatcaagctgaatcagacattagagatggcctcaaccaccttaaaagaagttgaaacaaaaaagttggattacagtgacatcactagtgaaagaaagcaagaaaaacagttagattccatcctgatatctatcatggatttgtcaaaagaatttgtggagatggaacataaaatgtcagaagaaataaaaggaaatgagaaaaagacggagaatctaaatgatcggtgcaaccatatggtgcagcaggccatcgtactgacaaagaagggcctgtggtacaagcaaatgcttgagataagacgttctgagcttcaaaaggctgaatctgaggttgacgttttaggaggcaaggtcaatgcactcttaan

SEQ ID NO: 218315 - DNA, 2175 bp, Zea Mays
atagagtcgagtccagcgctcgctgcgctcgtcgccgcgcccctcacctcgagcaaagaggagcgacaatggccatggccgcccccgctttcctcctgccatcactgttccccaagcccactctcctcgccgcgtccctccactccagcttcccacgcggcctctccctccgctgctcgcccaacggcgccgccgtgccggaattccctgaacctgcctcgcgccgcggccgcaaaaagtcaccgtccccgtcggcgccgaagccgagggctacgaggaggagaaccaagaaggcggaccgggatcccgactcggagggcgaggaggagccggtgaagcggaccaaccgccggacgaggaagtccaagggagaggctaaacaggaggaggtggcccaggcggcgaatcacgggacgggggatacgattcaaaaggccaacgaagaggaggatgcggtggaagtgggtagcgacgacgacgatttcgcgaacgagtggccgccgctggtgtgctgcttcggcgcgccgcggtgggagttcgtacccacggtgcgggtgtcggaccgccagatgcatcccgacatgtactccacgtggaggcacctgcaatgggaaccgcccgagttcgcgcgcgcgccggggagcgcggcgagcaacgtggcgattgcgctcacccggctcggcgggcgcgccgcagtgctgggcaaggtcggcgacgacgacttcggccgcgagcttgtgtaccgcatgaactgcgagcgggtgcagacacgtgccataaagttcgacgacaaagcggtcaccgccacggcgcgcatgaaggtgagcttccgggaccgggaggacggcaagggcgggacgaaacttgtagccgagacggtgaagagtgccgccgaggactccctccgcaggactgagatcaatgtagacgtgttgaaagaggctagaatgttccatttcaattcagaagtcctgctaaacccctcaatgcatgacacgctcttcagagccattgagctgtccaagaaatttggaagcaaagttttcttcgatctcaatttgccattgccattgtggacttccaaggataaaacaaaggaggtgataaacagggcgtggaaagaggctgaaatcatagaggtgtcaagggatgagctggaattcctcctagatcatgagtactatgaatacaagagaaacacccctcctcagtattatcttgaaggatttcattttacaagaaactggccacagtactaccactacagccctgaagagatcgctcctatttggcatgacggtataaagatcttgcttgtgacgtatgggacacttcggatccactattacacacctaagtttcatggctgtgtggttgggacagaggatgcactcataactccatacaccactgaccgaacaggttcaggggatgctattgtggctgctgctattaggaagctgacaacttgtcctgaaatgtatgaagaccaggatacattggagaggcaactgagatttgctgttgccgctggaatcatatcacaatggacaattggtgctgtgcgaggatttcccactgagagtgccacccagaacctgaaggaagaagtctatgtgccttctatgtggtgaaatgataaaccatttgtgatgggaatgaacaaatatatgatacaagcatacttgatgaatggtctaacagaactgaacaagggggttttccttttttttgcgacaatagagctacaagagcaacttacatgcactaattggtctatggttgctttagttaggcggcagacaggtaggagtttgtgcttcatattgtccgatgaacaaggaatctttctatcatctggttgttctgcgaagggttccgctgtacgtacgactcatttgtacaacgccttttcaatcaacggagaaccaggatacaaatggcggaaaatcactcaaatgtactggttcatttgccaagaacgcaagattcatctggttgtaccggagatgtactttaggtgaagtatttccctttctgtcaatgtgatctgtgagaaacacctgtccctacgatttagcctgtggtttgtaactatgctgtgttttctgtggttactgcattctaacatgaatttacagaatgatttcttttcacttaaaagttgaatttcaa

SEQ ID NO: 218316 - DNA, 640 bp, Zea Mays
ggcgtgaagggcgactgttaccagggaaggaatcttgcatcatcgcctgctaatataatctactccacttggactgtgcttgttgcaagcttcaggttcagctccactccagtgaggtcactcgaccagctgtaatgggtgccgtagcaagcagcaagttcatatgcagagttgttctagtcgccaatacacaagtgcagcgaagggtaaacaatatcaagacacagagttagacgattcctagtcttcatgtcaaaatgcacatctctaacagggcttggtagtagctttacttcagcagttcagctcacgctagtggtaaaggtttcgagaatattagtacccttccgtcttaaaatagaagtagttttagctcttggtttatatatacaagtgtttgatgaatattttggcacagaaatagtatactgctactgatgcacgattcccatagtgagtggcgaagaacgagagagagtgtaaaatgaattttattttaaaaaacattgcgcgcggatcaaatgattcgtgaattaaaataacgaagctcttaaaaaaaagcagggctccgttaccgaagagtataatcgttaaaaaaaagttgaggaaccagaacctccgtcgatttgaacacataaac

SEQ ID NO: 218317 - DNA, 416 bp, Zea Mays
atggtgctgatatttatgtcaccaactaagcttagtatgaaaatacatctcatgatcaatctgatgggaaggaatcttgcatcatcgcctgctaatataatctactccacttggactgtgcttgttgcaagcttcagtgcaggccacctggtgaactaggaatcccctggtcgatcgagatcgagctgctgcaatgcaagcctgttgttggctttcgcgttggctcccacccggccgttgtttaattttactcatcctgcctcgtcggcagtttgtttttggcgcctgctgcactcgccttagtacagtaggatacacgtaaggcaaaacggctcggagagcggtcgaggtgtctcagaaaaatgagaactgccgctcacagtttggagaagaacagctcgaactcaacaacaaaa

SEQ ID NO: 218318 - DNA, 2981 bp, Zea Mays
ggtcctctttttctttggtagcatcggtaggtggagctgccaaacgctatcccatccgcgtgtcgccatgtgccgtgctgggtgaaagcttcttctcgaaggaacagcagctgcctgccttctctcctcttgctagcttgcacagtatagtacaattctaatcttgttgccatctgaccaatggacctataataacctacaccctcgtctcgtctcgtctcgtctatctacctctttgtcctccggatctatcggaatcttccggccaaagtgtagcgtccacgactttccttttccgtgtatagaaatagaatttatattcatccatatacggtatactacctcttttctcattcgatacacgtgcatatacggatacggaatttaaccttgttgtcgctcaaatttcaagatatatggttatctccaaaaccgtaaatcagactgataaaccatgattggaaataaagtatttaaaaactacagttttttaaatgccaaaacatatttataatttttctaatcacagtattgataactttattttggagctaagtttctaaaactgtgaaagtactaaaacatagctaaaactgtggttttgaaaaaatagagtctaaaagtctaccaaacactgcattaagaaaaataatacagtatcttaaatactacagtattcttaaaaaacagagaaggccatatattaagaaatggtgtagttacatttatgaaaagatataattgttactcttttaaaaacaatttataactataaattatactattaagctgtaactgtttttttaatttttacgcatgagaagaaaccgcgaatcaaggtcggtttcgatgagcccggatcataggtgcaaggcatcgaacccgtgactattctctccttggcgtcgtcgtcgtccttgttggcgatggcaatgtcagggccgctggacagcgacctccgtatactgtttgtccacatgcaatgcaaagctggagtttggcgagctacagctagtcagctacacagggtcgctgccattggccaggcgtctatcggttggctgccacttccactcccaggcagcggacggagcattgcgtcgcgacgcggtcatcgcggcgagcgacgcggactgggcggtgggggggccgtcacgtatctcgcccgggaacgcctcccgcatttttttacccctagctcattaggataggactagtagtaggacccttggaggagcagtcgcgtcacggacatgcggacacagcgggatccagcaccaagagcctaggaaggccaggggcaggggtcctcgccctcgccgcaatggagctgctggccaaggcgcccgtgctgggctgcgccgggaagatgcagaggcagcggcaacgggggtccgcgctgggcaggtggatttgccgtgccgtggcgccgccgagggccgcgccagccacgccgccgagggtgcggctcagggacggccgccacctggcgtacgccgagtccggggccagcaaggaggacgcgaggttcaaggtcgtcttctcccacggcttcaccggctcccgcctcgacaccgtccgcccggcgccggaagttgcggaggagctgggcgtgtacatggtgggtttcgaccgcgccgggtacgggcagagcgaccccaaccccaaccggtccgtcaagagcgcggcgctggacgtggaggagctcgcggacgcgctggggctcggccccaagttctacgtcatcggcatctccctcggctgccatgccgtctggggcgccctcaaatacatccccgacaggatcgccggcgcggcgatgatggcgccggtggtgaactactggtggccagggttctcgccggagctggcggcggaggtgtacgcgaagcaggaggtgggcgaccagtgggcgctgcgcgtgtcgcaccacgcgccgggcatcctccactggtggatggagcagagctggctgcccacctccacggtggtggccggcaccacgccgctgcccaacgagcgcgacgccgagatccggagcaagatgaaggcggacggcacgttccagcagaagcgggagcaggcgacgcagcaggggatccacgagtcctactaccgcgacatgaccgtcatgttcggcaagtgggagttcgaccccatggcgctgccggagccgccgtgccccgtgcacctctggcagggcgacgaggacggcctcgtccctgtcgtgctgcagaggtacctcgccggcaagatcggatggatcaactaccatgaactccctggcaccggccacttcctgtcgtcggtgcctgggctcggagacaacgtccttaggacccttttcagtgacaagcagtaaacaaacaatcctccctcacgacgtatcgaagctttcgagcatggtggtggtggtggcgcattagttcattttattattgtaaaggcccgtggttgtcgctgattagagatgataaaataatggtgatgtagatgcaagaccttaaagtgaaatactatatcagagatgtaatatacatacatagtgatgacctttctgttttcattataaaacaaattgtctagtcaagtgtgtgtgtgtgtgttttgccacgataacaaaggtgtcgctaaaaagataaacccagttaatcgcatgacagatcaaaattcgctttgtggcgaatatccatatacagactctctacatgctcgtgcaaatggatatccaggagcaggttaggctttagcttctccagatgacccaagcaagatccatagcgactgaaacatagcaatttcaattgttaaaaaaaaaaagaaacttgaaacaaaatacagtagaacatggcgcacagcttccgaaaagatccaaatgcgaactacaattaggttacacatgacccataaaatttgagatggccacacaacaccagaagtctcagtgatccaaattgatgattaataccttgctaatggat

SEQ ID NO: 218319 - DNA, 3346 bp, Zea Mays
attctctctctcctttccccactactagctgcccgtcacccgccgctctgttccatccagcctgcgccggtcccattcgcccgccattccgccgcgcgccgccggcagggcgccgcgtcccgggaacgcgcgcgtgcggtgcgggcgcggggggattcgtcgcgcgcgggcaccaggagagggagggggcgcggggggattcgtcgaccgcgccacctgggaactgggatgccgtgatcgacgccgcgcgcctggagcctggggatggggcgggttggcctcggcgtggcggcgggttgcgcggccgccacgtgcgcgatcgctgccgcgctggtggcgcgcagggcgtcggcgcgggcgcgctggcgccgggccgtcgcgctgctcagggagttcgaggacggctgcgccacgccgccgccacgcctgcgccaggtcgtcgacgccatggtcgtcgagatgcacgccggcctcgcctccgacggcggcagcaagctcaagatgctgctcaccttcgtcgacgcgctgcccgccggaaatgaagaaggaacatattattccatcgatctcggaggaacaaactttagagtgttaagagttgaagttggtgctgggtctgtggtcacccgtcggaaggttgaacttcccatccctgaggaattgaccaagggtacaattgaggagctattcaactttgttgccatgactctaaaggaatttgtagaaacagaagatgggaacgatgaacaacgagcgcttggtttcacattttctttcccagttagacaaacatcagtatcttcggggtcattgattaggtggaataaagggtttttgattgaagatgcggttgggaaagatgtggctcaatgcttaaatgaagctcttgctaggaatggactaaatgtgcgagttactgcactggtgaatgacaccgtggggacattagctctaggacattatcacgatgaggatacagtggctgctgtgatcattggtgctggcaccaatgcttgctatattgaacgcactgatgcaattattaaatgtcagggtcttcttacaaactctggtggcatggtagtaaacatggaatggggcagtttctggtcatcacatttgccaagaactccttatgacatctcccttgatgatgagacacaaaaccgcaatgatcaggggtttgagaaaatggtctctgggatttatcttggggaaattgcaaggctggtgctgcatcgaatggctctagaatcagatttttttggtgacgctgctgataatctatgtacccccttcacattgagcacaccactcctcgctgcaattcgcaaggacgattcaccagatctgagcgaagtcaggaagatactgcaagaacatctgaagataccggacactcctctgaaaactcgaaggctggttgtcaaagtgtgcgacatcgtcacccggagagctgcccgcctagccgccgctggtattgtcgggatactgaaaaagctcggccgtgatgggagcggtgttgcttcaagcgggagaacgggagggcagatgaggcggacggtggttgccatcgagggtgggctgtacgagggctacccggtgttcagggagtacctagacgaagccctggtggagatcttgggggaggaggtggcgcggacggtggcgctgagggtgacagtggatgggtctggggccggcgctgccctccttgccgccgtacattcgtcgaatagacagcaagttcacagagagtaccaagctgtcatgggctgggctgacagaggacagggatccttcagtaataagaagcccgatatgagaacagcacataccataacggaagtacgttcgtgggccacgagccacaaaggccgaaagcgtgcgccattcgaaaaacgcgacggtttcttccagaaggctccgaggctccaaccacacgtcggttcctccgactccgcgcgcgtctcccgccgttccgccggcaccgtacacgatggctctccaattcgattaatcggctctgtggctgtcggatcaagtttcgcttgtacagttacgacaaggattacacggattgtgcgacgaatgatgcacgggaggaggatagtacggtacaaacaaggcactcctgagtgggatgagatgctagttacaagtgaaataacaggcagtgttatttgttaatcaaggcactactaccctcaagcaactttctgcactgttgataaccgggatactggttcattgaatgtgcaatgctgccgtaacctgagagagacggtgctgaagaaaggaaccccactaggatcttgccaaagacttccttagcaaatctgcggatggagctcctcggtattagaagattcagccaaggatgtggaacttcccagaggccttgtgccctcagtttcaactcagaggtgtgcaccctgtccaagaactccagtgtcgtcactattgaagttcttggttagctcgaggcagtatagtactcttccatccgactgaaaatggcttgcttcgactgggtcttgtggcttgaaggacgccctccagttgttgaggacgcctgtcctgtttatgatgacaaaaccttcaacgtagtcaaaggagttctctgccattatcagcatctcctggtcctcggtgaagctttcaaaatccgagctcaagtgcaatccttgctctggtgatgatcccgaactgaccaagaccaccgagagcagcatagaagagatcagcgttatcatcgggtgagcaggtttatgaacattgaagtgaacttcaggcagtggagcagaatctagagggcggtgcggagcattctttaaagaagcttatgatgtttttcttactgagtcaatgtatgcataagctaataatatttctgaaaattattagagcgatattgctggtgcaacatcctatcctctggaagcatagtagatagaggtttctctatattatctgtctctaagggctctttctcacaaaacttcaactttgaacaaatactatgaagagcatgattgtattctgcaacagatttgaattcttgcagatgaagctgattccactcatgattggccgaaggtcatatgagttccttctgctgttcatagcgctctttacgagctttccataagttatgtgggcatctttccataaggtactcttgcttgagatattaatgaatgtagagcctcaaaaggaaaagagcagtgttctttttaacattattaactgggttatcaccaatgattggtgttgcaatagcatcaataatctcacgagaagtaaaaataatttcaatgtctgaagcccccaagttaggtaattt

SEQ ID NO: 218320 - DNA, 1415 bp, Zea Mays
cgccggcagtggcaccgagcacgagacgaacagacctctaaaacctagcagaggcccgcgccgccgccgccaaccgcgacgaggaaggaagcaggaacgcgatgccgaagtcgaagcgcaaccgcccagtgaccttatcgaagaccaagaagaagccaggtttagagcgcaagggcaaagtagtcgccgagataaaagatgctgtcgacaaatacagcagcgcctatgtttttacctacgataacatgaggaatcagaagctcaaggacctcagggagcagctcaagtcttcgagcaggatttttctcgctggaaagaaggttatgcagatagcgctggggcgttcgcctgctgatgaagctaaaacaggcctccacaaactttccaagttccttcaaggcaactctggtctgttattcaccaatcttccaagggatgatgttgagaggatgtttcgagaattcgaggagcatgattttgcaaggacaggaagtactgctatcgatacggtattctagttttgcttttcatgtatatccctggtctggtttcttcaaatagactggctaggaaaaccatgttctgctgaccaatgtcaagtttaggctcttggtgttaatgtattaccagtatatactgatactatcacgcacacagtggtaacagtactttgacaatggcacttatttgtagtagctctgtagtgccattttcggtttcttgtataatgagtttcaccaaatttacaacattttacaaacaacatctacaattcctcaggttgagcttaaggaaggccctctggaacagttcacacatgagatggagccatttctacgcaagcaaggacttccagttcgcttgaacaaaggtgttgtagagttggttgcagaccatgtagtttgtgaggaaggaaagcccctttcgccagaagcagcgcagactctgcggctgcttgggatacaaatggcgacattccgtctataccttgtgtgtcgctggtcgggcgatgactttgaagtttacaaagaaggcttgatgcacctaggagctgatgaatcctcttaagcttttgtttcctgtatacacaaagggctcacttgctgtctttgctgggacagcttttggtaactgtgcgtgtggccatgtaccagggagtattggaagttagaaagatacaatctgcaggaaaaaaatgctagtgtatttcttcattctgccccatatttactcaactgttgaaaggtgtaagctgatttgaatatcgtatcagcattagttaagaggttgattgatatcatattcttgtaatgatagaatattctattggaaaccataaccctaactagagttttggggttccctattaatagggagaaaacaaatataggttgggccaagcccattataggtgt

SEQ ID NO: 218321 - DNA, 1435 bp, Zea Mays
atgatatttatttacagcatactcagagcctcaacggtcaaagtgtacagcggaaaatgtgctcttgaccggcggtagatatacgaggacgcttggcctgtcggtttcagcttcccccgttagctggactggatcgtaataatcggaaacttgtcagggctaaaacgcaggtagcgctgcgctgctgaagacgctcggtttataagcgaaggccaaaaactccaagatgcgaaggtgggaaagcaagcaagcggcggccggagcatcttggagacaggaagaaggggtggtagtaggtgaaaccggaggcggcaggatagggagagggagcgagagtagaggccacgcctgcttgacagcaaggcccgtgcgctcggcggcggcggcggcggatatgggcgactctggcggctctgttgtgtcggtggacgtcgagcgcatctccttcggcggcaaggaacatcatatacaaaccaaccatggatctgtatctgttgccatatatggtgaacatgataagcctgctcttattacctacccagatattgctttgaaccatatgtcttgcttccaagggctactcttctgtcctgaagcagcttcattgctgcttcataatttttgcatttaccatatcagccccccaggacatgagttaggagctgctccgattttgccgagcacacctgtggcatctcctgatgacttagcagatcaaatcgcagacatacttgatttttttggactggattcggttatgtgcttaggtgtcactgcgggcgcatacattcttactctgtttgcaacgaagtatagggagcgagtactaggacttattctcgtttcacctctatgtaaagctccctcatggtctgagtggttttataataaggtaatgtcaaatttactgtattattatggcatgtgtaatgtcgtgaaggatattttgttgcagcgctactttggaaagggagtacgtggaggctcagctgaacctgaatcagatattgtgcaggcttgcagaagtatcaacggcagtgtgtgaacgtgtggcgatttatccaaactatcaacgagagaaaagacttgacagagaacctgaagcagctacagtgcaggacactaatttttgttggtgagaattcccagttccatgctgaagctgttcacatgactgcaaagcttgataggcgatatagcgctcttgtggagtacaaagcttgtggctcggttgtgacagaggagcaacctcatgcaatgctgataccaatggagtactttctcatgggatatggactgtacaggccaagccagataaactgtagccctcgtagccctctgaatccgttttgtatatcaccagagctccctctctcctgagagcatgggggtttaagctaagcccattcaagaacgcgaggctaaccttaatgca

SEQ ID NO: 218322 - DNA, 3581 bp, Zea Mays
gttcgccccttacctttttcttgtccctttcacggtttcaccccgcgttcgctctctctcccgtggcgacgactgggcggccgccgcagccgccctagcccggtgcggctcttcgtcgggtccttcgccggcgacgggcacctaccaggatgaagacgaggatagtgtactccagggagtttctgctgtcgcttggcgagttggagcattgcaagaagctgccccctgactttgatgcagcgctgcttagtgagctgcaggagctgtcagcgggtgtgcttgagagaaacaagggctactacaacacatcccagggacggccagatgggtcggtgggatatacttactcttctcgtggtgggaacactggagggaggtgggatactcgctcatctggatcaagtgatcgggatggggaacctgatcgtgagtctcagacacaggggcgtggtgcaaaccagtacagacgcaattggcagaacacggagcatgatggcctacttggccgtggtggtttccctaggccatcaggatatactgggcagttgtcatcaaaggatcatggcaatgcgcctcagctaaacaggacatcagaacgctaccagccaccacgtccttacaaggctgctcctttttcacggaaagacattgactcgattaatgatgagacattcgggtcttctgaattatcaaatgaggatagagcagaagaagaaaggaagcggaggggtcagattttcttactgcaacataaaacacccttttctttccccactccaatcatctatgctgtctcacattgccctatatgcagcatcttttgagttgatgagaaaagagcaacataaagcagtgctaggaaagaagagtggtcctgatatcctgaaggagaatcccagtgatgatatattttcaaagttacagacatctactgcaaaggcaaatgccaaaactaaaaacgagaagttagatggttctgtagtatcctcatatcaggaagataccactaaaccatcttcagttctactagctcctgcagccaggccgcttgtcccgccgggttttgcaaatgcattcgctgacaagaagcttcagtcacagtcgtctaacatcacacatgagccgaagctagaggatgaccagtcagcaacagggttcacatctgaaagtaaagagaagggagtttctggtaacgatgctactatgggtccaaagcacacgcttccacctggtagtgttacctcttcagctgaattggcttctagcgttctgaaagggagcgaggattgggatgctgatgtaatggataagtattctattggaaaagaaggcaaatctaaaaatattgatccagttaggaaggatgattcagtagcaatcttagaacagttctttggcaatgttttatcgaaaagcggcagcaacctaccaacttatgttgagccattgaaaactgatgatgacatgatcacttctgtgccagaatcatccaaatttgctcattggtttcttgatgaagacttgaaacctgcagaagacttatcttcaaagagcctgctctccatgattgtcaaaaatgaaaatccaggtctagaaaatttaaaccatactcctttatctgatgctgctgcccagaatttatccccaagagcacctattgataaacttgattctgcatcagagcttatctcatttacatcctctacgcctgccaatggagttcttgaacaatgcatccattctgatgttccagaggcagttcctattatgacatgtgaggatcttgagcagacgatgttagcacaggttagcaatagcagctcaactcagataaatgctacaaaggagcaactgactgttatggatgaaccagttgccatgcagaaagtaactgtagataatcatgcatcacaacatcttctttcattgttgcaaaaaggaacagataataagggagcaccttccctgggtttccagagagaatcaactgatgaacctctgagtgttgacacaaatttaatggcaaatggtggaatatctggaagtgatccggttaacagtgttgaaaatgttcctacttctgggaaggacttgacattggaagcgttattcggggctgcatttatgaatgagctccactcgaaagatgcaccagtttctattcgaggagccacaactggtggtcctactgagtttgcagagatgggtaaaactctgttgtcatctagccatgaaggatactaccctgttgaacagaccgtacacttcaacaatactaaagatgctgctgtccgtagagaaccaggtattgagcattcagcagtacctggtctaagtcaggggagtgctagttttgacaagaaaggaatggaaattcatctgcctgaagaagataatttgtttaccatgagtgattctctgcttggtcaaaattctgatattttggcatcagtaggatccagcagggttgaagggctattgcctgaaaaggcacttgataacctcagctataggtttcaaagtcttgtgcctggtgatgcagaacacattcaagtatatggtcctgatgcacttggatctcatcctcgtgattctcagaatatgtatcatcttctacagggtaggcctcctatgatagcacctcaccctatgatggatcacattgttaataggaaacagccagctccatttgatatggcacagtcgatacaccatgattctcaccgttctttcccatctaatgtgaatcatatgcaacataatcttcatgggccaggggtccctcacttggaccctgctggacatattatgcgacaacacatgtccatgcctggaagatttcctccagaaggcttgccaagaggtgtccctccatctcagcctgtgcatcacatggctggttatagacctgaaatgggtaatgtaaataatttccatatgcaccctcgccagcccaactatggagaatttggattgatgatgccaggtccagaggtgaggggcaatcatccagaggcgttcgaaaggttgatccagatggagatgtcagccagatcgaagcaacagcaggtgcaccaccctgcaatggccgctggccgtgtgcctagtgggatgtacgggcacgagcttgatgcgaaattgagatacagatgatggatgcctggatgcttcactccgtacagaggacctggagggttgtagcatgtacatctgaacgggtgatggaacggagtgggtctaagatctgtaggagcggaagtctaccgggaaaaggggttatggtgtgctgaatggaagacgtggcgtcgacgtcttagcagccacatgtgtaatgacgttttctgtctactgtttctgacgactatgcagtttccattttgtataagctctgttatgcaaaaggaaaaaaaaagaagaaaaaaaactgagtcagattaacagattggcgacagtgtccgcttgaccctatatcttcaacttgtttgaaaggaaatgaccacgcgtcatgccgagacgtttgtagctgatagcactgtttgagacgttttgctgaacggaaaggctgctgcctccaggttttt

SEQ ID NO: 218323 - DNA, 3411 bp, Zea Mays
gtcagacagagacccgcaggcctgcaagcaccgagcagcatcgcccatccggccatcccccatcccgcatccaaggcctgcctcgcctgctcgttcgacctcaaccagtccgccctgtatatccatggcaggatgaagacgaggatagtgtactccagggagtttctgctgtcgcttggcgagttggagcattgcaagaagctgccccctgactttgatgcagcgctgcttagtgagctgcaggagctgtcagcgggtgtgcttgagagaaacaagggctactacaacacatcccagggacggccagatgggtcggtgggatatacttactcttctcgtggtgggaacactggagggaggtgggatactcgctcatctggatcaagtgatcgggatggggaacctgatcgtgagtctcagacacaggcagggcgtggtgcaaaccagtacagacgcaattggcagaacacggagcatgatggcctacttggccgtggtggtttccctaggccatcaggatatactgggcagttgtcatcaaaggatcatggcaatgcgcctcagctaaacaggacatcagaacgctaccagccaccacgtccttacaaggctgctcctttttcacggaaagacattgactcgattaatgatgagacattcgggtcttctgaattatcaaatgaggatagagcagaagaagaaaggaagcggagggcatcttttgagttgatgagaaaagagcaacataaagcagtgctaggaaagaagagtggtcctgatatcctgaaggagaatcccagtgatgatatattttcaaagttacagacatctactgcaaaggcaaatgccaaaactaaaaacgagaagttagatggttctgtagtatcctcatatcaggaagataccactaaaccatcttcagttctactagctcctgcagccaggccgcttgtcccgccgggttttgcaaatgcattcgctgacaagaagcttcagtcacagtcgtctaacatcacacatgagccgaagctagaggatgaccagtcagcaacagggttcacatctgaaagtaaagagaagggagtttctggtaacgatgctactatgggtccaaagcacacgcttccacctggtagtgttacctcttcagctgaattggcttctagcgttctgaaagggagcgaggattgggatgctgatgtaatggataagtattctattggaaaagaaggcaaatctaaaaatattgatccagttaggaaggatgattcagtagcaatcttagaacagttctttggcaatgttttatcgaaaagcggcagcaacctaccaacttatgttgagaaccagccattgaaaactgatgatgacatgatcacttctgtgccagaatcatccaaatttgctcattggtttcttgatgaagacttgaaacctgcagaagacttatcttcaaagagcctgctctccatgattgtcaaaaatgaaaatccagagcttatctcatttacatcctctacgcctgccaatggagttcttgaacaatgcatccattctgatgttccagaggcagttcctattatgacatgtgaggatcttgagcagacgatgttagcacaggttagcaatagcagctcaactcagataaatgctacaaaggagcaactgactgttatggatgaaccagttgccatgcagaaagtaactgtagataatcatgcatcacaacatcttctttcattgttgcaaaaaggaacagataataagggagcaccttccctgggtttccagagagaatcaactgatgaacctctgagtgttgacacaaatttaatggcaaatggtggaatatctggaagtgatccggttaacagtgttgaaaatgttcctacttctgggaaggacttgacattggaagcgttattcggggctgcatttatgaatgagctccactcgaaagatgcaccagtttctattcgaggagccacaactggtggtcctactgagtttgcagagatgggtaaaactctgttgtcatctagccatgaaggatactaccctgttgaacagaccgtacacttcaacaatactaaagatgctgctgtccgtagagaaccaggtattgagcattcagcagtacctggtctaagtcaggggagtgctagttttgacaagaaaggaatggaaattcatctgcctgaagaagataatttgtttaccatgagtgattctctgcttggtcaaaattctgatattttggcatcagtaggatccagcagggttgaagggctattgcctgaaaaggcacttgataacctcagctataggtttcaaagtcttgtgcctggtgatgcagaacacattcaagtatatggtcctgatgcacttggatctcatcctcgtgattctcagaatatgtatcatcttctacagggtaggcctcctatgatagcacctcaccctatgatggatcacattgttaataggaaacagccagctccatttgatatggcacagtcgatacaccatgattctcaccgttctttcccatctaatgtgaatcatatgcaacataatcttcatgggccaggggtccctcacttggaccctgctggacatattatgcgacaacacatgtccatgcctggaagatttcctccagaaggcttgccaagaggtgtccctccatctcagcctgtgcatcacatggctggttatagacctgaaatgggtaatgtaaataatttccatatgcaccctcgccagcccaactatggagaatttggattgatgatgccaggtccagaggtgaggggcaatcatccagaggcgttcgaaaggttgatccagatggagatgtcagccagatcgaagcaacagcaggtgcaccaccctgcaatggccgctggccgtgtgcctagtgggatgtacgggcacgagcttgatgcgaaattgagatacagatgatggatgcctggatgcttcactccgtacagaggacctggaggtgtggtttgttgtatggttgtagcatgtacatctgaacgggtgatggaacggagtgggtctaagatctgtaggagcggaagtctaccgggaaaaggggttatggtgtgctgaatggaagacgtggcgtcgacgtcttagcagccacatgtgtaatgacgttttctgtctactgtttctgacgactatgcagtttccattttgtataagctctgttatgcaaaaggaaaaaaaaagaagaaaaaaaactgagtcagattaacagattggcgacagtgtccgcttgaccctatatcttcaacttgtttgaaaggaaatgaccacgcgtcatgccgagacgtttgtagctgatagcactgtttgagacgttttgctgaacggaaaggctgctgcctccaggttttt

SEQ ID NO: 218324 - DNA, 3355 bp, Zea Mays
gtcagacagagacccgcaggcctgcaagcaccgagcagcatcgcccatccggccatcccccatcccgcatccaaggcctgcctcgcctgctcgttcgacctcaaccaaacagacccgcagtgcgttcgccccttacctttttcttgtccctttcacggtttcaccccgcgttcgctctctctcccgtggcgacgactgggcggccgccgcagccgccctagcccggtgcggctcttcgtcgggtccttcgccggcgacgggcacctaccagggcgtggtgcaaaccagtacagacgcaattggcagaacacggagcatgatggcctacttggccgtggtggtttccctaggccatcaggatatactgggcagttgtcatcaaaggatcatggcaatgcgcctcagctaaacaggacatcagaacgctaccagccaccacgtccttacaaggctgctcctttttcacggaaagacattgactcgattaatgatgagacattcgggtcttctgaattatcaaatgaggatagagcagaagaagaaaggaagcggagggcatcttttgagttgatgagaaaagagcaacataaagcagtgctaggaaagaagagtggtcctgatatcctgaaggagaatcccagtgatgatatattttcaaagttacagacatctactgcaaaggcaaatgccaaaactaaaaacgagaagttagatggttctgtagtatcctcatatcaggaagataccactaaaccatcttcagttctactagctcctgcagccaggccgcttgtcccgccgggttttgcaaatgcattcgctgacaagaagcttcagtcacagtcgtctaacatcacacatgagccgaagctagaggatgaccagtcagcaacagggttcacatctgaaagtaaagagaagggagtttctggtaacgatgctactatgggtccaaagcacacgcttccacctggtagtgttacctcttcagctgaattggcttctagcgttctgaaagggagcgaggattgggatgctgatgtaatggataagtattctattggaaaagaaggcaaatctaaaaatattgatccagttaggaaggatgattcagtagcaatcttagaacagttctttggcaatgttttatcgaaaagcggcagcaacctaccaacttatgttgagaaccagccattgaaaactgatgatgacatgatcacttctgtgccagaatcatccaaatttgctcattggtttcttgatgaagacttgaaacctgcagaagacttatcttcaaagagcctgctctccatgattgtcaaaaatgaaaatccagagcttatctcatttacatcctctacgcctgccaatggagttcttgaacaatgcatccattctgatgttccagaggcagttcctattatgacatgtgaggatcttgagcagacgatgttagcacaggttagcaatagcagctcaactcagataaatgctacaaaggagcaactgactgttatggatgaaccagttgccatgcagaaagtaactgtagataatcatgcatcacaacatcttctttcattgttgcaaaaaggaacagataataagggagcaccttccctgggtttccagagagaatcaactgatgaacctctgagtgttgacacaaatttaatggcaaatggtggaatatctggaagtgatccggttaacagtgttgaaaatgttcctacttctgggaaggacttgacattggaagcgttattcggggctgcatttatgaatgagctccactcgaaagatgcaccagtttctattcgaggagccacaactggtggtcctactgagtttgcagagatgggtaaaactctgttgtcatctagccatgaaggatactaccctgttgaacagaccgtacacttcaacaatactaaagatgctgctgtccgtagagaaccaggtattgagcattcagcagtacctggtctaagtcaggggagtgctagttttgacaagaaaggaatggaaattcatctgcctgaagaagataatttgtttaccatgagtgattctctgcttggtcaaaattctgatattttggcatcagtaggatccagcagggttgaagggctattgcctgaaaaggcacttgataacctcagctataggtttcaaagtcttgtgcctggtgatgcagaacacattcaagtatatggtcctgatgcacttggatctcatcctcgtgattctcagaatatgtatcatcttctacagggtaggcctcctatgatagcacctcaccctatgatggatcacattgttaataggaaacagccagctccatttgatatggcacagtcgatacaccatgattctcaccgttctttcccatctaatgtgaatcatatgcaacataatcttcatgggccaggggtccctcacttggaccctgctggacatattatgcgacaacacatgtccatgcctggaagatttcctccagaaggcttgccaagaggtgtccctccatctcagcctgtgcatcacatggctggttatagacctgaaatgggtaatgtaaataatttccatatgcaccctcgccagcccaactatggagaatttggattgatgatgccaggtccagaggtgaggggcaatcatccagaggcgttcgaaaggttgatccagatggagatgtcagccagatcgaagcaacagcaggtgcaccaccctgcaatggccgctggccgtgtgcctagtgggatgtacgggcacgagcttgatgcgaaattgagatacagatgatggatgcctggatgcttcactccgtacagaggacctggaggtgtggtttgttgtatgtgcgtggtcactctttgcccagactgctgtgtattatttctgctaacatggtttagcatcagccgtcggtcgcgactgattggaggcctgcctcacttgtagggttgtagcatgtacatctgaacgggtgatggaacggagtgggtctaagatctgtaggagcggaagtctaccgggaaaaggggttatggtgtgctgaatggaagacgtggcgtcgacgtcttagcagccacatgtgtaatgacgttttctgtctactgtttctgacgactatgcagtttccattttgtataagctctgttatgcaaaaggaaaaaaaaagaagaaaaaaaactgagtcagattaacagattggcgacagtgtccgcttgaccctatatcttcaacttgtttgaaaggaaatgaccacgcgtcatgccgagacgtttgtagctgatagcactgtttgagacgttttgctgaacggaaaggctgctgcctccaggttttt

SEQ ID NO: 218325 - DNA, 3547 bp, Zea Mays
gtcagacagagacccgcaggcctgcaagcaccgagcagcatcgcccatccggccatcccccatcccgcatccaaggcctgcctcgcctgctcgttcgacctcaaccaaacagacccgcagtgcgttcgccccttacctttttcttgtccctttcacggtttcaccccgcgttcgctctctctcccgtggcgacgactgggcggccgccgcagccgccctagcccggtgcggctcttcgtcgggtccttcgccggcgacgggcacctaccaggatgaagacgaggatagtgtactccagggagtttctgctgtcgcttggcgagttggagcattgcaagaagctgccccctgactttgatgcagcgctgcttagtgagctgcaggagctgtcagcgggtgtgcttgagagaaacaagggctactacaacacatcccagggacggccagatgggtcggtgggatatacttactcttctcgtggtgggaacactggagggaggtgggatactcgctcatctggatcaagtgatcgggatggggaacctgatcgtgagtctcagacacaggcagggcgtggtgcaaaccagtacagacgcaattggcagaacacggagcatgatggcctacttggccgtggtggtttccctaggccatcaggatatactgggcagttgtcatcaaaggatcatggcaatgcgcctcagctaaacaggacatcagaacgctaccagccaccacgtccttacaaggctgctcctttttcacggaaagacattgactcgattaatgatgagacattcgggtcttctgaattatcaaatgaggatagagcagaagaagaaaggaagcggagggcatcttttgagttgatgagaaaagagcaacataaagcagtgctaggaaagaagagtggtcctgatatcctgaaggagaatcccagtgatgatatattttcaaagttacagacatctactgcaaaggcaaatgccaaaactaaaaacgagaagttagatggttctgtagtatcctcatatcaggaagataccactaaaccatcttcagttctactagctcctgcagccaggccgcttgtcccgccgggttttgcaaatgcattcgctgacaagaagcttcagtcacagtcgtctaacatcacacatgagccgaagctagaggatgaccagtcagcaacagggttcacatctgaaagtaaagagaagggagtttctggtaacgatgctactatgggtccaaagcacacgcttccacctggtagtgttacctcttcagctgaattggcttctagcgttctgaaagggagcgaggattgggatgctgatgtaatggataagtattctattggaaaagaaggcaaatctaaaaatattgatccagttaggaaggatgattcagtagcaatcttagaacagttctttggcaatgttttatcgaaaagcggcagcaacctaccaacttatgttgagaaccagccattgaaaactgatgatgacatgatcacttctgtgccagaatcatccaaatttgctcattggtttcttgatgaagacttgaaacctgcagaagacttatcttcaaagagcctgctctccatgattgtcaaaaatgaaaatccagagcttatctcatttacatcctctacgcctgccaatggagttcttgaacaatgcatccattctgatgttccagaggcagttcctattatgacatgtgaggatcttgagcagacgatgttagcacaggttagcaatagcagctcaactcagataaatgctacaaaggagcaactgactgttatggatgaaccagttgccatgcagaaagtaactgtagataatcatgcatcacaacatcttctttcattgttgcaaaaaggaacagataataagggagcaccttccctgggtttccagagagaatcaactgatgaacctctgagtgttgacacaaatttaatggcaaatggtggaatatctggaagtgatccggttaacagtgttgaaaatgttcctacttctgggaaggacttgacattggaagcgttattcggggctgcatttatgaatgagctccactcgaaagatgcaccagtttctattcgaggagccacaactggtggtcctactgagtttgcagagatgggtaaaactctgttgtcatctagccatgaaggatactaccctgttgaacagaccgtacacttcaacaatactaaagatgctgctgtccgtagagaaccaggtattgagcattcagcagtacctggtctaagtcaggggagtgctagttttgacaagaaaggaatggaaattcatctgcctgaagaagataatttgtttaccatgagtgattctctgcttggtcaaaattctgatattttggcatcagtaggatccagcagggttgaagggctattgcctgaaaaggcacttgataacctcagctataggtttcaaagtcttgtgcctggtgatgcagaacacattcaagtatatggtcctgatgcacttggatctcatcctcgtgattctcagaatatgtatcatcttctacagggtaggcctcctatgatagcacctcaccctatgatggatcacattgttaataggaaacagccagctccatttgatatggcacagtcgatacaccatgattctcaccgttctttcccatctaatgtgaatcatatgcaacataatcttcatgggccaggggtccctcacttggaccctgctggacatattatgcgacaacacatgtccatgcctggaagatttcctccagaaggcttgccaagaggtgtccctccatctcagcctgtgcatcacatggctggttatagacctgaaatgggtaatgtaaataatttccatatgcaccctcgccagcccaactatggagaatttggattgatgatgccaggtccagaggtgaggggcaatcatccagaggcgttcgaaaggttgatccagatggagatgtcagccagatcgaagcaacagcaggtgcaccaccctgcaatggccgctggccgtgtgcctagtgggatgtacgggcacgagcttgatgcgaaattgagatacagatgatggatgcctggatgcttcactccgtacagaggacctggaggtgtggtttgttggttgtagcatgtacatctgaacgggtgatggaacggagtgggtctaagatctgtaggagcggaagtctaccgggaaaaggggttatggtgtgctgaatggaagacgtggcgtcgacgtcttagcagccacatgtgtaatgacgttttctgtctactgtttctgacgactatgcagtttccattttgtataagctctgttatgcaaaaggaaaaaaaaagaagaaaaaaaactgagtcagattaacagattggcgacagtgtccgcttgaccctatatcttcaacttgtttgaaaggaaatgaccacgcgtcatgccgagacgtttgtagctgatagcactgtttgagacgttttgctgaacggaaaggctgctgcctccaggttttt

SEQ ID NO: 218326 - DNA, 3726 bp, Zea Mays
gtcagacagagacccgcaggcctgcaagcaccgagcagcatcgcccatccggccatcccccatcccgcatccaaggcctgcctcgcctgctcgttcgacctcaaccaaacagacccgcagtgcgttcgccccttacctttttcttgtccctttcacggtttcaccccgcgttcgctctctctcccgtggcgacgactgggcggccgccgcagccgccctagcccggtgcggctcttcgtcgggtccttcgccggcgacgggcacctaccaggatgaagacgaggatagtgtactccagggagtttctgctgtcgcttggcgagttggagcattgcaagaagctgccccctgactttgatgcagcgctgcttagtgagctgcaggagctgtcagcgggtgtgcttgagagaaacaagggctactacaacacatcccagggacggccagatgggtcggtgggatatacttactcttctcgtggtgggaacactggagggaggtgggatactcgctcatctggatcaagtgatcgggatggggaacctgatcggcgtggtgcaaaccagtacagacgcaattggcagaacacggagcatgatggcctacttggccgtggtggtttccctaggccatcaggatatactgggcagttgtcatcaaaggatcatggcaatgcgcctcagctaaacaggacatcagaacgctaccagccaccacgtccttacaaggctgctcctttttcacggaaagacattgactcgattaatgatgagacattcgggtcttctgaattatcaaatgaggatagagcagaagaagaaaggaagcggagggcatcttttgagttgatgagaaaagagcaacataaagcagtgctaggaaagaagagtggtcctgatatcctgaaggagaatcccagtgatgatatattttcaaagttacagacatctactgcaaaggcaaatgccaaaactaaaaacgagaagttagatggttctgtagtatcctcatatcaggaagataccactaaaccatcttcagttctactagctcctgcagccaggccgcttgtcccgccgggttttgcaaatgcattcgctgacaagaagcttcagtcacagtcgtctaacatcacacatgagccgaagctagaggatgaccagtcagcaacagggttcacatctgaaagtaaagagaagggagtttctggtaacgatgctactatgggtccaaagcacacgcttccacctggtagtgttacctcttcagctgaattggcttctagcgttctgaaagggagcgaggattgggatgctgatgtaatggataagtattctattggaaaagaaggcaaatctaaaaatattgatccagttaggaaggatgattcagtagcaatcttagaacagttctttggcaatgttttatcgaaaagcggcagcaacctaccaacttatgttgagaaccagccattgaaaactgatgatgacatgatcacttctgtgccagaatcatccaaatttgctcattggtttcttgatgaagacttgaaacctgcagaagacttatcttcaaagagcctgctctccatgattgtcaaaaatgaaaatccaggtctagaaaatttaaaccatactcctttatctgatgctgctgcccagaatttatccccaagagcacctattgataaacttgattctgcatcagagcttatctcatttacatcctctacgcctgccaatggagttcttgaacaatgcatccattctgatgttccagaggcagttcctattatgacatgtgaggatcttgagcagacgatgttagcacaggttagcaatagcagctcaactcagataaatgctacaaaggagcaactgactgttatggatgaaccagttgccatgcagaaagtaactgtagataatcatgcatcacaacatcttctttcattgttgcaaaaaggaacagataataagggagcaccttccctgggtttccagagagaatcaactgatgaacctctgagtgttgacacaaatttaatggcaaatggtggaatatctggaagtgatccggttaacagtgttgaaaatgttcctacttctgggaaggacttgacattggaagcgttattcggggctgcatttatgaatgagctccactcgaaagatgcaccagtttctattcgaggagccacaactggtggtcctactgagtttgcagagatgggtaaaactctgttgtcatctagccatgaaggatactaccctgttgaacagaccgtacacttcaacaatactaaagatgctgctgtccgtagagaaccaggtattgagcattcagcagtacctggtctaagtcaggggagtgctagttttgacaagaaaggaatggaaattcatctgcctgaagaagataatttgtttaccatgagtgattctctgcttggtcaaaattctgatattttggcatcagtaggatccagcagggttgaagggctattgcctgaaaaggcacttgataacctcagctataggtttcaaagtcttgtgcctggtgatgcagaacacattcaagtatatggtcctgatgcacttggatctcatcctcgtgattctcagaatatgtatcatcttctacagggtaggcctcctatgatagcacctcaccctatgatggatcacattgttaataggaaacagccagctccatttgatatggcacagtcgatacaccatgattctcaccgttctttcccatctaatgtgaatcatatgcaacataatcttcatgggccaggggtccctcacttggaccctgctggacatattatgcgacaacacatgtccatgcctggaagatttcctccagaaggcttgccaagaggtgtccctccatctcagcctgtgcatcacatggctggttatagacctgaaatgggtaatgtaaataatttccatatgcaccctcgccagcccaactatggagaatttggattgatgatgccaggtccagaggtgaggggcaatcatccagaggcgttcgaaaggttgatccagatggagatgtcagccagatcgaagcaacagcaggtgcaccaccctgcaatggccgctggccgtgtgcctagtgggatgtacgggcacgagcttgatgcgaaattgagatacagatgatggatgcctggatgcttcactccgtacagaggacctggaggtgtggtttgttgtatgtgcgtggtcactctttgcccagactgctgtgtattatttctgctaacatggtttagcatcagccgtcggtcgcgactgattggaggcctgcctcacttgtagggttgtagcatgtacatctgaacgggtgatggaacggagtgggtctaagatctgtaggagcggaagtctaccgggaaaaggggttatggtgtgctgaatggaagacgtggcgtcgacgtcttagcagccacatgtgtaatgacgttttctgtctactgtttctgacgactatgcagtttccattttgtataagctctgttatgcaaaaggaaaaaaaaagaagaaaaaaaactgagtcagattaacagattggcgacagtgtccgcttgaccctatatcttcaacttgtttgaaaggaaatgaccacgcgtcatgccgagacgtttgtagctgatagcactgtttgagacgttttgctgaacggaaaggctgctgcctccaggttttt

SEQ ID NO: 218327 - DNA, 3533 bp, Zea Mays
gtcagacagagacccgcaggcctgcaagcaccgagcagcatcgcccatccggccatcccccatcccgcatccaaggcctgcctcgcctgctcgttcgacctcaaccaaacagacccgcagtgcgttcgccccttacctttttcttgtccctttcacggtttcaccccgcgttcgctctctctcccgtggcgacgactgggcggccgccgcagccgccctagcccggtgcggctcttcgtcgggtccttcgccggcgacgggcacctaccaggatgaagacgaggatagtgtactccagggagtttctgctgtcgcttggcgagttggagcattgcaagaagctgccccctgactttgatgcagcgctgcttagtgagctgcaggagctgtcagcgggtgtgcttgagagaaacaagggctactacaacacatcccagggacggccagatgggtcggtgggatatacttactcttctcgtggtgggaacactggagggaggtgggatactcgctcatctggatcaagtgatcgggatggggaacctgatccagggcgtggtgcaaaccagtacagacgcaattggcagaacacggagcatgatggcctacttggccgtggtggtttccctaggccatcaggatatactgggcagttgtcatcaaaggatcatggcaatgcgcctcagctaaacaggacatcagaacgctaccagccaccacgtccttacaaggctgctcctttttcacggaaagacattgactcgattaatgatgagacattcgggtcttctgaattatcaaatgaggatagagcagaagaagaaaggaagcggagggcatcttttgagttgatgagaaaagagcaacataaagcagtgctaggaaagaagagtggtcctgatatcctgaaggagaatcccagtgatgatatattttcaaagttacagacatctactgcaaaggcaaatgccaaaactaaaaacgagaagttagatggttctgtagtatcctcatatcaggaagataccactaaaccatcttcagttctactagctcctgcagccaggccgcttgtcccgccgggttttgcaaatgcattcgctgacaagaagcttcagtcacagtcgtctaacatcacacatgagccgaagctagaggatgaccagtcagcaacagggttcacatctgaaagtaaagagaagggagtttctggtaacgatgctactatgggtccaaagcacacgcttccacctggtagtgttacctcttcagctgaattggcttctagcgttctgaaagggagcgaggattgggatgctgatgtaatggataagtattctattggaaaagaaggcaaatctaaaaatattgatccagttaggaaggatgattcagtagcaatcttagaacagttctttggcaatgttttatcgaaaagcggcagcaacctaccaacttatgttgagaaccagccattgaaaactgatgatgacatgatcacttctgtgccagaatcatccaaatttgctcattggtttcttgatgaagacttgaaacctgcagaagacttatcttcaaagagcctgctctccatgattgtcaaaaatgaaaatccagagcttatctcatttacatcctctacgcctgccaatggagttcttgaacaatgcatccattctgatgttccagaggcagttcctattatgacatgtgaggatcttgagcagacgatgttagcacaggttagcaatagcagctcaactcagataaatgctacaaaggagcaactgactgttatggatgaaccagttgccatgcagaaagtaactgtagataatcatgcatcacaacatcttctttcattgttgcaaaaaggaacagataataagggagcaccttccctgggtttccagagagaatcaactgatgaacctctgagtgttgacacaaatttaatggcaaatggtggaatatctggaagtgatccggttaacagtgttgaaaatgttcctacttctgggaaggacttgacattggaagcgttattcggggctgcatttatgaatgagctccactcgaaagatgcaccagtttctattcgaggagccacaactggtggtcctactgagtttgcagagatgggtaaaactctgttgtcatctagccatgaaggatactaccctgttgaacagaccgtacacttcaacaatactaaagatgctgctgtccgtagagaaccaggtattgagcattcagcagtacctggtctaagtcaggggagtgctagttttgacaagaaaggaatggaaattcatctgcctgaagaagataatttgtttaccatgagtgattctctgcttggtcaaaattctgatattttggcatcagtaggatccagcagggttgaagggctattgcctgaaaaggcacttgataacctcagctataggtttcaaagtcttgtgcctggtgatgcagaacacattcaagtatatggtcctgatgcacttggatctcatcctcgtgattctcagaatatgtatcatcttctacagggtaggcctcctatgatagcacctcaccctatgatggatcacattgttaataggaaacagccagctccatttgatatggcacagtcgatacaccatgattctcaccgttctttcccatctaatgtgaatcatatgcaacataatcttcatgggccaggggtccctcacttggaccctgctggacatattatgcgacaacacatgtccatgcctggaagatttcctccagaaggcttgccaagaggtgtccctccatctcagcctgtgcatcacatggctggttatagacctgaaatgggtaatgtaaataatttccatatgcaccctcgccagcccaactatggagaatttggattgatgatgccaggtccagaggtgaggggcaatcatccagaggcgttcgaaaggttgatccagatggagatgtcagccagatcgaagcaacagcaggtgcaccaccctgcaatggccgctggccgtgtgcctagtgggatgtacgggcacgagcttgatgcgaaattgagatacagatgatggatgcctggatgcttcactccgtacagaggacctggaggtgtggtttgttgtatggttgtagcatgtacatctgaacgggtgatggaacggagtgggtctaagatctgtaggagcggaagtctaccgggaaaaggggttatggtgtgctgaatggaagacgtggcgtcgacgtcttagcagccacatgtgtaatgacgttttctgtctactgtttctgacgactatgcagtttccattttgtataagctctgttatgcaaaaggaaaaaaaaagaagaaaaaaaactgagtcagattaacagattggcgacagtgtccgcttgaccctatatcttcaacttgtttgaaaggaaatgaccacgcgtcatgccgagacgtttgtagctgatagcactgtttgagacgttttgctgaacggaaaggctgctgcctccaggttttt

SEQ ID NO: 218328 - DNA, 3650 bp, Zea Mays
gtcagacagagacccgcaggcctgcaagcaccgagcagcatcgcccatccggccatcccccatcccgcatccaaggcctgcctcgcctgctcgttcgacctcaaccaaacagacccgcagtgcgttcgccccttacctttttcttgtccctttcacggtttcaccccgcgttcgctctctctcccgtggcgacgactgggcggccgccgcagccgccctagcccggtgcggctcttcgtcgggtccttcgccggcgacgggcacctaccaggatgaagacgaggatagtgtactccagggagtttctgctgtcgcttggcgagttggagcattgcaagaagctgccccctgactttgatgcagcgctgcttagtgagctgcaggagctgtcagcgggtgtgcttgagagaaacaagggctactacaacacatcccagggacggccagatgggtcggtgggatatacttactcttctcgtggtgggaacactggagggaggtgggatactcgctcatctggatcaagtgatcgggatggggaacctgatcgtgagtctcagacacaggggcgtggtgcaaaccagtacagacgcaattggcagaacacggagcatgatggcctacttggccgtggtggtttccctaggccatcaggatatactgggcagttgtcatcaaaggatcatggcaatgcgcctcagctaaacaggacatcagaacgctaccagccaccacgtccttacaaggctgctcctttttcacggaaagacattgactcgattaatgatgagacattcgggtcttctgaattatcaaatgaggatagagcagaagaagaaaggaagcggagggcatcttttgagttgatgagaaaagagcaacataaagcagtgctaggaaagaagagtggtcctgatatcctgaaggagaatcccagtgatgatatattttcaaagttacagacatctactgcaaaggcaaatgccaaaactaaaaacgagaagttagatggttctgtagtatcctcatatcaggaagataccactaaaccatcttcagttctactagctcctgcagccaggccgcttgtcccgccgggttttgcaaatgcattcgctgacaagaagcttcagtcacagtcgtctaacatcacacatgagccgaagctagaggatgaccagtcagcaacagggttcacatctgaaagtaaagagaagggagtttctggtaacgatgctactatgggtccaaagcacacgcttccacctggtagtgttacctcttcagctgaattggcttctagcgttctgaaagggagcgaggattgggatgctgatgtaatggataagtattctattggaaaagaaggcaaatctaaaaatattgatccagttaggaaggatgattcagtagcaatcttagaacagttctttggcaatgttttatcgaaaagcggcagcaacctaccaacttatgttgagaaccagccattgaaaactgatgatgacatgatcacttctgtgccagaatcatccaaatttgctcattggtttcttgatgaagacttgaaacctgcagaagacttatcttcaaagagcctgctctccatgattgtcaaaaatgaaaatccaggtctagaaaatttaaaccatactcctttatctgatgctgctgcccagaatttatccccaagagcacctattgataaacttgattctgcatcagagcttatctcatttacatcctctacgcctgccaatggagttcttgaacaatgcatccattctgatgttccagaggcagttcctattatgacatgtgaggatcttgagcagacgatgttagcacaggttagcaatagcagctcaactcagataaatgctacaaaggagcaactgactgttatggatgaaccagttgccatgcagaaagtaactgtagataatcatgcatcacaacatcttctttcattgttgcaaaaaggaacagataataagggagcaccttccctgggtttccagagagaatcaactgatgaacctctgagtgttgacacaaatttaatggcaaatggtggaatatctggaagtgatccggttaacagtgttgaaaatgttcctacttctgggaaggacttgacattggaagcgttattcggggctgcatttatgaatgagctccactcgaaagatgcaccagtttctattcgaggagccacaactggtggtcctactgagtttgcagagatgggtaaaactctgttgtcatctagccatgaaggatactaccctgttgaacagaccgtacacttcaacaatactaaagatgctgctgtccgtagagaaccaggtattgagcattcagcagtacctggtctaagtcaggggagtgctagttttgacaagaaaggaatggaaattcatctgcctgaagaagataatttgtttaccatgagtgattctctgcttggtcaaaattctgatattttggcatcagtaggatccagcagggttgaagggctattgcctgaaaaggcacttgataacctcagctataggtttcaaagtcttgtgcctggtgatgcagaacacattcaagtatatggtcctgatgcacttggatctcatcctcgtgattctcagaatatgtatcatcttctacagggtaggcctcctatgatagcacctcaccctatgatggatcacattgttaataggaaacagccagctccatttgatatggcacagtcgatacaccatgattctcaccgttctttcccatctaatgtgaatcatatgcaacataatcttcatgggccaggggtccctcacttggaccctgctggacatattatgcgacaacacatgtccatgcctggaagatttcctccagaaggcttgccaagaggtgtccctccatctcagcctgtgcatcacatggctggttatagacctgaaatgggtaatgtaaataatttccatatgcaccctcgccagcccaactatggagaatttggattgatgatgccaggcccatcaggtccagaggtgaggggcaatcatccagaggcgttcgaaaggttgatccagatggagatgtcagccagatcgaagcaacagcaggtgcaccaccctgcaatggccgctggccgtgtgcctagtgggatgtacgggcacgagcttgatgcgaaattgagatacagatgatggatgcctggatgcttcactccgtacagaggacctggaggtgtggtttgttgtatggttgtagcatgtacatctgaacgggtgatggaacggagtgggtctaagatctgtaggagcggaagtctaccgggaaaaggggttatggtgtgctgaatggaagacgtggcgtcgacgtcttagcagccacatgtgtaatgacgttttctgtctactgtttctgacgactatgcagtttccattttgtataagctctgttatgcaaaaggaaaaaaaaagaagaaaaaaaactgagtcagattaacagattggcgacagtgtccgcttgaccctatatcttcaacttgtttgaaaggaaatgaccacgcgtcatgccgagacgtttgtagctgatagcactgtttgagacgttttgctgaacggaaaggctgctgcctccaggttttt

SEQ ID NO: 218329 - DNA, 3541 bp, Zea Mays
gtcagacagagacccgcaggcctgcaagcaccgagcagcatcgcccatccggccatcccccatcccgcatccaaggcctgcctcgcctgctcgttcgacctcaaccaaacagacccgcagtgcgttcgccccttacctttttcttgtccctttcacggtttcaccccgcgttcgctctctctcccgtggcgacgactgggcggccgccgcagccgccctagcccggtgcggctcttcgtcgggtccttcgccggcgacgggcacctaccaggatgaagacgaggatagtgtactccagggagtttctgctgtcgcttggcgagttggagcattgcaagaagctgccccctgactttgatgcagcgctgcttagtgagctgcaggagctgtcagcgggtgtgcttgagagaaacaagggctactacaacacatcccagggacggccagatgggtcggtgggatatacttactcttctcgtggtgggaacactggagggaggtgggatactcgctcatctggatcaagtgatcgggatggggaacctgatcgtgagtctcagacacaggggcgtggtgcaaaccagtacagacgcaattggcagaacacggagcatgatggcctacttggccgtggtggtttccctaggccatcaggatatactgggcagttgtcatcaaaggatcatggcaatgcgcctcagctaaacaggacatcagaacgctaccagccaccacgtccttacaaggctgctcctttttcacggaaagacattgactcgattaatgatgagacattcgggtcttctgaattatcaaatgaggatagagcagaagaagaaaggaagcggagggcatcttttgagttgatgagaaaagagcaacataaagcagtgctaggaaagaagagtggtcctgatatcctgaaggagaatcccagtgatgatatattttcaaagttacagacatctactgcaaaggcaaatgccaaaactaaaaacgagaagttagatggttctgtagtatcctcatatcaggaagataccactaaaccatcttcagttctactagctcctgcagccaggccgcttgtcccgccgggttttgcaaatgcattcgctgacaagaagcttcagtcacagtcgtctaacatcacacatgagccgaagctagaggatgaccagtcagcaacagggttcacatctgaaagtaaagagaagggagtttctggtaacgatgctactatgggtccaaagcacacgcttccacctggtagtgttacctcttcagctgaattggcttctagcgttctgaaagggagcgaggattgggatgctgatgtaatggataagtattctattggaaaagaaggcaaatctaaaaatattgatccagttaggaaggatgattcagtagcaatcttagaacagttctttggcaatgttttatcgaaaagcggcagcaacctaccaacttatgttgagaaccagccattgaaaactgatgatgacatgatcacttctgtgccagaatcatccaaatttgctcattggtttcttgatgaagacttgaaacctgcagaagacttatcttcaaagagcctgctctccatgattgtcaaaaatgaaaatccagagcttatctcatttacatcctctacgcctgccaatggagttcttgaacaatgcatccattctgatgttccagaggcagttcctattatgacatgtgaggatcttgagcagacgatgttagcacaggttagcaatagcagctcaactcagataaatgctacaaaggagcaactgactgttatggatgaaccagttgccatgcagaaagtaactgtagataatcatgcatcacaacatcttctttcattgttgcaaaaaggaacagataataagggagcaccttccctgggtttccagagagaatcaactgatgaacctctgagtgttgacacaaatttaatggcaaatggtggaatatctggaagtgatccggttaacagtgttgaaaatgttcctacttctgggaaggacttgacattggaagcgttattcggggctgcatttatgaatgagctccactcgaaagatgcaccagtttctattcgaggagccacaactggtggtcctactgagtttgcagagatgggtaaaactctgttgtcatctagccatgaaggatactaccctgttgaacagaccgtacacttcaacaatactaaagatgctgctgtccgtagagaaccaggtattgagcattcagcagtacctggtctaagtcaggggagtgctagttttgacaagaaaggaatggaaattcatctgcctgaagaagataatttgtttaccatgagtgattctctgcttggtcaaaattctgatattttggcatcagtaggatccagcagggttgaagggctattgcctgaaaaggcacttgataacctcagctataggtttcaaagtcttgtgcctggtgatgcagaacacattcaagtatatggtcctgatgcacttggatctcatcctcgtgattctcagaatatgtatcatcttctacagggtaggcctcctatgatagcacctcaccctatgatggatcacattgttaataggaaacagccagctccatttgatatggcacagtcgatacaccatgattctcaccgttctttcccatctaatgtgaatcatatgcaacataatcttcatgggccaggggtccctcacttggaccctgctggacatattatgcgacaacacatgtccatgcctggaagatttcctccagaaggcttgccaagaggtgtccctccatctcagcctgtgcatcacatggctggttatagacctgaaatgggtaatgtaaataatttccatatgcaccctcgccagcccaactatggagaatttggattgatgatgccaggcccatcaggtccagaggtgaggggcaatcatccagaggcgttcgaaaggttgatccagatggagatgtcagccagatcgaagcaacagcaggtgcaccaccctgcaatggccgctggccgtgtgcctagtgggatgtacgggcacgagcttgatgcgaaattgagatacagatgatggatgcctggatgcttcactccgtacagaggacctggagggttgtagcatgtacatctgaacgggtgatggaacggagtgggtctaagatctgtaggagcggaagtctaccgggaaaaggggttatggtgtgctgaatggaagacgtggcgtcgacgtcttagcagccacatgtgtaatgacgttttctgtctactgtttctgacgactatgcagtttccattttgtataagctctgttatgcaaaaggaaaaaaaaagaagaaaaaaaactgagtcagattaacagattggcgacagtgtccgcttgaccctatatcttcaacttgtttgaaaggaaatgaccacgcgtcatgccgagacgtttgtagctgatagcactgtttgagacgttttgctgaacggaaaggctgctgcctccaggttttt

SEQ ID NO: 218330 - DNA, 3714 bp, Zea Mays
cttttccatcggcggcctttcgtttcatcagatcctccgcctctattgggcgccgggcagccaagctgcaggcggatgggcgcgatagcgggaccacatcctgccgccgccgccgccgcctgcccctcttccactccgatccatggagcagcagctcctctgtggtggttgccacacgcacacgcctccgccgccaagcctcccctgcccctgcctccgccgccgcccacggaccctctctgtttcatcgaggtgccacgcgattcatccggaccagctgctgcgtgcccgcctcgtccccgacgtcaccaccagcgccaagctacaaccacgcgacgacgctctccatcggatccgagtcggagtcggagctaccaagcatgctttcaagcgtatattgacgagcctgattaagcctggcggtggtgaatacggcaagttcttcagccttcccgcactaaatgatccaaggatcgataagcttccctactctatacgtgttctcctggaatcagctatccgccattgtgataacttccaagttacagagagtgatgtcgagaaaatcattgattgggagaacacatctcccaagctggctgagatacctttcaagccagcgagatgcattctaatggacaacactggagtcccagctgttgtagaccttgcagctatgcgtgatatgatgccaaagttgggttgtgatccctacaagatcaatccattgattcccgtggatgctgttattgaccatgcagtgcgagtggatgtagcagggacctatgatgcattggatagaaacgaggagttggagttccaacgcaacaaagaaaggtttgcttttcttaaatgggcatccaatgctttccacaacatgcaggttttccctcctggttcaggcactgtacaccagtcttggagttgctggttggggagtaggcggtattgaagcagtcgttgcaatgcttggccagccaatgggcatggttttgcctggtgtggttggattcaagttgagtgggaagttacaggatggtgtcactactactgacattgttcttactatgacccaaatgctaaggaagcacggtgctattggcaaattcgttgaattctatggtgttggtgtgggcgagctatctttgcctgctagggccacaattgccaacatgtctccagaatatggagctaccatgggcttcttccctgtagaccaagtagcattggactatctcaaattgacaggccgaagcgatgaaactgtgtcgatgattgaagcatacctgcgagctaacaaaatgtttgtggacaagcatgagcctgagacggaacgagttttctcttcatatctggagctggaccttagtgaggtggagccttgcgtttcaggccccaaaaggcctcatgatcgtgtccctttgaaggaaatgaagtcagactggcatgcttgcctggacaacgaagttggtttcaagggctatgcggtgccaaaggaacagcaaggcaaagttgtgaaattcgacttccatggaaggccagctgaaatcaagcatggcagtgttgttcttgcagcaatatgtagctccacaaacacatcaaatcccagcgtcatgattggtgctggccttgtggcaaagaaagcctgcgaattgggccttgaggtgaagccatgggtaaagacaagccttacccctggatctgtggttgctaccgagtacttgaaacatagtggccttcaagattatctgaaccagcaagggttccatgtcgctgcgcatggctgcgccacttgtgtgggcaactctggtgacctggatggatctgtatccgctgctatcacagaaaatgatatcgttgctgctgcggtgctgtcggccaaccgaaacttcgaggggcgtgtgaaccctctcactcgggctaactaccttgcctcgccgcctctggttgttgcctatgctcttgccggcactgttgacattggttttgaggaagagcccattggagttggaaagggtggcaaggaaattttcttgagggacatatggccttcaaaccaagagatcgatgaggttgtggagtccagcgtgcagactcacttgttcaagaaagtgtacgactccatcatggaacgtaaccctaggtggaaccagctgccggttccaaaggaggcactgtacccatgggacgacaggtccacctacatccgcaagcccacttacctggagggcatgtccatgacgccgcctggcccgcccacggtgacggaggcctactgcctgctcaaccttggagacagcatcaccacggaccacatctcctactcggggaagatccccgagggcacacctgcggccaagtatctgctcgagtatggtgtggagcccaagaacttcagctcctatggtggccgccgcgggaacaatgaggtggtgatgaggggagcgtttgccaatatgaggatcgtgaataagcttcttaatggcgaggctggtccctggacgatccatgttcctaccggggagaagctctacgtttacgacgcggcaatgaaatacaagtcggaaggtcatgacatggtcatcatcgctggctccgagtacggcagtggcagctctcgtgactctgctgccaagggaccaatgctactgggtgtcaagtcggtgattgcaaagagcttcgagcggatccaccggagcaacttggtggggatggggatcattcctctctgctttcaagcaggagaggatgccgattcactcggcctcaccggacgtgagcgctacaccatccacctccctaccagcaccgccgagatcagtcctggtcaggacgtgaccgtcacgacccacgacggaagatcattcacttgcactcttcgcttggacacacagcttgaggtcacatacttcaaccatggaggcatccttccctacatggtccgcaacctggcggcacaaatgaaataagttgaagtttattggtgggaataaattaaaaggtactcaatgccacgtatttggcgtatgtatgtaaataagtggcacattctaatcttcaattgtattattcgctctggcattgaggtgggtcgtagctgcattatactttctccgcaagacatgagcatggattttgttttagcaacagattatttgtactcttgattctttggttccatgctctcttcggccatctccatgtcaatttgctttgcaaacaatataatatcagcgtgccgtgcccttgtagatttccaaatggttatatgcatatgtactattgaaattgtcattttagtttgcaaacaataccaacgtgcctttgtagatttcaaaatggatatatatgttgtattcaagtttgctatttctagtgaccccatgtggccattggagcccccccggggggggggggggggggggggggatgtcgggagtcagtccaaggtcaccacatttctaggccctcgcagttgttgggttgaatattagaagggctggtaaatgctaggagcctccgacctcttcccgggtctacattagtttcaacccagaaataggggagtatgaaagctcttgtaaataaatcgagtaagactatggagatgacataatctatgaatatcctcgtaaaatctctgagctatttataagaacctagtttttaccttaaatttgaagtacttttttagcttagaacatttgttttatg

SEQ ID NO: 218331 - DNA, 3815 bp, Zea Mays
cttttccatcggcggcctttcgtttcatcagatcctccgcctctattgggcgccgggcagccaagctgcaggcggatgggcgcgatagcgggaccacatcctgccgccgccgccgccgcctgcccctcttccactccgatccatggagcagcagctcctctgtggtggttgccacacgcacacgcctccgccgccaagcctcccctgcccctgcctccgccgccgcccacggaccctctctgtttcatcgaggtgccacgcgattcatccggaccagctgctgcgtgcccgcctcgtccccgacgtcaccaccagcgccaagctacaaccacgcgacgacgctctccatcggatccgagtcggagtcggagctaccaagcatgctttcaagcgtatattgacgagcctgattaagcctggcggtggtgaatacggcaagttcttcagccttcccgcactaaatgatccaaggatcgataagcttccctactctatacgtgttctcctggaatcagctatccgccattgtgataacttccaagttacagagagtgatgtcgagaaaatcattgattgggagaacacatctcccaagctggctgagatacctttcaagccagcgagatgcattctaatggacaacactggagtcccagctgttgtagaccttgcagctatgcgtgatatgatgccaaagttgggttgtgatccctacaagatcaatccattgattcccgtggatgctgttattgaccatgcagtgcgagtggatgtagcagggacctatgatgcattggatagaaacgaggagttggagttccaacgcaacaaagaaaggtttgcttttcttaaatgggcatccaatgctttccacaacatgcaggttttccctcctggttcaggcactgtacaccaggtaaaccttgagtatcttgcccgagttgtcttcaacgaagatggcattctttacttcgacagcgtggttggcacagactcacacaccactatgattaatagtcttggagttgctggttggggagtaggcggtattgaagcagtcgttgcaatgcttggccagccaatgggcatggttttgcctggtgtggttggattcaagttgagtgggaagttacaggatggtgtcactactactgacattgttcttactatgacccaaatgctaaggaagcacggtgctattggcaaattcgttgaattctatggtgttggtgtgggcgagctatctttgcctgctagggccacaattgccaacatgtctccagaatatggagctaccatgggcttcttccctgtagaccaagtagcattggactatctcaaattgacaggccgaagcgatgaaactgtgtcgatgattgaagcatacctgcgagctaacaaaatgtttgtggacaagcatgagcctgagacggaacgagttttctcttcatatctggagctggaccttagtgaggtggagccttgcgtttcaggccccaaaaggcctcatgatcgtgtccctttgaaggaaatgaagtcagactggcatgcttgcctggacaacgaagttggtttcaagggctatgcggtgccaaaggaacagcaaggcaaagttgtgaaattcgacttccatggaaggccagctgaaatcaagcatggcagtgttgttcttgcagcaatatgtagctccacaaacacatcaaatcccagcgtcatgattggtgctggccttgtggcaaagaaagcctgcgaattgggccttgaggtgaagccatgggtaaagacaagccttacccctggatctgtggttgctaccgagtacttgaaacatagtggccttcaagattatctgaaccagcaagggttccatgtcgctgcgcatggctgcgccacttgtgtgggcaactctggtgacctggatggatctgtatccgctgctatcacagaaaatgatatcgttgctgctgcggtgctgtcggccaaccgaaacttcgaggggcgtgtgaaccctctcactcgggctaactaccttgcctcgccgcctctggttgttgcctatgctcttgccggcactgttgacattggttttgaggaagagcccattggagttggaaagggtggcaaggaaattttcttgagggacatatggccttcaaaccaagagatcgatgaggttgtggagtccagcgtgcagactcacttgttcaagaaagtgtacgactccatcatggaacgtaaccctaggtggaaccagctgccggttccaaaggaggcactgtacccatgggacgacaggtccacctacatccgcaagcccacttacctggagggcatgtccatgacgccgcctggcccgcccacggtgacggaggcctactgcctgctcaaccttggagacagcatcaccacggaccacatctcctactcggggaagatccccgagggcacacctgcggccaagtatctgctcgagtatggtgtggagcccaagaacttcagctcctatggtggccgccgcgggaacaatgaggtggtgatgaggggagcgtttgccaatatgaggatcgtgaataagcttcttaatggcgaggctggtccctggacgatccatgttcctaccggggagaagctctacgtttacgacgcggcaatgaaatacaagtcggaaggtcatgacatggtcatcatcgctggctccgagtacggcagtggcagctctcgtgactctgctgccaagggaccaatgctactgggtgtcaagtcggtgattgcaaagagcttcgagcggatccaccggagcaacttggtggggatggggatcattcctctctgctttcaagcaggagaggatgccgattcactcggcctcaccggacgtgagcgctacaccatccacctccctaccagcaccgccgagatcagtcctggtcaggacgtgaccgtcacgacccacgacggaagatcattcacttgcactcttcgcttggacacacagcttgaggtcacatacttcaaccatggaggcatccttccctacatggtccgcaacctggcggcacaaatgaaataagttgaagtttattggtgggaataaattaaaaggtactcaatgccacgtatttggcgtatgtatgtaaataagtggcacattctaatcttcaattgtattattcgctctggcattgaggtgggtcgtagctgcattatactttctccgcaagacatgagcatggattttgttttagcaacagattatttgtactcttgattctttggttccatgctctcttcggccatctccatgtcaatttgctttgcaaacaatataatatcagcgtgccgtgcccttgtagatttccaaatggttatatgcatatgtactattgaaattgtcattttagtttgcaaacaataccaacgtgcctttgtagatttcaaaatggatatatatgttgtattcaagtttgctatttctagtgaccccatgtggccattggagcccccccggggggggggggggggggggggggatgtcgggagtcagtccaaggtcaccacatttctaggccctcgcagttgttgggttgaatattagaagggctggtaaatgctaggagcctccgacctcttcccgggtctacattagtttcaacccagaaataggggagtatgaaagctcttgtaaataaatcgagtaagactatggagatgacataatctatgaatatcctcgtaaaatctctgagctatttataagaacctagtttttaccttaaatttgaagtacttttttagcttagaacatttgttttatg

SEQ ID NO: 218332 - DNA, 3418 bp, Zea Mays
gttctttgtgttgaggcctccatcatctatctcctctctcgtcgtgctggccgaccggcgacgacctatagctcctgccgcctcacgtcgaacgcgccatggccgccaactcaacagctaccaagcatgctttcaagcgtatattgacgagcctgattaagcctggcggtggtgaatacggcaagttcttcagccttcccgcactaaatgatccaaggatcgataagcttccctactctatacgtgttctcctggaatcagctatccgccattgtgataacttccaagttacagagagtgatgtcgagaaaatcattgattgggagaacacatctcccaagctggctgagatacctttcaagccagcgagatgcattctaatggacaacactggagtcccagctgttgtagaccttgcagctatgcgtgatatgatgccaaagttgggttgtgatccctacaagatcaatccattgattcccgtggatgctgttattgaccatgcagtgcgagtggatgtagcagggacctatgatgcattggatagaaacgaggagttggagttccaacgcaacaaagaaaggtttgcttttcttaaatgggcatccaatgctttccacaacatgcaggttttccctcctggttcaggcactgtacaccaggtaaaccttgagtatcttgcccgagttgtcttcaacgaagatggcattctttacttcgacagcgtggttggcacagactcacacaccactatgattaatagtcttggagttgctggttggggagtaggcggtattgaagcagtcgttgcaatgcttggccagccaatgggcatggttttgcctggtgtggttggattcaagttgagtgggaagttacaggatggtgtcactactactgacattgttcttactatgacccaaatgctaaggaagcacggtgctattggcaaattcgttgaattctatggtgttggtgtgggcgagctatctttgcctgctagggccacaattgccaacatgtctccagaatatggagctaccatgggcttcttccctgtagaccaagtagcattggactatctcaaattgacaggccgaagcgatgaaactgtgtcgatgattgaagcatacctgcgagctaacaaaatgtttgtggacaagcatgagcctgagacggaacgagttttctcttcatatctggagctggaccttagtgaggtggagccttgcgtttcaggccccaaaaggcctcatgatcgtgtccctttgaaggaaatgaagtcagactggcatgcttgcctggacaacgaagttggtttcaagggctatgcggtgccaaaggaacagcaaggcaaagttgtgaaattcgacttccatggaaggccagctgaaatcaagcatggcagtgttgttcttgcagcaatatgtagctccacaaacacatcaaatcccagcgtcatgattggtgctggccttgtggcaaagaaagcctgcgaattgggccttgaggtgaagccatgggtaaagacaagccttacccctggatctgtggttgctaccgagtacttgaaacatagtggccttcaagattatctgaaccagcaagggttccatgtcgctgcgcatggctgcgccacttgtgtgggcaactctggtgacctggatggatctgtatccgctgctatcacagaaaatgatatcgttgctgctgcggtgctgtcggccaaccgaaacttcgaggggcgtgtgaaccctctcactcgggctaactaccttgcctcgccgcctctggttgttgcctatgctcttgccggcactgttgacattggttttgaggaagagcccattggagttggaaagggtggcaaggaaattttcttgagggacatatggccttcaaaccaagagatcgatgaggttgtggagtccagcgtgcagactcacttgttcaagaaagtgtacgactccatcatggaacgtaaccctaggtggaaccagctgccggttccaaaggaggcactgtacccatgggacgacaggtccacctacatccgcaagcccacttacctggagggcatgtccatgacgccgcctggcccgcccacggtgacggaggcctactgcctgctcaaccttggagacagcatcaccacggaccacatctcctactcggggaagatccccgagggcacacctgcggccaagtatctgctcgagtatggtgtggagcccaagaacttcagctcctatggtggccgccgcgggaacaatgaggtggtgatgaggggagcgtttgccaatatgaggatcgtgaataagcttcttaatggcgaggctggtccctggacgatccatgttcctaccggggagaagctctacgtttacgacgcggcaatgaaatacaagtcggaaggtcatgacatggtcatcatcgctggctccgagtacggcagtggcagctctcgtgactctgctgccaagggaccaatgctactgggtgtcaagtcggtgattgcaaagagcttcgagcggatccaccggagcaacttggtggggatggggatcattcctctctgctttcaagcaggagaggatgccgattcactcggcctcaccggacgtgagcgctacaccatccacctccctaccagcaccgccgagatcagtcctggtcaggacgtgaccgtcacgacccacgacggaagatcattcacttgcactcttcgcttggacacacagcttgaggtcacatacttcaaccatggaggcatccttccctacatggtccgcaacctggcggcacaaatgaaataagttgaagtttattggtgggaataaattaaaagcaacagattatttgtactcttgattctttggttccatgctctcttcggccatctccatgtcaatttgctttgcaaacaatataatatcagcgtgccgtgcccttgtagatttccaaatggttatatgcatatgtactattgaaattgtcattttagtttgcaaacaataccaacgtgcctttgtagatttcaaaatggatatatatgttgtattcaagtttgctatttctagtgaccccatgtggccattggagcccccccggggggggggggggggggggggggatgtcgggagtcagtccaaggtcaccacatttctaggccctcgcagttgttgggttgaatattagaagggctggtaaatgctaggagcctccgacctcttcccgggtctacattagtttcaacccagaaataggggagtatgaaagctcttgtaaataaatcgagtaagactatggagatgacataatctatgaatatcctcgtaaaatctctgagctatttataagaacctagtttttaccttaaatttgaagtacttttttagcttagaacatttgttttatg

SEQ ID NO: 218333 - DNA, 2408 bp, Zea Mays
gtctttcgccgcggccaactcctcgtgacgtcgccccggacggccccgatccaccaggtcccatgttggacggcggatctcgtccccctgcgctctccgcacacccaccgttttccttttccgccccaggcaccctgcacgatcgcgccttgccttccattttcctgccatcgtcggaagtcggaacggcggccgcccagaaaaccccaactcccgcggcgcaaaaccctagtagaggttgcgcgggacactgctgtggttccggtgatggagggggaaggcgacgccagtggtagcgatgaggtggtgcagctggaggacgcggtggagctgctggtggagcacctcgtggtgccggtgctgccgcgcggccaggtagaccgggaggaggccctgtcgcctgaggctcaggaggctgtggcgcgtcaggtccacgcgacggttctcctgtacaactactaccaccggaagcagttcccgcagctcgagtttgccaaccccgaacggttctccatgtctgcctccctcagcgtcaccaacaaaaatctgctcatgtacctgaaccaggcgcagaaccgcctcggcaacggagtgggggccgggctctcggtcactgacaaggcaatcgtcgacgcctgcgacatcgctgaggcgctcgaccccacgaaggactcccccgagatgaccacgtggccgatctccaaggtcgctgttctgcttctcaatcggacaaagaaagagtgcgtgctcgagcatggctccgaaaccaagggcgtctggtcgatgtttgagaaagagatcacgacggcattgggtggttcgctcagcagtgacatgccagtgcaggggtcgagtaataaatccgtgggacttccttcggaaccgtacgtgcttcagcagattgcatattcagaggtggaactcaaaacaggtatgaagcatacaaatttgcgctttatcgaagaacatcgggtgtactcactgagtaagaaggggacagctaccatgttgttccttctgcactatgatcagactgtcgatagcaagcttaaggaaatgcctttagatgccctgatcgaaaggatgagtggtcctatatttcaaagtggtccgtacccaacaacgacatctgtagttgaatactatcatttactgccatataaggaggtcttgttaaacgtcctgaacagggactggcctttgtgttcttcactgagcgtgccaaaggagcaggtatttcaaaatgggaaatcttcatttccctctgaaatagaagaaagtttgaaggaacaagaagctaatagtaatagcaagactaaaatgaaaaaaatgccaacagacgtttctactccaaagaaaaataagcaggtagtaaaagcagttcgtgacagtggcaccaacgaaagcagcaccagcaaaaacaaaaaaggcagcaacacgaactgcaaaagaacatctgaagcctgcaagactaaagttgctacctacgcagagcatggggatggtcagagccctacaaaagacttacaagccagtgcccaaatggacaagagcagaacagagaagaacactaaaagtagaaatgtgccccaaaatatctttctgacaccagatgttggtcctgtaaataatgaccatgccttgaaaagccaaaaggagaaagtcactgataagtctggtggcatcacaggtaacatgaatgttcagaagtatgcgactctgcaattactttggaagatgcgagatgatacactccatgagcattttatgcttggagatcgatgtgctgagtacgaaatggacattcaaacaatcttgacagaaacagagatgacacctaaagtaatgtcaatcctaaagaaatatgagaatagttggaaggcgatgaaagttgccaatccaattagctctggagaaggatgccaaaccatgaacataaagaggaagaaactgaaagaagccatacttctacgcaacagatgccaggaactggatgatatatgccgtgagagcaactggattcttccaagatacagagtacttccttcagttaccggtgatatgtaccaggccagtgtccaccttatgggcccagacttcaacttgagtgtagatggtgatgtgagggttacccctcacgaggcacgagactcagcagcgtccaacatgctgtctcagcttcagcagaaggcaagggaaggctaggagagcggcatgtctccacagaacccttaatgctgcatccttgtgggtatcgacttgcatgcgacaggaaagaacagccatcacagctcagaaatgaacatgctggttgtcaaaacaaaattctatctatctatttgaacttaagaattctgcagcctgctgtgctaagaaccgcggcccggagaggttcattggtctttaag

SEQ ID NO: 218334 - DNA, 2233 bp, Zea Mays
atcgtcggaagtcggaacggcggccgcccagaaaaccccaactcccgcggcgcaaaaccctagtagaggttgcgcgggacactgctgtggttccggtgatggagggggaaggcgacgccagtggtagcgatgaggtggtgcagctggaggacgcggtggagctgctggtggagcacctcgtggtgccggtgctgccgcgcggccaggtagaccgggaggaggccctgtcgcctgaggctcaggaggctgtggcgcgtcaggtccacgcgacggttctcctgtacaactactaccaccggaagcagttcccgcagctcgagtttgccaaccccgaacggttctccatgtctgcctccctcagcgtcaccaacaaaaatctgctcatgtacctgaaccaggcgcagaaccgcctcggcaacggagtgggggccgggctctcggtcactgacaaggcaatcgtcgacgcctgcgacatcgctgaggcgctcgaccccacgaaggactcccccgagatgaccacgtggccgatctccaaggtcgctgttctgcttctcaatcggacaaagaaagagtgcgtgctcgagcatggctccgaaaccaagggcgtctggtcgatgtttgagaaagagatcacgacggcattgggtggttcgctcagcagtgacatgccagtgcaggggtcgagtaataaatccgtgggacttccttcggaaccgtacgtgcttcagcagattgcatattcagaggtggaactcaaaacaggtatgaagcatacaaatttgcgctttatcgaagaacatcgggtgtactcactgagtaagaaggggacagctaccatgttgttccttctgcactatgatcagactgtcgatagcaagcttaaggaaatgcctttagatgccctgatcgaaaggatgagtggtcctatatttcaaagtggtccgtacccaacaacgacatctgtagttgaatactatcatttactgccatataaggaggtcttgttaaacgtcctgaacagggactggcctttgtgttcttcactgagcgtgccaaaggagcaggtatttcaaaatgggaaatcttcatttccctctgaaatagaagaaagtttgaaggaacaagaagctaatagtaatagcaagactaaaatgaaaaaaatgccaacagacgtttctactccaaagaaaaataagcaggtagtaaaagcagttcgtgacagtggcaccaacgaaagcagcaccagcaaaaacaaaaaaggcagcaacacgaactgcaaaagaacatctgaagcctgcaagactaaagttgctacctacgcagagcatggggatggtcagagccctacaaaagacttacaagccagtgcccaaatggacaagagcagaacagagaagaacactaaaagtagaaatgtgccccaaaatatctttctgacaccagatgttggtcctgtaaataatgaccatgccttgaaaagccaaaaggagaaagtcactgataagtctggtggcatcacaggtaacatgaatgttcagaagtatgcgactctgcaattactttggaagatgcgagatgatacactccatgagcattttatgcttggagatcgatgtgctgagtacgaaatggacattcaaacaatcttgacagagatgacacctaaagtaatgtcaatcctaaagaaatatgagaatagttggaaggcgatgaaagttgccaatccaattagctctggagaaggatgccaaaccatgaacataaagaggaagaaactgaaagaagccatacttctacgcaacagatgccaggaactggatgatatatgccgtgagagcaactggattcttccaagatacagagtacttccttcagttaccggtgatatgtaccaggccagtgtccaccttatgggcccagacttcaacttgagtgtagatggtgatgtgagggttacccctcacgaggcacgagactcagcagcgtccaacatgctgtctcagcttcagcagaaggcaagggaaggctaggagagcggcatgtctccacagaacccttaatgctgcatccttgtgggtatcgacttgcatgcgacaggaaagaacagccatcacagctcagaaatgaacatgctggttgtcaaaacaaaattctatctatctatttgaacttaagaattctgcaggtgtggttctgcgttttcttgttgggcaatctggattttcacttgcta

SEQ ID NO: 218335 - DNA, 2236 bp, Zea Mays
gggaggagaagctgtgggtcgatcacttgggtcttgggtggcacgcgctacaagctagggcttctgctccgtcctccgcgaatccgcggcgagcctgctagctgcgtggcttccctcttcccgggagcggcgcggcggtagtgctggtgctgcccggaccagaccagacccgaaagcggagaggcccccgtgcaaccggagccgtgcgttggaggtggacaggtggtggcacctgtgggcaacggccaacggcacggcagtaccatcactttggctcgttgtcgtattcaaaaccagacttgagctacttagccccccagcgattcatgtagaggccgggggcgaatccacactaacaacatacttctagattctggtcgatcgtcgatgaggccggcgccggagacaagcacgcggcggccgcagctgcgtcgccgtcgtccagtgccattggtgacggtggccgtgtctttggcgctcatctcgctggcgtgccttcctgtcttcgcggatgcaagcagagcgctgcaccgcgaccgggaggagcaccggaggcagcaccaccgcacggaggacaagaagagccgcgtctcgctccctcccgacgctgacggcgactctccgcccgagcctccggactccggcggcgcgccgccgcctgccgacgacagcgactgcggcaacgtgttcgacgtgagggcgttcggcgcgtcgggcgacggctcgtgcgtcgacgacgacacggccgcgttccgcgcggcgtggaaggcggcgtgctcctccgactccgccgcggccacgctgctggtgccgtcggacggcgtgttcaccatcgcatccaccatcttctccgggccgtgcaagcccgacctcaccttccaaatcgatggcgtcctcatgccgccggacggcccggcgagctggccggcgacggacagccggaaacagtggatagtcttctacaaggccgatcgcttgacgctggcgggggaaggcaccatcgaaggcaacggtgaggagtggtgggatctgccgtgcaagcctcacaggggtccaaacggatcgacgctgcgcggaccatgtgacagccccgcgctcatacgattcttctcgagcaatgacgtgacggtatgcggcctgcggatcgagaacagcccgcagttccacctcaggttcgacgactgcgagcgcgtgcgcgtcgacggcctcttcgtcagctcgccggcgtccagccccaacacggacggcgtccacgtcgagaacaccaagtccgtccagatcctcaactctaggatctacaacggcgacgactgcgtctccatcggcgccggatgctccgatgtccacgtcgagaacataacatgcggccacggccatggaattagcatcggcagcctgggtgtccacaacacccacgcctgcgtgtccaacgtcacggtccggaacgtgcggatactcgactccgacaacggcgtccggatcaagacgtggcagggcggcgccggcgcggtgtcggcggtcgagttcaccggcgtgcagatgcagaacgtgaagaactgcatcgtcatcgaccagtactactgcctcggccacgggtgcgccaaccagacctccgcggtgcgcgtggccggcgtcgcgtacagggacatccacggcacgtacaacccgcaggccggcgcgcccatccgcctcgcgtgcagcgacgccgtcgcctgcacggacatcaccatgtctggcgtcgagctgctgccggccggcggggacgacggagcactgctcgccgacccctactgctggaacgcgtacggggtcatggagacgctcacgctgccaccggtgtactgcttgctggagggcagcccggagtctctccaggatccgctcaccagttgctgagatgagatcgttttctttactaacaaagatttctctcctgagacagtcaacgctaatacactggacattctacatgtgacaaattacaaattacgcagacaatgtgaatttctgaaatggcatgctcccagcaactgaaagttgagccgcaatgtattcaagagagtgaaatacgcactcgagtcctcaaaaactgaggatggatagatactcttcctcatccaaataaaaatacgccggcataaggtgtgcacagtgacgaacaatctcggtagatcctaagaaaaatgtaagcaggacggcgacgacgaccggagagccctttagcacaacaacaaac

SEQ ID NO: 218336 - DNA, 1293 bp, Zea Mays
ccttagagctaaaacgactattatttagacataaaaattaagagctaaactactattttagaacggagtatgtataaaaagttatgtaaaaatggactcttaaaactcttttcatttaacctctttaagacttcttttattatcccttgtctttttttatatttttttcatttaacctctttaagacttctcttattatcttatacttgcccttcactacggagtataaaaagtcatgtaaaaatactcttgtctcttgtattctctttttatttaacctcttgaaagtctcttattatcttatacttgccctttgtcaagtggatccaaagcaatctactccatccgttcctatatatatgacaatttcaagtcatgctaagtgataaaacaaattataacaaaataaattataattcgtttttaataagactaatcaagtggaggtgtagcaaacggctagtaaaagcttattcaagcaggcgtgaacgtgattgatgattaaaaacagaggatgcagttcaacgtaaaatgctgagcatctacaaggccatttctgttcctagctggcgctactgacgagcgcgtccttgtaagacccgggccccggccgcccatctgctgcgtcttgaacaccttgagcaggttcagcaggccgccggcaaggaagaggaggctcccgaacaggcagaaccacgcccagctcctccccacgaagccggagtggcggctgcggcggtcgtgccggttgacgatgccggcgatgaggaagagggtgctccccagcagcagcgggatctgcacgctcttctgcaggagctggacgtgcccgctcgcacgctcgtagaactggcagatgttttgcacagaccccaggcaccacagtgccggcccggctatgagcaggttcaggccgtgcatggctaggctgtgccggtagcctctctccatctgaatcacaaagaagacgacagcgacgagcatgagcacggtgccgacgatctgcacggcggggacgccgagctcgacgagccccatctgcgcgtcaagcccgaccaccatcccgaggaggaccgccgcgaagatgtacaccccggcgttgatgtactcccaccggttgcgcaacgccgtgccggaccccgcgccggcgccgaggctgtatgcgcggcactcgcgcgccgtcgccagcttcaccatggtggctgtggcctgaccctgatgagcgtgttcgcgtactgatggctagcttcactgaaactgaaatggagtgcaggtgatattattgtggtgttg

SEQ ID NO: 218337 - DNA, 3036 bp, Zea Mays
atgggcgagcgcagcggcacgcaggccgagctggagcatcacggtctgctgcgcagccatggagacgagcaaatgggagcagggcgccgcaaggtactcgacgacggcgcgacagggaaggagttggagactgggcacacggctgacgagctggagggatgcgagctaggagctctggccgacgagcacgtgcaggaaacttcggctgggcgcgagcatagggagcgagcagggcccgagcgcgcagagttccacggcgcggtggccatggcgaacgccagggcgctcaagcgcgcgcaacagggagagaaacgggatgagggaggagcgaggaaaccgcgaacaagttggagaaccttccgcatccttccacccgttcctccggcggacacatctttgccgcgcccgctcgaagaaatgctcctccgccaccgccaccacctcttgtcgcgcccgcgccgcagcttccctctcgctgccctgggctgtgtcgccatgtccacctcctcttccccctcttcctccacctccacctccgcggccgccgactaccactgccgcaccaagcacagtcccaccgccggttacgcgcgcggtccgggccgcctcgactgggccaaccagcccaaccccttcctccgtttctcccccgcaccgccattaccgctccccaacccacctccgctcgcccccgtcccctaccctgctctcttccactccccacccccgccgccgcagccgctcaccctcgactccctctctgcgctgctcttccactccctcgcgctctccgcctggaagtccgcgggcctctcaacctggtcgctccgcgttaaccccagcagcggcaacctgcaccccaccgaggcccacctggtcttcccgcatccgcgagaggtcgaccgcctcgccatcgcgcactacgcgccccgcgaccatctcctcgaggcccgtgctaccgcaccaattagggattgttccgcgattctgtctgcgccggggatggcgatcctggctctatcgtcagtcttctggcgagaggcgtggaagtatggagagcgggcgctgcggtactgcaaccatgacgtggggcacgcgctcgcagcggttgccttggccgcggccacgctgggttgggacgcgcgtttactagacgggctgtcggacgaggacctcgggaggctcgttggggtggagaaagggagcccggctgcagttccggaggggctccttaacaaagtggtcaagggtaaggcgcggtgggtggagcggcagcatccagattgcgcggttctgctattcccagttgggtctgagccggaggtcgactatggtagaattagtgaggagctgaaggtgttcgatgggctggagtgggtggggaaggcaaatgcacttagtaatgatcatgtggtgtgggatgtgatataccgcacagcagagcaagttaagaagcatggccctgcaccgggggaacggttctttgtgatgccatggcagaagagtccagccttgtccaaaggattgtataaggaattaacagtgcaggaggtagtacgtcagaggagaagtgcggtggacatggatggtgtgcatgtgatgggaagggatacattttatcagatgctgatgcactgccttccatcaggggaggttggatcaggtgaacggcaaggggagcagagtgctctgccattccgagtattaccatgggaagcagaggtgcatgctgcactatttgtgcatcgtgtctcagggcttcacagggggatttatttcctggctgatgaaaggagattgccagaagtttgctatgcagatatcatgctttcaggaaattgcctcgcatggatgttttagccttgggatgattgctagattcgagcctgtgttgcatgagaaaggtgaatggatgtatcctcgtttgttctgggagactggcattcttggtcaagtgctttaccttgaggcccatgctattggaatatctgccacaggaatcggatgctactttgatgatactgttcacgaggcacttggcttgaaaggtttggactttcagagcatgtaccattttacagtgggcgctcctgtgcttgacaagaggataatgagtctcccagcttaccctggtcccggaattgacgcatgatatcttgcctcgggggaattttttgtcgacagatcaacaaagaaccgtggagcctgactgttttggtttatgtgtagtggcatgcctgaaatctatgcattgcataccccggtactaaccactcgtatttatctagttgttagccacgatgctcctatgttgcaccagcgtacaagtatgtcccgatgttccagtgcaattattctggtcctcaaccaggtatatagtttggtatattgtgcaactaatttttttgccacatttactagaataaggagggcgtacaaaattgtagaagtagagatacaacaagaagaaaaaaaacagggaatgtaaatcctctttgcgactatacacttagaacgaaatttctgcatgtatagaatggtttatgcatcctgtccaaatcagaatggcatctgtaaactgatagtgcctgaatctacctgcttgcttcatcgattcctgttcttgcttttgacgtcttttgaagggaatttgctgcataacgtgctataaaacttcaagtatgccttgccctggtttcgaatatgtaatgtaataataaaattccgtgaaaagctgccagttgcacatacgtctcgtgttcgatacaattaatcaattatgtaggagtatcatgtaaagaaaaataaacattcagtgctagcgtgaggatctctgatggtactatatgactgcttgcttagttcgaaaagagagatctagcctgagtcatggcgcatgaatgcatgcgtccgtaaaagtgggtgggcgccgagccacgaccatgactcccgagccctcattttggttgggtcgtagggcggcggcgcacatgtggcggtgggggcgcagtgaaaagacacagctgcaaagatagg

SEQ ID NO: 218338 - DNA, 2400 bp, Zea Mays
ttgacgccatcgacgccatgccctcgcgctccacctccgccccgagagcagcgcgcaccgcccggagatgtcgtacacgttccccacgcagcccatcgtggcgccggcgaagaagaaggacgcccgcaaggacgccgccgacgccgcagagaggcactgcagccctctgccgtcgagggagcacgggagggcggccgtcgccgtcgacggcgacaggggcagccagtacgcgctcaagtgggccgccgacaacatcctctcccgcgcccgccccttcttcctcgtccacgtccgccgcaagcccaccttcctccagggccccggcggtaagcagttcgccatatcacacgtgcaggacgacatcccggccgatcttcacgcccagatggaccttcaggcgaaagatctgatgatccccttccagtgtttctgcagcaggagagggggaaattatcctggacggaacagacgtgtcgaaggcgatcgtcgatttcgtcgccaccaacaaggtcgacaagttagtgctgggctcagcatccaggaacgcctttacaaggacgaggatgaagccgaactgagcctctttaggattgaacgtaagcagcagcagcagcaggatggcgatactgatacgcttccgtggaactaccacgcggagggattatcggagcagagggagatgggcaggaccccagaaagctctcacaggaacagaccggaggcggcggcggcggcagaagcagaagcagaagcagaagcgtgttctcagtcagcaatcggcccgaagcataagccttcgagcctggacactctacctcatcagcgtggagaggagttcgcagactacgactcgcaggacatcatccatccgatcttgaggcgctggccgccgatttgctcgcctagggacgacagcaggggcgggtcgtcgtcggctactccggaagaggctcgcaagctcgacctgaagctcagggccctgccgaggccgatcgagaccaagaggatgctggagtgcctgcctaccaggctcgagtgcaggatattcaccgcggacgatatcgcgaacgcgaccaaccatttcgccgatgagctcaagatcggggaaggagggtatgggccggtctacaaggccacgcttgacgacactctcgtggccgtcaagatcctctactctaatgtgacgcagggactgaagcagtttcgacaggaggttgagctgctgaacaacatccgtcacccgaacatggtgcgcctggtgggggcgtgcccggtgtacggctgcctggtgtacgagtacatgccgaacgggagcctggaggaccggctcttctgccgcggcggcacggcgccgctgccgtggcggctgcggttcagggtggccgtggagatcgcgagcgggctgctgtacctgcacaagatgaggcccgaggcgttcgtgcaccgcgacctcaagccgggcaacatcctgctggacgccgccttcgcggccaagatcggcgacgtcgggctggcgcgcatcatcccgcgcgccgtggacgtggacggcgccgccacgcagtaccgggagacggcggccgccggcaccttctgctacatcgacccggagtaccagaagacggggctgctgtgcaccaagtccgacgtgtacgcgctcggcgtcatcctcctccagatggtcaccgcccgggagcccatggggctggcgtacgccgtctcggacgcgctggaggagggcacgttccccgacctcctggacggcaacgtggccggctggccggtgcccgaggcgcaggcgttcgccgagctcgcgctcaagtgctgcgagatgcggcgcagggaccggccggacctggaaaccgtcgtcatgcccgagctggtccgcctgcaccgcgtcgtctcgccgtccgagtatccctcgtcttcttcctcgctccctcattccatggatcaagctcatcaccgttcagcgagcaacaaggatttgcggttggataatgacctggttgacattctgagcgagggaagactgaagggaggagcatcatttgccatgtaacatgcatgagacgagggccacaatgtctacatataactgcttcccactggaatatgttgctgttctatacatcttctgtaaacatttataccaccagcttagcctggaagctttttatgcatgcctggccattatgtttgacgcttagattaaccatcaacctgtaaaccaagaacaagttttttcgtgtgtgtgtgtgaatcaggggaggggttgcaccctgctactgtctctcatgtttgtcagttcatcaggaatggaaattcttttgtgcctggcaaaacatcatggtagagctttccacgcatgtagtacgaagatgtgcattcggtgggcatcag

SEQ ID NO: 218339 - DNA, 2817 bp, Zea Mays
ggccgatggttgacgccatcgacgccatgccctcgcgctccacctccgccccgagagcagcgcgcaccgcccggagatgtcgtacacgttccccacgcagcccatcgtggcgccggcgaagaagaaggacgcccgcaaggacgccgccgacgccgcagagaggcactgcagccctctgccgtcgagggagcacgggagggcggccgtcgccgtcgacggcgacaggggcagccagtacgcgctcaagtgggccgccgacaacatcctctcccgcgcccgccccttcttcctcgtccacgtccgccgcaagcccaccttcctccagggccccggcggtaagcagttcgccatatcacacgtgcaggacgacatcccggccgatcttcacgcccagatggaccttcaggcgaaagatctgatgatccccttccagtgtttctgcagcaggagagggttgcaatgcagggaaattatcctggacggaacagacgtgtcgaaggcgatcgtcgatttcgtcgccaccaacaaggtcgacaagttagtgctgggctcagcatccaggaacgcctttacaaggacgatatggaagctggacgtgccgacatccgtgacgaagtccgcgccgagcttctgttcggtctacgtgatagcgaaagggaagatctcgtccttcaggcccgccacctacgcgaacgagacaagcggcagcaggggagatccggaacctgatcacccgcctgggaacagcctgccagttggtgaaccggctcacaacaagccagaaaacgggcacggcggcatttcgaggcctatcccagtacgtgcttcgacgcccacccatggtggcagctccgacgaaccgccgacggaagacggagggagcttcatgtcatcagaccagacagcgtcttcatcatgccccagtggtggatctctaaacgacgtcgatcagcatggctacagcccgctgtcgccaacggacgaggatgaagccgaactgagcctctttaggattgaacgtaagcagcagcagcagcaggatggcgatactgatacgcttccgtggaactaccacgcggagggattatcgagggagatgggcaggaccccagaaagctctcacaggaacagaccggaggcggcggcggcggcagaagcagaagcagaagcagaagcgtgttctcagtcagcaatcggcccgaagcataagccttcgagcctggacactctacctcatcagcgtggagaggagttcgcagactacgactcgcaggacatcatccatccgatcttgaggcgctggccgccgatttgctcgcctagggacgacagcaggggcgggtcgtcgtcggctactccggaagaggctcgcaagctcgacctgaagctcagggccctgccgaggccgatcgagaccaagaggatgctggagtgcctgcctaccaggctcgagtgcaggatattcaccgcggacgatatcgcgaacgcgaccaaccatttcgccgatgagctcaagatcggggaaggagggtatgggccggtctacaaggccacgcttgacgacactctcgtggccgtcaagatcctctactctaatgtgacgcagggactgaagcagtttcgacaggaggttgagctgctgaacaacatccgtcacccgaacatggtgcgcctggtgggggcgtgcccggtgtacggctgcctggtgtacgagtacatgccgaacgggagcctggaggaccggctcttctgccgcggcggcacggcgccgctgccgtggcggctgcggttcagggtggccgtggagatcgcgagcgggctgctgtacctgcacaagatgaggcccgaggcgttcgtgcaccgcgacctcaagccgggcaacatcctgctggacgccgccttcgcggccaagatcggcgacgtcgggctggcgcgcatcatcccgcgcgccgtggacgtggacggcgccgccacgcagtaccgggagacggcggccgccggcaccttctgctacatcgacccggagtaccagaagacggggctgctgtgcaccaagtccgacgtgtacgcgctcggcgtcatcctcctccagatggtcaccgcccgggagcccatggggctggcgtacgccgtctcggacgcgctggaggagggcacgttccccgacctcctggacggcaacgtggccggctggccggtgcccgaggcgcaggcgttcgccgagctcgcgctcaagtgctgcgagatgcggcgcagggaccggccggacctggaaaccgtcgtcatgcccgagctggtccgcctgcaccgcgtcgtctcgccgtccgagtatccctcgtcttcttcctcgctccctcattccatggatcaagctcatcaccgttcagcgagcaacaaggatttgcggttggataatgacctggttgacattctgagcgagggaagactgaagggaggagcatcatttgccatgtaacatgcatgagacgagggccacaatgtctacatataactgcttcccactggaatatgttgctgttctatacatcttctgtaaacatttataccaccagcttagcctggaagctttttatgcatgcctggccattatgtttgacgcttagattaaccatcaacctgtaaaccaagaacaagttttttcgtgtgtgtgtgtgaatcaggggaggggttgcaccctgctactgtctctcatgtttgtcagttcatcaggaatggaaattcttttgtgcctggcaaaacatcatggtagagctttccacgcatgtagtacgaagatgtgcattcggtgggcatcag

SEQ ID NO: 218340 - DNA, 2861 bp, Zea Mays
cgccctcgtctcttatcccaccggcaccaccagggcagggccgatggttgacgccatcgacgccatgccctcgcgctccacctccgccccgagagcagcgcgcaccgcccggagatgtcgtacacgttccccacgcagcccatcgtggcgccggcgaagaagaaggacgcccgcaaggacgccgccgacgccgcagagaggcactgcagccctctgccgtcgagggagcacgggagggcggccgtcgccgtcgacggcgacaggggcagccagtacgcgctcaagtgggccgccgacaacatcctctcccgcgcccgccccttcttcctcgtccacgtccgccgcaagcccaccttcctccagggccccggcggtaagcagttcgccatatcacacgtgcaggacgacatcccggccgatcttcacgcccagatggaccttcaggcgaaagatctgatgatccccttccagtgtttctgcagcaggagagggttgcaatgcagggaaattatcctggacggaacagacgtgtcgaaggcgatcgtcgatttcgtcgccaccaacaaggtcgacaagttagtgctgggctcagcatccaggaacgcctttacaaggacgatatggaagctggacgtgccgacatccgtgacgaagtccgcgccgagcttctgttcggtctacgtgatagcgaaagggaagatctcgtccttcaggcccgccacctacgcgaacgagacaagcggcagcaggggagatccggaacctgatcacccgcctgggaacagcctgccagttggtgaaccggctcacaacaagccagaaaacgggcacggcggcatttcgaggcctatcccagtacgtgcttcgacgcccacccatggtggcagctccgacgaaccgccgacggaagacggagggagcttcatgtcatcagaccagacagcgtcttcatcatgccccagtggtggatctctaaacgacgtcgatcagcatggctacagcccgctgtcgccaacggacgaggatgaagccgaactgagcctctttaggattgaacgtaagcagcagcagcagcaggatggcgatactgatacgcttccgtggaactaccacgcggagggattatcggagcagagggagatgggcaggaccccagaaagctctcacaggaacagaccggaggcggcggcggcggcagaagcagaagcagaagcagaagcgtgttctcagtcagcaatcggcccgaagcataagccttcgagcctggacactctacctcatcagcgtggagaggagttcgcagactacgactcgcaggacatcatccatccgatcttgaggcgctggccgccgatttgctcgcctagggacgacagcaggggcgggtcgtcgtcggctactccggaagaggctcgcaagctcgacctgaagctcagggccctgccgaggccgatcgagaccaagaggatgctggagtgcctgcctaccaggctcgagtgcaggatattcaccgcggacgatatcgcgaacgcgaccaaccatttcgccgatgagctcaagatcggggaaggagggtatgggccggtctacaaggccacgcttgacgacactctcgtggccgtcaagatcctctactctaatgtgacgcagggactgaagcagtttcgacaggaggttgagctgctgaacaacatccgtcacccgaacatggtgcgcctggtgggggcgtgcccggtgtacggctgcctggtgtacgagtacatgccgaacgggagcctggaggaccggctcttctgccgcggcggcacggcgccgctgccgtggcggctgcggttcagggtggccgtggagatcgcgagcgggctgctgtacctgcacaagatgaggcccgaggcgttcgtgcaccgcgacctcaagccgggcaacatcctgctggacgccgccttcgcggccaagatcggcgacgtcgggctggcgcgcatcatcccgcgcgccgtggacgtggacggcgccgccacgcagtaccgggagacggcggccgccggcaccttctgctacatcgacccggagtaccagaagacggggctgctgtgcaccaagtccgacgtgtacgcgctcggcgtcatcctcctccagatggtcaccgcccgggagcccatggggctggcgtacgccgtctcggacgcgctggaggagggcacgttccccgacctcctggacggcaacgtggccggctggccggtgcccgaggcgcaggcgttcgccgagctcgcgctcaagtgctgcgagatgcggcgcagggaccggccggacctggaaaccgtcgtcatgcccgagctggtccgcctgcaccgcgtcgtctcgccgtccgagtatccctcgtcttcttcctcgctccctcattccatggatcaagctcatcaccgttcagcgagcaacaaggatttgcggttggataatgacctggttgacattctgagcgagggaagactgaagggaggagcatcatttgccatgtaacatgcatgagacgagggccacaatgtctacatataactgcttcccactggaatatgttgctgttctatacatcttctgtaaacatttataccaccagcttagcctggaagctttttatgcatgcctggccattatgtttgacgcttagattaaccatcaacctgtaaaccaagaacaagttttttcgtgtgtgtgtgtgaatcaggggaggggttgcaccctgctactgtctctcatgtttgtcagttcatcaggaatggaaattcttttgtgcctggcaaaacatcatggtagagctttccacgcatgtagtacgaagatgtgcattcggtgggcatcag

SEQ ID NO: 218341 - DNA, 2556 bp, Zea Mays
cttggttcgaaatctcccggcgcttctagtctagcgctcagttcatcggcagtccggcacggcgcagaagctctcctcgctcgcgccgccacacagcccacaaccttctatggattcgtcctcggccaccgccgctaccgttgcgccggtggtgacctcggccccgccgctcgaagactgcctccgcctcctccgcggcgagcgcgacgagcagaagctggcgggcctgctagtcgccgccaacgtctgccgcgcgggcgacgccgacgccgtcgccaacgtctaccgcgccgtcgggccccgcttcctccgacgcctcctcaacactgggttggggaaagtggagggcgggaaggaggaggagcgagaggcatacatgcggctcgccgtcaccgtgctcgcagggctcgcgcgcgtcccggaggttgcggccgacgagggtgtcgtttccaccgtgcccctagtcgccgaggttgtcgccaaatcgactgatccagcaatcactgaagaatgctttgaacttctgtcacttattgcaatagcgtctgaagatggggcatatgagttttgtgagcccggtgtaatagacatgatcttccttcaaatcttaagcttaacagatggttctaagtgcgtagaacttgccattaacctactgcagttactagttcataaactcaaagttgacactatgagttcggagaaactgcaaggaatgactagaatggtaacttgtcttgccaggatatttgctgttctccacactgcagttaaatttgatgccttgcacatgcttaccttcctcctgtcccaaaaagaatctccacttcatgattttttgagatcaatacctgcatcaatttgggaatctcacattcgagttggaatcactgccattctccaaaatcgtgttgtatcctctgaaaagttgcacgctcttcttttggcggagtgcatgatgtccatactgggcgaggattggttgtcagaagattttgaagtccaggataaccaaaatgtgttgtctgttgacaaatttgtattgcttgtgctggaatccgcaagggttgaagtggcagtcttgctaaatgagcttgcttatctgaagtacgagtcatcaaaaatttctcagacagatgaagccatcagtcagaaacagaggaacctggctatactattttcgttaatagaaagaataattaaaatgatatcaaatgccagtagtggtgaagttatctggcagaagcaccatatgcctgcaaggagaagactgggaatctattggaatttatcttttctatagaaggtcaagatgaatcaagttccttctattctatttgcttcatgcttccaatgctatcccaaataacaatggaggttgatggatgtagaactttggcatcatttggtggccataaggcagttatagattgccttgttaaaatgactgagcagggtggaatgacgattgataacggtagcatgtttttggcatgtgataccatcataaatttcatgtctaatatgaagagtgtccatattccagtggattattgtttcattcgcctcctaaaagcacttgttacatgggctggaaccacagatgcctcatcagttaccatgacagcatcctgcttatgtgtaatgctgttggacatgacgtcagaaaagtttctattgagctgctctcattttgacgccaatatccttgggagtttgtctgagatcatcatcagaagtttgcagcaggatatccctgatgatgatagtgagcaattcaagcagaagcagatcattgtatcaggttataagcgatgggctgatcgatttccacgtgttaaagatgttgtggagcagcatgtatccgtgtgaatgtgatcaacccccaggagctgttctctatgaatgcaaacctgcaaacgtgacagtgcagctttgacaatgcctcggttctggtggttcattccttttacctggtacttccctgcgacctgtttctgatgcgattttggttagcggaccttggcttatgggaattctgcaatggggaatgttaggttagcgaaattctccagcggcaggccggcagctaacgaggtgcaccaacgtggatcagaaagatgtcgttgtttatccgggaaattctcagctgcgaagcaaatctgacattgtaatgtttatgctgcacgagaaagaacaaggcggtttggggactagattctcatctcgctttcaccatttctgaacgcatgtgtaacagaaccaagcccaagtttcaggcaaggggttttcatttatattgtttagcatgtatacatgcgagacgaacatatgaaaggataaactcctacttaaatgtaagtagagatattgtagtggagtaaaaagcacacgtctagatttgagatggctcctaaatcttaaaaagtgagtctgaactaatggaatgttgtttgggatagctcctaaaccttaacaaatgaatctgaatctagaatttactcagattcactgtgaagcagctgcactagtggagttggggttcatcaaattatt

SEQ ID NO: 218342 - DNA, 2575 bp, Zea Mays
ggcgcttctagtctagcgctcagttcatcggcagtccggcacggcgcagaagctctcctcgctcgcgccgccacacagcccacaaccttctatggattcgtcctcggccaccgccgctaccgttgcgccggtggtgacctcggccccgccgctcgaagactgcctccgcctcctccgcggcgagcgcgacgagcagaagctggcgggcctgctagtcgccgccaacgtctgccgcgcgggcgacgccgacgccgtcgccaacgtctaccgcgccgtcgggccccgcttcctccgacgcctcctcaacactgggttggggaaagtggagggcgggaaggaggaggagcgagaggcatacatgcggctcgccgtcaccgtgctcgcagggctcgcgcgcgtcccggaggttgcggccgacgagggtgtcgtttccaccgtgcccctagtcgccgaggttgtcgccaaatcgactgatccagcaatcactgaagaatgctttgaacttctgtcacttattgcaatagcgtctgaagatggggcatatgagttttgtgagcccggtgtaatagacatgatcttccttcaaatcttaagcttaacagatggttctaagtgcgtagaacttgccattaacctactgcagttactagttcataaactcaaagttgacactatgagttcggagaaactgcaaggaatgactagaatggtaacttgtcttgccaggatatttgctgttctccacactgcagttaaatttgatgccttgcacatgcttaccttcctcctgtcccaaaaagaatctccacttcatgattttttgagatcaatacctgcatcaatttgggaatctcacattcgagttggaatcactgccattctccaaaatcgtgttgtatcctctgaaaagttgcacgctcttcttttggcggagtgcatgatgtccatactgggcgaggattggttgtcagaagattttgaagtccaggataaccaaaatgtgttgtctgttgacaaggttgaagtggcagtcttgctaaatgagcttgcttatctgaagtacgagtcatcaaaaatttctcagacagatgaagccatcagtcagaaacagaggaacctggctatactattttcgttaatagaaagaataattaaaatgatatcaaatgccagtagtggtgaaggtgcaccaattcataccatccgtgaaagtaccataatgcaggccattacgggattaaatgagacaatcaatttagtcttagactttctgcaggacgcgaaggatcatggtcaatggaaaggtgacgatcttttagcagctgcaagaatagtaggaagttatctggcagaagcaccatatgcctgcaaggagaagactgggaatctattggaatttatcttttctatagaaggtcaagatgaatcaagttccttctattctatttgcttcatgcttccaatgctatcccaaataacaatggaggttgatggatgtagaactttggcatcatttggtggccataaggcagttatagattgccttgttaaaatgactgagcagggtggaatgacgattgataacggtagcatgtttttggcatgtgataccatcataaatttcatgtctaatatgaagagtgtccatattccagtggattattgtttcattcgcctcctaaaagcacttgttacatgggctgatgcctcatcagttaccatgacagcatcctgcttatgtgtaatgctgttggacatgacgtcagaaaagtttctattgagctgctctcattttgacgccaatatccttgggagtttgtctgagatcatcatcagaagtttgcagcaggatatccctgatgatgatagtgagcaattcaagcagaagcagatcattgtatcaggttataagcgatgggctgatcgatttccacgtgttaaagatgttgtggagcagcatgtatccgtgtgaatgtgatcaacccccaggagctgttctctatgaatgcaaacctgcaaacgtgacagtgcagctttgacaatgcctcggttctggtggttcattccttttacctggttagcgaaattctccagcggcaggccggcagctaacgaggtgcaccaacgtggatcagaaagatgtcgttgtttatccgggaaattctcagctgcgaagcaaatctgacattgtaatgtttatgctgcacgagaaagaacaaggcggtttggggactagattctcatctcgctttcaccatttctgaacgcatgtgtaacagaaccaagcccaagtttcaggcaaggggttttcatttatattgtttagcatgtatacatgcgagacgaacatatgaaaggataaactcctacttaaatgtaagtagagatattgtagtggagtaaaaagcacacgtctagatttgagatggctcctaaatcttaaaaagtgagtctgaactaatggaatgttgtttgggatagctcctaaaccttaacaaatgaatctgaatctagaatttactcagattcactgtgaagcagctgcactagtggagttggggttcatcaaattatt

SEQ ID NO: 218343 - DNA, 2612 bp, Zea Mays
agcgctcagttcatcggcagtccggcacggcgcagaagctctcctcgctcgcgccgccacacagcccacaaccttctatggattcgtcctcggccaccgccgctaccgttgcgccggtggtgacctcggccccgccgctcgaagactgcctccgcctcctccgcggcgagcgcgacgagcagaagctggcgggcctgctagtcgccgccaacgtctgccgcgcgggcgacgccgacgccgtcgccaacgtctaccgcgccgtcgggccccgcttcctccgacgcctcctcaacactgggttggggaaagtggagggcgggaaggaggaggagcgagaggcatacatgcggctcgccgtcaccgtgctcgcagggctcgcgcgcgtcccggaggttgcggccgacgagggtgtcgtttccaccgtgcccctagtcgccgaggttgtcgccaaatcgactgatccagcaatcactgaagaatgctttgaacttctgtcacttattgcaatagcgtctgaagatggggcatatgagttttgtgagcccggtgtaatagacatgatcttccttcaaatcttaagcttaacagatggttctaagtgcgtagaacttgccattaacctactgcagttactagttcataaactcaaagttgacactatgagttcggagaaactgcaaggaatgactagaatggtaacttgtcttgccaggatatttgctgttctccacactgcagttaaatttgatgccttgcacatgcttaccttcctcctgtcccaaaaagaatctccacttcatgattttttgagatcaatacctgcatcaatttgggaatctcacattcgagttggaatcactgccattctccaaaatcgtgttgtatcctctgaaaagttgcacgctcttcttttggcggagtgcatgatgtccatactgggcgaggattggttgtcagaagattttgaagtccaggataaccaaaatgtgttgtctgttgacaaatttgtattgcttgtgctggaatccgcaagggttgaagtggcagtcttgctaaatgagcttgcttatctgaagtacgagtcatcaaaaatttctcagacagatgaagccatcagtcagaaacagaggaacctggctatactattttcgttaatagaaagaataattaaaatgatatcaaatgccagtagtggtgaaggtgcaccaattcataccatccgtgaaagtaccataatgcaggccattacgggattaaatgagacaatcaatttagtcttagactttctgcaggacgcgaaggatcatggtcaatggaaaggtgacgatcttttagcagctgcaagaatagtaggaagttatctggcagaagcaccatatgcctgcaaggagaagactgggaatctattggaatttatcttttctatagaaggtcaagatgaatcaagttccttctattctatttgcttcatgcttccaatgctatcccaaataacaatggaggttgatggatgtagaactttggcatcatttggtggccataaggcagttatagattgccttgttaaaatgactgagcagggtggaatgacgattgataacggtagcatgtttttggcatgtgataccatcataaatttcatgtctaatatgaagagtgtccatattccagtggattattgtttcattcgcctcctaaaagcacttgttacatgggctggaaccacagatgcctcatcagttaccatgacagcatcctgcttatgtgtaatgctgttggacatgacgtcagaaaagtttctattgagctgctctcattttgacgccaatatccttgggagtttgtctgagatcatcatcagaagtttgcagcaggatatccctgatgatgatagtgagcaattcaagcagaagcagatcattgtatcagtatgtggtgcaggttataagcgatgggctgatcgatttccacgtgttaaagatgttgtggagcagcatgtatccgtgtgaatgtgatcaacccccaggagctgttctctatgaatgcaaacctgcaaacgtgacagtgcagctttgacaatgcctcggttctggtggttcattccttttacctggttagcgaaattctccagcggcaggccggcagctaacgaggtgcaccaacgtggatcagaaagatgtcgttgtttatccgggaaattctcagctgcgaagcaaatctgacattgtaatgtttatgctgcacgagaaagaacaaggcggtttggggactagattctcatctcgctttcaccatttctgaacgcatgtgtaacagaaccaagcccaagtttcaggcaaggggttttcatttatattgtttagcatgtatacatgcgagacgaacatatgaaaggataaactcctacttaaatgtaagtagagatattgtagtggagtaaaaagcacacgtctagatttgagatggctcctaaatcttaaaaagtgagtctgaactaatggaatgttgtttgggatagctcctaaaccttaacaaatgaatctgaatctagaatttactcagattcactgtgaagcagctgcactagtggagttggggttcatcaaattatt

SEQ ID NO: 218344 - DNA, 12514 bp, Zea Mays
gttttaagcccatacacaagccgaataccacacggaaccgggagagagtgcatcagcactgcaggggtctactgaggcactccaagtggggaaatggcggaggcgacgaattcgagcttgggcacgtaggcgtcgctcctgccatcgccgcagcggtcactggactctcacgccgccgccgccgccgccggagaccattagttctcctgcgcggcggctccgcggctcccgccctctcccttaccttcttcccgctagggttttctccgatccccaatcactgctggttcacaaatggcttcatctcagcatgttgagatggaggctgcgaaacttctacataaacttatccaggagtcgaaggatgagcctgctaaactagcaacaaaactttacgtgatatgtcagcatatgaaactaagtggaaaggagcaatcactgccatatcaagtcatatcaagggctatggagacagttgtgaaccaacatggaattgatatggatgcattgcgatcatcacgaattccatttgctggtggtcctcaggcaggggattctagtggtgtcatgtcaaaggacaaggaggtcattggtaaccagtctcccatggtcggaagtgatgcttcccaaagtagtggacaagctggattatggcagcttccatcaggttcaaccgatatgataagacatggggcatctatttcaggtagggtacccacagggccaaataggggagatttctcagcagctgatattcatcaaggctccatgtcacaaaaaagcggtagatcctctggcattgaaagccctgcaagtctgcagatggaggacaccagatctatgaattcacatgattctttgaaatccgatgagaaaacaagtaagaaaacctcttccaagagaaaaaggatggattcaaaaggagctggtgatttgcgttcagaagacaactcaaagtcagatgttatctccactggacagaataccaggaaggggaaacaggttggtaaggctggtagacaaggtcagccttccatgggaattgagcatgagcagcaacctcataaactgcaaggtggtactggtcaggtaccacctatacatggtggtgcaccttttctcaggactcgctcagaaggtccttctgggaggacaatggacaagactaaaccatcaaatccattctcaatgggtcaaattccaaattttcctgaagggctggcttctactggtgctccaatcgagttgcagaaaagtatacagggtggagcaagtttatttaatcctggttttggctggaaccaaaatccacaagttcaaaccttgaagaattctcaaggttctattcataatttagtgaggtctggagttactgttgaagggaaagttaatgtaggggcacaaggagcttttaactctgcctctgcaccacagatggaatttcccacagttcctccatacaacccctcttccttcggagctagctcacagtttctggacaaaggcaaggagttggtttccagcattataagcactgaacctcattcatctaaagttgcatctcagcctgggatttctcatggaagtcccatgcaagaaaggcaaggtatgatcagggtgccacagagaggcgaggcatcatttcaggaacgcaggccatcttcacttccgagtagaagtactgggccaagtccaatgtctcacatttcttccaacacaccatttaaagaacagcagctgaagcagctcagagcacagtgcttagtatttcttgcatttaggaataatttgcagcccaggaaggtacatcttgaaattgctttgggcagagggcctcctgcagaaagtgacagtgcaggtcaaaggggcagcgagggcagagtgtctgatgctctgggaaaggaaaatggtagcagtcgggagaactctggtgtcttttgtaggcaaactgatatctctagacttccagccacatctgcaggaagtattgcagaggatgattccttatcgaaggatccagaaaatgctacaaaaaaaatcaagttagctgaacaggagaagtcattgatggaagtagaaaatgtccagcaagcttctgttatgcaaggaactagttctgaaatgcgttcccaagaaactgcatctcaaaatccatatcgaccacaacagtcatattatcaaggagatacaagaagaatcgcctcggatatccataggactgatgctgaaattttgaaccagaatttaagttggggaggccagggatctactgctttgggtggtactagacagcttctgaatcaggaaactaaagaatcacttgcaccttcaaagtcacaccatatgcctgttgatggttacaactccaatatacaaggaatagatcggactccagagatagctggagctggtaatgatgttgaaaattgtagccacgtagcagatattgtgcctgagcaggctgctgatgaaggagatgaggacctctcagagcatgaggatttattgtcatctccaaagcacacaatgacggaaaaatggatcttagattaccagaagagaatttacaatgagaaacaaaagagaacattggagcagcataaggtacacagcagaatgtcagcaacatatgaggagctaaaggagagcgttaattcatccgaagatctttctgcaaagaccaagagcgtcattgaattgaaaaagcttcagcttctgccacttcaacgtcgtgtacgcagtgaatttttgctggattttttcaagcctaatacatccgacttagagcgcataaaatcactgaagaaacataggcatgggcggcgggtgaaacagcttgaaaaaattgaacagaaaatgaaggaagaaaggcaaaagagaattcgtgagagacagaaggaattctttgctgatattgaagcttacagagagaaactcgaggataacttcaaggttaagagagagcgcttgaaggggttcaatcgatacataaaagaatttcacaaaaggaaagaaagaattcatcgggagaaactggataggatccaacgcgagaaaatcaacctgcttaagaacaatgatgttgaaggttatcttagaatggtcaaggatgcaaaatctgatcgtgtcaagcaactattgcgtgaaactgagaaatatcttcagaaacttgggaacaaattacagagtgcaaagtccacagatggccgctcatcttttgttactgataagagtgacactgcaaacgacattgaagatgagagctaccagccacagcattatctggaaagtaatgaaaagtactatcaactggcacacagtgtaaaggaaactgtaaatgatcagccatcttatcttcagggcggcaaattgcgagagtaccaaatgaatggcttgcgttggctggtttcattgtacaataataatttgaatggtattttagcagatgagatgggccttggtaaaacagtacaagtaatctctttgatatgctaccttatggaaacaaaaaatgaccgtgggccttttctcgtggttgtaccatcatctgttcttcctggatgggaatctgaactcagcttctgggcacctagtataaataaaattgcttatgctggtcctcctgaagaaaggcgcaggatgttcaaagagatgattgttcatcagaagttcaatgttcttctgacaacatatgagtacttgatgaacaagcatgataggccaaaactaagcaaaatacaatggcactatataataatcgatgaagggcatcgtattaaaaatgcttcttgtaaacttaatgctgatttgaagctttatcggagctctcatcggatattattgacaggaacacctcttcagaataatctcgaggagctgtgggcacttctaaattttttgttgcccaatatttttaattcgtcagaggacttctctcagtggtttaacaaaccatttgaaagtaatggtgataattcacctgatgaggccttactttcagaggaggagaacttgttgatcataaatcgtcttcaccaggttcttcggccctttgtactcagaagacttaagcataaggtcgaaaatgagcttcctgaaaaaattgaaagacttgtaagatgtgaggcatctgcttatcagaaacttctcatgacaagggtggaagaaaatcttggtggaattggagccgttaaggttcgctccgttcacaactctgtcatggaattgaggaacatatgcaaccatccatacttgagccagcttcatgttgaagagattgagggctacctacctaaacattacctaccatctattttgaggctctgcggaaaacttgagatgttggacagattgctgcctaaactcaaagctacgggccatagggttctacttttttctacaatgacaagattgcttgatgtaatggaggattacttggtttggaaaaagtataaatatcttcgattggatgggcacacttctggccatgaaagaggagctcttatcgataaatttaacgatcctaattctcaagcattcatttttcttcttagtatacgagctggaggtgttggggtcaatctccaagctgccgatacagttatcatatttgatactgattggaatcctcaggttgatctgcaagcacaggctagggcccacaggattggtcaaaagaaggaggttcttgttttacgtttagaaacggtccgaactgttgaagagcaagtcagggcttcagcagaacacaaattaggtgttgctaatcagagtataactgctggtttttttgacaataacacaagtgctgaagatcgaagagagtatcttgaatcactcctacgtgagtctaaaaaggaagaagcagctccagtgttagatgatgatgctctgaatgacattctagctcggagcgaagctgagattgacatattcgaatctattgacaagcaaaggagagaagaagaaatggcagcttggcaaaaggtggttcaggatggttcaactagtgggctagaccctggagtattgccttctcgtcttgtaactgatgatgatctgaagcccttctgccatgctatgaaactttatgagccatcaaatgtgaaaacagtaaatgtgaatgtgaggaagaagggtgaacttgggggccttgatacacagcactatggaaggggtaaacgagcccgtgaggttcgctcttatgaagaccaatggactgaagaagaatttgaaaaactttgtcaagctgattctcctgaatcatcccaacctggtggcatgtcgaaggatttggatattcttaataaaggcattaagactgaaattcttgtggagagttcaaaagaaccagaacaaacgaagatggaggcatccccaactgtcggtgactctccaccagccaaacggcggagaggtagacctaaaaggtcagatgtttttgtatctcctactgctggtctgactgatgctgtcaaacaagacacaggaaccacacaggacggtagttctgctacaccagcaagtaccatccactctgatgcaccagctactgcaatcaattcagctgtttcagatgttaatatacattctattccaccagctgataccaagaaacaagagttcagtactgataccaaggtttccagttctgtttctgttttggaaggatctgtgccgaatgaaattggtacaccattacagagtgttcataatgtagcagtttctgcaccaccgcatcaatcagctaggggcaggaaatgccaagcaggagaaacacctcgtaggcgaggccgaaaaccaaaatctctatcttcatctggtgtagatgatgttagtcttaacccaaccttttcaactgttagtggtgtagcagacactagttatgttccttcatattctcaggtctcatcacaaggcactgctgtggcactggcaggaatccagaaggattttgtgacagttaagttggatacattgttaccagatagtggtaagggtgctcctcctgttaatgagggagataaaggtgctactgttacaacacctgtggcaaaagatatatgtgctgggactgtgacaacatcagacaacactgtcaccctgacaccaaatactcttaaggaaaacattggattagttcaagtggcatctgcaccttctatgctcgtggcttctgaagaactaatgaaaatagcacatgttgcggtggccgataagcctgttgagaagcaaactgcttcacgtcgccgcagaaagaaaacatctagtagcgaggatactggagtcagcactagacaaagatcagctatgaaaagatcttactacaacacctctgttgccgttgatgatattggttctgctgtgatcccaaatgaaaaatcaggaataacgaaggaaagagatgtcagttcaattcaaagtacatccaatgaactaccaaatattaactcaccattgtatgagaagtctggatatgattctcaaccaagcacacctatagctgtccccatcaatgaagacactcttcctagtggttttgacacctgtactaattctatgataactcttgccacatctgccaactctgctgaagatgataaaccagttgatttgcaccttaatgcacctgtttctgttgattcccaaaaccaagaacaacacatgacagggaaggaccatttggcagtgtgttctagaatctttgctactcagttacagacggacactgcaaatcctgctattgatcataaaccaggaactgcccagtttgaaccatctgcttccttgccccagaattcaggcaaggatgctactgcactaccttctgaggttgacagtgctgctccaaatagggcatcaagcaggaggaggaaagggtcaactcgagaaccacgcaccagaagtaattctgcatcagctgcaagtgaacgtcgtgcccgacttactggattgaagcaggcagaggacataaagaagttagagatgtcagcaacgccgaccacaacagtgtgtatttcatcggtagagcaacagggagctgcttctttaagtgcgaagattaccaatgcttctgtttctgaaggacagaagaatcctggaaattatatgccttctgccatttcaattcccgtggggagccatgttctgggcctgggcgcaacaagtattgaagaaacaactgccactatgataactcaggctcctgcagtttcaaaatcagaacgaagaaaacttccaggaggcagtcaacaaggtattcagtttgagagttcagcatcaaaaacaaagatggtatcagctgtggaaccagcacctgcaaatgttgaatgcatgcaaggtactgaagttaatagttcagaacagacaatagtttctgctactgaaccagcacctgcaaatgatgaacacatgcaagagcaaccaacaaatatcgtttcatctgtggaatcagaaccttcaaatgatgaagagcacacaaagcatgaagtgtttcttgcgactactggtgataatatgcttgcttctagtgcaggaactgaaatattgcgggatacagttgagcatgctgcttgccagccagaagcagtatgcacagatggaactgcaaggcagtctgaattgtcgcaacttgatagaaaagcctttcatgatgcctcatataaatacactcatgggtccactaaagatgatggtatcttgcccagtgaaggtacttctgttgatgttactggttctaagcaggatgatgtgaacattgttggcacacaaactgatgatgtttctcggggttctagtcattttccagttattttacaatcaactgagtcagatcggcctccaggtcaagtgaagaatttggagagtaggatggagcaggtgaaaacagaagaagctttggttaacagttctggtggcaatcaaactcacagtctgggcgatgaaccttctcataatacatcattagcaagaaattctccctcagaacactcgaatgagcgttgctctgatcaagtaattggtgaaaatttcaaaagtaaagaaaatattgttgaagtccattctggcattaatactgatggccccgatgaagctctgaatgcattgcacacccaatctaaggaggccagcatgacagatattggtgtacctactgatggtgatagatgtgaaggtaaagggactagtgtcgaggtctgtgctgacatgaatactgatgggcctgtggctacccaggatgcttcgtccacgaaatctgataaagagtcctgcatgatggaatgtggtgtgtctaccgatggctgtcccacagtttgcaaaacacacaatgatctccagggtcatgtatcttgtgaagaaacctttgttaggactggtggtgatgacacaacccatatcaccaatgcaaattatggttctaataatgaaagtgaggccaccattgctagtcctgttgaaaccacacaaaaactgatggaagggagcactgttattgtgtcggagaattctgatttaaataagcaatgccacacattgcatactagaaatgatcctcctgcaaataccctgttgatagttgagtctaacaaagttacttgtgatgctgaaattgtttgtgctagcaggttagaatcttctggcattgaggctgaaacagtgggtatccaagagtcagctcttactgattttgagggaacaaaaggaactggggatttgggtgacagaactaacagtcaactgcatgatgatgttcatgggacatcatgttccacgatagctcttgtatctgagaaagaaccttccgaagatcttaccaccggtagccattcagaagcatctaatttacttgctgctgtagaacaaactcaagaaactactgttgagaaccaagagatcatagatgcagtagtgtttatggatgcctgcaaggcagaacctgttggtgattttactattgctaaaggagctgaacagactgtagaaatggttcattatgttgataagcaatctgctgtattagactatgttgagacacagacaaaacgaacttcggtttgtggttctacgctaaatgaatcccctcaggctgcagggttggaagaagactgctctgtactgaagcatggtgatcctacttcatctgagcttcttactgtagcacctaatccaatcggtgaaacttctgttattcaagtggaaccagaggcaagaaactcagatggatactgcacaacagaggctggcagtgctttatctgaaactgtcatgggattggagccaaataaagaaactgcggttccaatgcaagagaatattggagaagctaatgataattttaataattgcgaagcacacaataattcggagattcatgcatttgaagtgtcgatggaaacgcagtcatcagaagtcaaggaagtatcttctattcagtctggtgcagcaaatttgagcacacagacaactgcactgcctgatgtaacaggacaaaccagtatggcatcgactggagaactagtatctacaaatgaacacatacacatgcaaggcactgaaatcaattcagagcaacaaacaaagatggtttcacctgctgaatcagcacctgctaatgatgaacacgtgcaagacattgtgattcttagttcagaacagcaaacaaagatggttttagctgcagagattgacgcattatgcgtccaggagactgcaattattgatcttgggggagcaagaggaacagttgacctgaatgacataagaacacaggttcctgcattacctggaagggatgtgctagatgtggaggcacatattttggagcaaaaaaaaacatcttcaccaggtgatgaaattaagggttcagaacaagcaaaaatcgaatcgattgcagagatcgaaacagtgggcgtcaaggagaatgtcattgctgatcataaggaaacaggtaacaacagtggcgtaagtatacatgcgcctctattagttgaatctggacaaaaggcatcacctggagttgaattgcgtggtattgaggttgatgctcatgttttggaacaagcaaagatggtttcagctctagaaccagactctactccagaagtttgtgctgacaagttagaaccttctggtgctgatgatgttggaatgattgttgtccaggaggctgcttctgttgatgatcacaatagagcacaaggtggtgaggctcattgttcagaacaaataaagatggcttcaattgcacaagcggtgtctagcatggctttagtaggatattcttcttcagaagactcaatggtggatgctgctgcccgagtaactgatgctgattttgtggatagtaaagcagctggtgtttatcgccaagaaactatgcctactcaaaccacctctaccctcccagagaacatggattctcctgcaactgctgctaccatggttgaatcgaagtttgctgcctcgtctgagcacgttgcaggacccgagccaattgatgaaacttctgttatgcaagtggaactggcaacaagcacaggggatggatgtgcagcagatggtcacaatcttgtttcatctgaaactgttgttgaagtgaagcttgctcaagaaattgttgttcctagtccaggtggtagcatagaagctaataatacttctaccatcagcgaagtatacaaagatacccagtctcgtgcatctggtgaagcatgcaatgatggtcagtctcatggtgatgaaaatatgaaacttggtgaagcttacactgaactgcagctggcaccttcctctggtgaggaggccatgacatgtatgtgtagtgagctgcccagccaggaggtggaggctccaagcagtgaccctttggagaataatgaagaaacgaaaaatgaagctgctgctcaaggatcagtaaatgaggattctgctcctcgtgctgaaaatgcaaagattgatgaagctgacacagaacaggaactgcttccatctggtgaggccacggtagacgaatccagcgagctactcagccaagacgaaaaggtggctcgtaaagatgcaaagatggaagagtctgctgctgctgctgctgcacagagacagctaactactgaagttgctcatgcaagtgaaaacgcgaaacttggtgaagatggcacggagctgcaactgccaccaccttcaatggtagacatatctagggagcaactcagccaggaagtggaggttgcaagctctgggccttcaggaactgatgaaactgctgagatgaaacggctaaacactgaacattcacctggtgatgaaacttcaaaacttgttggaactgatctaggactgcaattgtcaccttctggtgatgccatggtagatatatctaataagccacccagctgccaagacgtaaaggaggccccgagcagtgacattttgggaaatgatgaaaattcagacaccgagaagactcctgctgccttgcatggacggctgaacaccgaacttgctcctagtggcagaaatacagaatttagtgaagctgacactggaaaacaagagacacccgtgtctgctgaggctatggtagaatcatcgagcgagcctcgcagccatgaggcaaaggaagctccaacccctgacctgtctggggatgatgaaaaagcgaagtcagcaagggctgctgttgttgcggaactttttggagatgcaacagaaggtggttcggatcagccattgccgtctcctagagaacaaggcaaggaagcagaggccgatggaggcttttagagtaaagttgcaaatattgtatcaagagatactagaatccgtgtaagtaagaactgctaatagtgcttttagttgtaactggtgtaagcttctactcagaatcaaaagcgacgtgctgagattacagcaacagtggcctacggcagtttactactgttttgtgcaatattgctgctgagttttgttgagacaggcaattgatctgtcatctgtctcgtcttgcatcgaagttggcagcaccatggtgaggtgctcccgccttaacctggaagcgctgacagagggaagaacaatactctctggtttcctaatgttttcctgttcactgttttgatttgatgctgcattgcagtagtgtgacttagtaacataatggtgcgtttggatagacggacataccgatccagaatcatctgaacctaaatattgagtacaagcttagattatctgtttggtctgctttatgtctgggtgcaatgctctctgatttctggacggagtggtaccgcaatccaaacagactttaatgtttgggtgcttcaggtcataatcaaccatctaatttactttgcaaatgaatgtttcaaactggactgctcaagcctaccaagtttaatggtccttcctagtattgaatccttttgagtctagcccgtttcctcatttgaattttcactgttagtgtgcctatacttgcctcacgtagaattttgaaagcttatggttgggtgcg

SEQ ID NO: 218345 - DNA, 12406 bp, Zea Mays
gggagagagtgcatcagcactgcaggggtctactgaggcactccaagtggggaaatggcggaggcgacgaattcgagcttgggcacgtaggcgtcgctcctgccatcgccgcagcggtcactggactctcacgccgccgccgccgccgccggagaccattagttctcctgcgcggcggctccgcggctcccgccctctcccttaccttcttcccgctagggttttctccgatccccaatcactgctggttcacaaatggcttcatctcagcatgttgagatggaggctgcgaaacttctacataaacttatccaggagtcgaaggatgagcctgctaaactagcaacaaaactttacgtgatatgtcagcatatgaaactaagtggaaaggagcaatcactgccatatcaagtcatatcaagggctatggagacagttgtgaaccaacatggaattgatatggatgcattgcgatcatcacgaattccatttgctggtggtcctcaggcaggggattctagtggtgtcatgtcaaaggacaaggaggtcattggtaaccagtctcccatggtcggaagtgatgcttcccaaagtagtggacaagctggattatggcagcttccatcaggttcaaccgatatgataagacatggggcatctatttcaggtagggtacccacagggccaaataggggagatttctcagcagctgatattcatcaaggctccatgtcacaaaaaagcggtagatcctctggcattgaaagccctgcaagtctgcagatggaggacaccagatctatgaattcacatgattctttgaaatccgatgagaaaacaagtaagaaaacctcttccaagagaaaaaggatggattcaaaaggagctggtgatttgcgttcagaagacaactcaaagtcagatgttatctccactggacagaataccaggaaggggaaacaggttggtaaggctggtagacaaggtcagccttccatgggaattgagcatgagcagcaacctcataaactgcaaggtggtactggtcaggtaccacctatacatggtggtgcaccttttctcaggactcgctcagaaggtccttctgggaggacaatggacaagactaaaccatcaaatccattctcaatgggtcaaattccaaattttcctgaagggctggcttctactggtgctccaatcgagttgcagaaaagtatacagggtggagcaagtttatttaatcctggttttggctggaaccaaaatccacaagttcaaaccttgaagaattctcaaggttctattcataatttagtgaggtctggagttactgttgaagggaaagttaatgtaggggcacaaggagcttttaactctgcctctgcaccacagatggaatttcccacagttcctccatacaacccctcttccttcggagctagctcacagtttctggacaaaggcaaggagttggtttccagcattataagcactgaacctcattcatctaaagttgcatctcagcctgggatttctcatggaagtcccatgcaagaaaggcaaggtatgatcagggtgccacagagaggcgaggcatcatttcaggaacgcaggccatcttcacttccgagtagaagtactgggccaagtccaatgtctcacatttcttccaacacaccatttaaagaacagcagctgaagcagctcagagcacagtgcttagtatttcttgcatttaggaataatttgcagcccaggaaggtacatcttgaaattgctttgggcagagggcctcctgcagaaagtgacagtgcaggtcaaaggggcagcgagggcagagtgtctgatgctctgggaaaggaaaatggtagcagtcgggagaactctggtgtcttttgtaggcaaactgatatctctagacttccagccacatctgcaggaagtattgcagaggatgattccttatcgaaggatccagaaaatgctacaaaaaaaatcaagttagctgaacaggagaagtcattgatggaagtagaaaatgtccagcaagcttctgttatgcaaggaactagttctgaaatgcgttcccaagaaactgcatctcaaaatccatatcgaccacaacagtcatattatcaaggagatacaagaagaatcgcctcggatatccataggactgatgctgaaattttgaaccagaatttaagttggggaggccagggatctactgctttgggtggtactagacagcttctgaatcaggaaactaaagaatcacttgcaccttcaaagtcacaccatatgcctgttgatggttacaactccaatatacaaggaatagatcggactccagagatagctggagctggtaatgatgttgaaaattgtagccacgtagcagatattgtgcctgagcaggctgctgatgaaggagatgaggacctctcagagcatgaggatttattgtcatctccaaagcacacaatgacggaaaaatggatcttagattaccagaagagaatttacaatgagaaacaaaagagaacattggagcagcataaggtacacagcagaatgtcagcaacatatgaggagctaaaggagagcgttaattcatccgaagatctttctgcaaagaccaagagcgtcattgaattgaaaaagcttcagcttctgccacttcaacgtcgtgtacgcagtgaatttttgctggattttttcaagcctaatacatccgacttagagcgcataaaatcactgaagaaacataggcatgggcggcgggtgaaacagcttgaaaaaattgaacagaaaatgaaggaagaaaggcaaaagagaattcgtgagagacagaaggaattctttgctgatattgaagcttacagagagaaactcgaggataacttcaaggttaagagagagcgcttgaaggggttcaatcgatacataaaagaatttcacaaaaggaaagaaagaattcatcgggagaaactggataggatccaacgcgagaaaatcaacctgcttaagaacaatgatgttgaaggttatcttagaatggtcaaggatgcaaaatctgatcgtgtcaagcaactattgcgtgaaactgagaaatatcttcagaaacttgggaacaaattacagagtgcaaagtccacagatggccgctcatcttttgttactgataagagtgacactgcaaacgacattgaagatgagagctaccagccacagcattatctggaaagtaatgaaaagtactatcaactggcacacagtgtaaaggaaactgtaaatgatcagccatcttatcttcagggcggcaaattgcgagagtaccaaatgaatggcttgcgttggctggtttcattgtacaataataatttgaatggtattttagcagatgagatgggccttggtaaaacagtacaagtaatctctttgatatgctaccttatggaaacaaaaaatgaccgtgggccttttctcgtggttgtaccatcatctgttcttcctggatgggaatctgaactcagcttctgggcacctagtataaataaaattgcttatgctggtcctcctgaagaaaggcgcaggatgttcaaagagatgattgttcatcagaagttcaatgttcttctgacaacatatgagtacttgatgaacaagcatgataggccaaaactaagcaaaatacaatggcactatataataatcgatgaagggcatcgtattaaaaatgcttcttgtaaacttaatgctgatttgaagctttatcggagctctcatcggatattattgacaggaacacctcttcagaataatctcgaggagctgtgggcacttctaaattttttgttgcccaatatttttaattcgtcagaggacttctctcagtggtttaacaaaccatttgaaagtaatggtgataattcacctgatgaggccttactttcagaggaggagaacttgttgatcataaatcgtcttcaccaggttcttcggccctttgtactcagaagacttaagcataaggtcgaaaatgagcttcctgaaaaaattgaaagacttgtaagatgtgaggcatctgcttatcagaaacttctcatgacaagggtggaagaaaatcttggtggaattggagccgttaaggttcgctccgttcacaactctgtcatggaattgaggaacatatgcaaccatccatacttgagccagcttcatgttgaagagattgagggctacctacctaaacattacctaccatctattttgaggctctgcggaaaacttgagatgttggacagattgctgcctaaactcaaagctacgggccatagggttctacttttttctacaatgacaagattgcttgatgtaatggaggattacttggtttggaaaaagtataaatatcttcgattggatgggcacacttctggccatgaaagaggagctcttatcgataaatttaacgatcctaattctcaagcattcatttttcttcttagtatacgagctggaggtgttggggtcaatctccaagctgccgatacagttatcatatttgatactgattggaatcctcaggttgatctgcaagcacaggctagggcccacaggattggtcaaaagaaggaggttcttgttttacgtttagaaacggtccgaactgttgaagagcaagtcagggcttcagcagaacacaaattaggtgttgctaatcagagtataactgctggtttttttgacaataacacaagtgctgaagatcgaagagagtatcttgaatcactcctacgtgagtctaaaaaggaagaagcagctccagtgttagatgatgatgctctgaatgacattctagctcggagcgaagctgagattgacatattcgaatctattgacaagcaaaggagagaagaagaaatggcagcttggcaaaaggtggttcaggatggttcaactagtgggctagaccctggagtattgccttctcgtcttgtaactgatgatgatctgaagcccttctgccatgctatgaaactttatgagccatcaaatgtgaaaacagtaaatgtgaatgtgaggaagaagggtgaacttgggggccttgatacacagcactatggaaggggtaaacgagcccgtgaggttcgctcttatgaagaccaatggactgaagaagaatttgaaaaactttgtcaagctgattctcctgaatcatcccaacctggtggcatgtcgaaggatttggatattcttaataaaggcattaagactgaaattcttgtggagagttcaaaagaaccagaacaaacgaagatggaggcatccccaactgtcggtgactctccaccagccaaacggcggagaggtagacctaaaaggtcagatgtttttgtatctcctactgctggtctgactgatgctgtcaaacaagacacaggaaccacacaggacggtagttctgctacaccagcaagtaccatccactctgatgcaccagctactgcaatcaattcagctgtttcagatgttaatatacattctattccaccagctgataccaagaaacaagagttcagtactgataccaaggtttccagttctgtttctgttttggaaggatctgtgccgaatgaaattggtacaccattacagagtgttcataatgtagcagtttctgcaccaccgcatcaatcagctaggggcaggaaatgccaagcaggagaaacacctcgtaggcgaggccgaaaaccaaaatctctatcttcatctggtgtagatgatgttagtcttaacccaaccttttcaactgttagtggtgtagcagacactagttatgttccttcatattctcaggtctcatcacaaggcactgctgtggcactggcaggaatccagaaggattttgtgacagttaagttggatacattgttaccagatagtggtaagggtgctcctcctgttaatgagggagataaaggtgctactgttacaacacctgtggcaaaagatatatgtgctgggactgtgacaacatcagacaacactgtcaccctgacaccaaatactcttaaggaaaacattggattagttcaagtggcatctgcaccttctatgctcgtggcttctgaagaactaatgaaaatagcacatgttgcggtggccgataagcctgttgagaagcaaactgcttcacgtcgccgcagaaagaaaacatctagtagcgaggatactggagtcagcactagacaaagatcagctatgaaaagatcttactacaacacctctgttgccgttgatgatattggttctgctgtgatcccaaatgaaaaatcaggaataacgaaggaaagagatgtcagttcaattcaaagtacatccaatgaactaccaaatattaactcaccattgtatgagaagtctggatatgattctcaaccaagcacacctatagctgtccccatcaatgaagacactcttcctagtggttttgacacctgtactaattctatgataactcttgccacatctgccaactctgctgaagatgataaaccagttgatttgcaccttaatgcacctgtttctgttgattcccaaaaccaagaacaacacatgacagggaaggaccatttggcagtgtgttctagaatctttgctactcagttacagacggacactgcaaatcctgctattgatcataaaccaggaactgcccagtttgaaccatctgcttccttgccccagaattcaggcaaggatgctactgcactaccttctgaggttgacagtgctgctccaaatagggcatcaagcaggaggaggaaagggtcaactcgagaaccacgcaccagaagtaattctgcatcagctgcaagtgaacgtcgtgcccgacttactggattgaagcaggcagaggacataaagaagttagagatgtcagcaacgccgaccacaacagtgtgtatttcatcggtagagcaacagggagctgcttctttaagtgcgaagattaccaatgcttctgtttctgaaggacagaagaatcctggaaattatatgccttctgccatttcaattcccgtggggagccatgttctgggcctgggcgcaacaagtattgaagaaacaactgccactatgataactcaggctcctgcagtttcaaaatcagaacgaagaaaacttccaggaggcagtcaacaaggtattcagtttgagagttcagcatcaaaaacaaagatggtatcagctgtggaaccagcacctgcaaatgttgaatgcatgcaaggtactgaagttaatagttcagaacagacaatagtttctgctactgaaccagcacctgcaaatgatgaacacatgcaagagcaaccaacaaatatcgtttcatctgtggaatcagaaccttcaaatgatgaagagcacacaaagcatgaagtgtttcttgcgactactggtgataatatgcttgcttctagtgcaggaactgaaatattgcgggatacagttgagcatgctgcttgccagccagaagcagtatgcacagatggaactgcaaggcagtctgaattgtcgcaacttgatagaaaagcctttcatgatgcctcatataaatacactcatgggtccactaaagatgatggtatcttgcccagtgaaggtacttctgttgatgttactggttctaagcaggatgatgtgaacattgttggcacacaaactgatgatgtttctcggggttctagtcattttccagttattttacaatcaactgagtcagatcggcctccaggtcaagtgaagaatttggagagtaggatggagcaggtgaaaacagaagaagctttggttaacagttctggtggcaatcaaactcacagtctgggcgatgaaccttctcataatacatcattagcaagaaattctccctcagaacactcgaatgagcgttgctctgatcaagtaattggtgaaaatttcaaaagtaaagaaaatattgttgaagtccattctggcattaatactgatggccccgatgaagctctgaatgcattgcacacccaatctaaggaggccagcatgacagatattggtgtacctactgatggtgatagatgtgaaggtaaagggactagtgtcgaggtctgtgctgacatgaatactgatgggcctgtggctacccaggatgcttcgtccacgaaatctgataaagagtcctgcatgatggaatgtggtgtgtctaccgatggctgtcccacagtttgcaaaacacacaatgatctccagggtcatgtatcttgtgaagaaacctttgttaggactggtggtgatgacacaacccatatcaccaatgcaaattatggttctaataatgaaagtgaggccaccattgctagtcctgttgaaaccacacaaaaactgatggaagggagcactgttattgtgtcggagaattctgatttaaataagcaatgccacacattgcatactagaaatgatcctcctgcaaataccctgttgatagttgagtctaacaaagttacttgtgatgctgaaattgtttgtgctagcaggttagaatcttctggcattgaggctgaaacagtgggtatccaagagtcagctcttactgattttgagggaacaaaaggaactggggatttgggtgacagaactaacagtcaactgcatgatgatgttcatgggacatcatgttccacgatagctcttgtatctgagaaagaaccttccgaagatcttaccaccggtagccattcagaagcatctaatttacttgctgctgtagaacaaactcaagaaactactgttgagaaccaagagatcatagatgcagtagtgtttatggatgcctgcaaggcagaacctgttggtgattttactattgctaaaggagctgaacagactgtagaaatggttcattatgttgataagcaatctgctgtattagactatgttgagacacagacaaaacgaacttcggtttgtggttctacgctaaatgaatcccctcaggctgcagggttggaagaagactgctctgtactgaagcatggtgatcctacttcatctgagcttcttactgtagcacctaatccaatcggtgaaacttctgttattcaagtggaaccagaggcaagaaactcagatggatactgcacaacagaggctggcagtgctttatctgaaactgtcatgggattggagccaaataaagaaactgcggttccaatgcaagagaatattggagaagctaatgataattttaataattgcgaagcacacaataattcggagattcatgcatttgaagtgtcgatggaaacgcagtcatcagaagtcaaggaagtatcttctattcagtctggtgcagcaaatttgagcacacagacaactgcactgcctgatgtaacaggacaaaccagtatggcatcgactggagaactagtatctacaaatgaacacatacacatgcaaggcactgaaatcaattcagagcaacaaacaaagatggtttcacctgctgaatcagcacctgctaatgatgaacacgtgcaagacattgtgattcttagttcagaacagcaaacaaagatggttttagctgcagagattgacgcattatgcgtccaggagactgcaattattgatcttgggggagcaagaggaacagttgacctgaatgacataagaacacaggttcctgcattacctggaagggatgtgctagatgtggaggcacatattttggagcaaaaaaaaacatcttcaccaggtgatgaaattaagggttcagaacaagcaaaaatcgaatcgattgcagagatcgaaacagtgggcgtcaaggagaatgtcattgctgatcataaggaaacaggtaacaacagtggcgtaagtatacatgcgcctctattagttgaatctggacaaaaggcatcacctggagttgaattgcgtggtattgaggttgatgctcatgttttggaacaagcaaagatggtttcagctctagaaccagactctactccagaagtttgtgctgacaagttagaaccttctggtggtgaggctcattgttcagaacaaataaagatggcttcaattgcacaagcggtgtctagcatggctttagtaggatattcttcttcagaagactcaatggtggatgctgctgcccgagtaactgatgctgattttgtggatagtaaagcagctggtgtttatcgccaagaaactatgcctactcaaaccacctctaccctcccagagaacatggattctcctgcaactgctgctaccatggttgaatcgaagtttgctgcctcgtctgagcacgttgcaggacccgagccaattgatgaaacttctgttatgcaagtggaactggcaacaagcacaggggatggatgtgcagcagatggtcacaatcttgtttcatctgaaactgttgttgaagtgaagcttgctcaagaaattgttgttcctagtccaggtggtagcatagaagctaataatacttctaccatcagcgaagtatacaaagatacccagtctcgtgcatctggtgaagcatgcaatgatggtcagtctcatggtgatgaaaatatgaaacttggtgaagcttacactgaactgcagctggcaccttcctctggtgaggaggccatgacatgtatgtgtagtgagctgcccagccaggaggtggaggctccaagcagtgaccctttggagaataatgaagaaacgaaaaatgaagctgctgctcaaggatcagtaaatgaggattctgctcctcgtgctgaaaatgcaaagattgatgaagctgacacagaacaggaactgcttccatctggtgaggccacggtagacgaatccagcgagctactcagccaagacgaaaaggtggctcgtaaagatgcaaagatggaagagtctgctgctgctgctgctgcacagagacagctaactactgaagttgctcatgcaagtgaaaacgcgaaacttggtgaagatggcacggagctgcaactgccaccaccttcaatggtagacatatctagggagcaactcagccaggaagtggaggttgcaagctctgggccttcaggaactgatgaaactgctgagatgaaacggctaaacactgaacattcacctggtgatgaaacttcaaaacttgttggaactgatctaggactgcaattgtcaccttctggtgatgccatggtagatatatctaataagccacccagctgccaagacgtaaaggaggccccgagcagtgacattttgggaaatgatgaaaattcagacaccgagaagactcctgctgccttgcatggacggctgaacaccgaacttgctcctagtggcagaaatacagaatttagtgaagctgacactggaaaacaagagacacccgtgtctgctgaggctatggtagaatcatcgagcgagcctcgcagccatgaggcaaaggaagctccaacccctgacctgtctggggatgatgaaaaagcgaagtcagcaagggctgctgttgttgcggaactttttggagatgcaacagaaggtggttcggatcagccattgccgtctcctagagaacaaggcaaggaagcagaggccgatggaggcttttagagtaaagttgcaaatattgtatcaagagatactagaatccgtgtaagtaagaactgctaatagtgcttttagttgtaactggtgtaagcttctactcagaatcaaaagcgacgtgctgagattacagcaacagtggcctacggcagtttactactgttttgtgcaatattgctgctgagttttgttgagacaggcaattgatctgtcatctgtctcgtcttgcatcgaagttggcagcaccatggtgaggtgctcccgccttaacctggaagcgctgacagagggaagaacaatactctctggtttcctaatgttttcctgttcactgttttgatttgatgctgcattgcagtagtgtgacttagtaacataatggtgcgtttggatagacggacataccgatccagaatcatctgaacctaaatattgagtacaagcttagattatctgtttggtctgctttatgtctgggtgcaatgctctctgatttctggacggagtggtaccgcaatccaaacagactttaatgtttgggtgcttcaggtcataatcaaccatctaatttactttgcaaatgaatgtttcaaactggactgctcaagcctaccaagtttaatggtccttcctagtattgaatccttttgagtctagcccgtttcctcatttgaattttcactgttagtgtgcctatacttgcctcacgtagaattttgaaagcttatggttgggtgcg

SEQ ID NO: 218346 - DNA, 12435 bp, Zea Mays
ggagagagtgcatcagcactgcaggggtctactgaggcactccaagtggggaaatggcggaggcgacgaattcgagcttgggcacgtaggcgtcgctcctgccatcgccgcagcggtcactggactctcacgccgccgccgccgccgccggagaccattagttctcctgcgcggcggctccgcggctcccgccctctcccttaccttcttcccgctagggttttctccgatccccaatcactgctggttcacaaatggcttcatctcagcatgttgagatggaggctgcgaaacttctacataaacttatccaggagtcgaaggatgagcctgctaaactagcaacaaaactttacgtgatatgtcagcatatgaaactaagtggaaaggagcaatcactgccatatcaagtcatatcaagggctatggagacagttgtgaaccaacatggaattgatatggatgcattgcgatcatcacgaattccatttgctggtggtcctcaggcaggggattctagtggtgtcatgtcaaaggacaaggaggtcattggtaaccagtctcccatggtcggaagtgatgcttcccaaagtagtggacaagctggattatggcagcttccatcaggtagggtacccacagggccaaataggggagatttctcagcagctgatattcatcaaggctccatgtcacaaaaaagcggtagatcctctggcattgaaagccctgcaagtctgcagatggaggacaccagatctatgaattcacatgattctttgaaatccgatgagaaaacaagtaagaaaacctcttccaagagaaaaaggatggattcaaaaggagctggtgatttgcgttcagaagacaactcaaagtcagatgttatctccactggacagaataccaggaaggggaaacaggttggtaaggctggtagacaaggtcagccttccatgggaattgagcatgagcagcaacctcataaactgcaaggtggtactggtcaggtaccacctatacatggtggtgcaccttttctcaggactcgctcagaaggtccttctgggaggacaatggacaagactaaaccatcaaatccattctcaatgggtcaaattccaaattttcctgaagggctggcttctactggtgctccaatcgagttgcagaaaagtatacagggtggagcaagtttatttaatcctggttttggctggaaccaaaatccacaagttcaaaccttgaagaattctcaaggttctattcataatttagtgaggtctggagttactgttgaagggaaagttaatgtaggggcacaaggagcttttaactctgcctctgcaccacagatggaatttcccacagttcctccatacaacccctcttccttcggagctagctcacagtttctggacaaaggcaaggagttggtttccagcattataagcactgaacctcattcatctaaagttgcatctcagcctgggatttctcatggaagtcccatgcaagaaaggcaaggtatgatcagggtgccacagagaggcgaggcatcatttcaggaacgcaggccatcttcacttccgagtagaagtactgggccaagtccaatgtctcacatttcttccaacacaccatttaaagaacagcagctgaagcagctcagagcacagtgcttagtatttcttgcatttaggaataatttgcagcccaggaaggtacatcttgaaattgctttgggcagagggcctcctgcagaaagtgacagtgcaggtcaaaggggcagcgagggcagagtgtctgatgctctgggaaaggaaaatggtagcagtcgggagaactctggtgtcttttgtaggcaaactgatatctctagacttccagccacatctgcaggaagtattgcagaggatgattccttatcgaaggatccagaaaatgctacaaaaaaaatcaagttagctgaacaggagaagtcattgatggaagtagaaaatgtccagcaagcttctgttatgcaaggaactagttctgaaatgcgttcccaagaaactgcatctcaaaatccatatcgaccacaacagtcatattatcaaggagatacaagaagaatcgcctcggatatccataggactgatgctgaaattttgaaccagaatttaagttggggaggccagggatctactgctttgggtggtactagacagcttctgaatcaggaaactaaagaatcacttgcaccttcaaagtcacaccatatgcctgttgatggttacaactccaatatacaaggaatagatcggactccagagatagctggagctggtaatgatgttgaaaattgtagccacgtagcagatattgtgcctgagcaggctgctgatgaaggagatgaggacctctcagagcatgaggatttattgtcatctccaaagcacacaatgacggaaaaatggatcttagattaccagaagagaatttacaatgagaaacaaaagagaacattggagcagcataaggtacacagcagaatgtcagcaacatatgaggagctaaaggagagcgttaattcatccgaagatctttctgcaaagaccaagagcgtcattgaattgaaaaagcttcagcttctgccacttcaacgtcgtgtacgcagtgaatttttgctggattttttcaagcctaatacatccgacttagagcgcataaaatcactgaagaaacataggcatgggcggcgggtgaaacagcttgaaaaaattgaacagaaaatgaaggaagaaaggcaaaagagaattcgtgagagacagaaggaattctttgctgatattgaagcttacagagagaaactcgaggataacttcaaggttaagagagagcgcttgaaggggttcaatcgatacataaaagaatttcacaaaaggaaagaaagaattcatcgggagaaactggataggatccaacgcgagaaaatcaacctgcttaagaacaatgatgttgaaggttatcttagaatggtcaaggatgcaaaatctgatcgtgtcaagcaactattgcgtgaaactgagaaatatcttcagaaacttgggaacaaattacagagtgcaaagtccacagatggccgctcatcttttgttactgataagagtgacactgcaaacgacattgaagatgagagctaccagccacagcattatctggaaagtaatgaaaagtactatcaactggcacacagtgtaaaggaaactgtaaatgatcagccatcttatcttcagggcggcaaattgcgagagtaccaaatgaatggcttgcgttggctggtttcattgtacaataataatttgaatggtattttagcagatgagatgggccttggtaaaacagtacaagtaatctctttgatatgctaccttatggaaacaaaaaatgaccgtgggccttttctcgtggttgtaccatcatctgttcttcctggatgggaatctgaactcagcttctgggcacctagtataaataaaattgcttatgctggtcctcctgaagaaaggcgcaggatgttcaaagagatgattgttcatcagaagttcaatgttcttctgacaacatatgagtacttgatgaacaagcatgataggccaaaactaagcaaaatacaatggcactatataataatcgatgaagggcatcgtattaaaaatgcttcttgtaaacttaatgctgatttgaagctttatcggagctctcatcggatattattgacaggaacacctcttcagaataatctcgaggagctgtgggcacttctaaattttttgttgcccaatatttttaattcgtcagaggacttctctcagtggtttaacaaaccatttgaaagtaatggtgataattcacctgatgaggccttactttcagaggaggagaacttgttgatcataaatcgtcttcaccaggttcttcggccctttgtactcagaagacttaagcataaggtcgaaaatgagcttcctgaaaaaattgaaagacttgtaagatgtgaggcatctgcttatcagaaacttctcatgacaagggtggaagaaaatcttggtggaattggagccgttaaggttcgctccgttcacaactctgtcatggaattgaggaacatatgcaaccatccatacttgagccagcttcatgttgaagagattgagggctacctacctaaacattacctaccatctattttgaggctctgcggaaaacttgagatgttggacagattgctgcctaaactcaaagctacgggccatagggttctacttttttctacaatgacaagattgcttgatgtaatggaggattacttggtttggaaaaagtataaatatcttcgattggatgggcacacttctggccatgaaagaggagctcttatcgataaatttaacgatcctaattctcaagcattcatttttcttcttagtatacgagctggaggtgttggggtcaatctccaagctgccgatacagttatcatatttgatactgattggaatcctcaggttgatctgcaagcacaggctagggcccacaggattggtcaaaagaaggaggttcttgttttacgtttagaaacggtccgaactgttgaagagcaagtcagggcttcagcagaacacaaattaggtgttgctaatcagagtataactgctggtttttttgacaataacacaagtgctgaagatcgaagagagtatcttgaatcactcctacgtgagtctaaaaaggaagaagcagctccagtgttagatgatgatgctctgaatgacattctagctcggagcgaagctgagattgacatattcgaatctattgacaagcaaaggagagaagaagaaatggcagcttggcaaaaggtggttcaggatggttcaactagtgggctagaccctggagtattgccttctcgtcttgtaactgatgatgatctgaagcccttctgccatgctatgaaactttatgagccatcaaatgtgaaaacagtaaatgtgaatgtgaggaagaagggtgaacttgggggccttgatacacagcactatggaaggggtaaacgagcccgtgaggttcgctcttatgaagaccaatggactgaagaagaatttgaaaaactttgtcaagctgattctcctgaatcatcccaacctggtggcatgtcgaaggatttggatattcttaataaaggcattaagactgaaattcttgtggagagttcaaaagaaccagaacaaacgaagatggaggcatccccaactgtcggtgactctccaccagccaaacggcggagaggtagacctaaaaggtcagatgtttttgtatctcctactgctggtctgactgatgctgtcaaacaagacacaggaaccacacaggacggtagttctgctacaccagcaagtaccatccactctgatgcaccagctactgcaatcaattcagctgtttcagatgttaatatacattctattccaccagctgataccaagaaacaagagttcagtactgataccaaggtttccagttctgtttctgttttggaaggatctgtgccgaatgaaattggtacaccattacagagtgttcataatgtagcagtttctgcaccaccgcatcaatcagctaggggcaggaaatgccaagcaggagaaacacctcgtaggcgaggccgaaaaccaaaatctctatcttcatctggtgtagatgatgttagtcttaacccaaccttttcaactgttagtggtgtagcagacactagttatgttccttcatattctcaggtctcatcacaaggcactgctgtggcactggcaggaatccagaaggattttgtgacagttaagttggatacattgttaccagatagtggtaagggtgctcctcctgttaatgagggagataaaggtgctactgttacaacacctgtggcaaaagatatatgtgctgggactgtgacaacatcagacaacactgtcaccctgacaccaaatactcttaaggaaaacattggattagttcaagtggcatctgcaccttctatgctcgtggcttctgaagaactaatgaaaatagcacatgttgcggtggccgataagcctgttgagaagcaaactgcttcacgtcgccgcagaaagaaaacatctagtagcgaggatactggagtcagcactagacaaagatcagctatgaaaagatcttactacaacacctctgttgccgttgatgatattggttctgctgtgatcccaaatgaaaaatcaggaataacgaaggaaagagatgtcagttcaattcaaagtacatccaatgaactaccaaatattaactcaccattgtatgagaagtctggatatgattctcaaccaagcacacctatagctgtccccatcaatgaagacactcttcctagtggttttgacacctgtactaattctatgataactcttgccacatctgccaactctgctgaagatgataaaccagttgatttgcaccttaatgcacctgtttctgttgattcccaaaaccaagaacaacacatgacagggaaggaccatttggcagtgtgttctagaatctttgctactcagttacagacggacactgcaaatcctgctattgatcataaaccaggaactgcccagtttgaaccatctgcttccttgccccagaattcaggcaaggatgctactgcactaccttctgaggttgacagtgctgctccaaatagggcatcaagcaggaggaggaaagggtcaactcgagaaccacgcaccagaagtaattctgcatcagctgcaagtgaacgtcgtgcccgacttactggattgaagcaggcagaggacataaagaagttagagatgtcagcaacgccgaccacaacagtgtgtatttcatcggtagagcaacagggagctgcttctttaagtgcgaagattaccaatgcttctgtttctgaaggacagaagaatcctggaaattatatgccttctgccatttcaattcccgtggggagccatgttctgggcctgggcgcaacaagtattgaagaaacaactgccactatgataactcaggctcctgcagtttcaaaatcagaacgaagaaaacttccaggaggcagtcaacaaggtattcagtttgagagttcagcatcaaaaacaaagatggtatcagctgtggaaccagcacctgcaaatgttgaatgcatgcaaggtactgaagttaatagttcagaacagacaatagtttctgctactgaaccagcacctgcaaatgatgaacacatgcaagagcaaccaacaaatatcgtttcatctgtggaatcagaaccttcaaatgatgaagagcacacaaagcatgaagtgtttcttgcgactactggtgataatatgcttgcttctagtgcaggaactgaaatattgcgggatacagttgagcatgctgcttgccagccagaagcagtatgcacagatggaactgcaaggcagtctgaattgtcgcaacttgatagaaaagcctttcatgatgcctcatataaatacactcatgggtccactaaagatgatggtatcttgcccagtgaaggtacttctgttgatgttactggttctaagcaggatgatgtgaacattgttggcacacaaactgatgatgtttctcggggttctagtcattttccagttattttacaatcaactgagtcagatcggcctccaggtcaagtgaagaatttggagagtaggatggagcaggtgaaaacagaagaagctttggttaacagttctggtggcaatcaaactcacagtctgggcgatgaaccttctcataatacatcattagcaagaaattctccctcagaacactcgaatgagcgttgctctgatcaagtaattggtgaaaatttcaaaagtaaagaaaatattgttgaagtccattctggcattaatactgatggccccgatgaagctctgaatgcattgcacacccaatctaaggaggccagcatgacagatattggtgtacctactgatggtgatagatgtgaaggtaaagggactagtgtcgaggtctgtgctgacatgaatactgatgggcctgtggctacccaggatgcttcgtccacgaaatctgataaagagtcctgcatgatggaatgtggtgtgtctaccgatggctgtcccacagtttgcaaaacacacaatgatctccagggtcatgtatcttgtgaagaaacctttgttaggactggtggtgatgacacaacccatatcaccaatgcaaattatggttctaataatgaaagtgaggccaccattgctagtcctgttgaaaccacacaaaaactgatggaagggagcactgttattgtgtcggagaattctgatttaaataagcaatgccacacattgcatactagaaatgatcctcctgcaaataccctgttgatagttgagtctaacaaagttacttgtgatgctgaaattgtttgtgctagcaggttagaatcttctggcattgaggctgaaacagtgggtatccaagagtcagctcttactgattttgagggaacaaaaggaactggggatttgggtgacagaactaacagtcaactgcatgatgatgttcatgggacatcatgttccacgatagctcttgtatctgagaaagaaccttccgaagatcttaccaccggtagccattcagaagcatctaatttacttgctgctgtagaacaaactcaagaaactactgttgagaaccaagagatcatagatgcagtagtgtttatggatgcctgcaaggcagaacctgttggtgattttactattgctaaaggagctgaacagactgtagaaatggttcattatgttgataagcaatctgctgtattagactatgttgagacacagacaaaacgaacttcggtttgtggttctacgctaaatgaatcccctcaggctgcagggttggaagaagactgctctgtactgaagcatggtgatcctacttcatctgagcttcttactgtagcacctaatccaatcggtgaaacttctgttattcaagtggaaccagaggcaagaaactcagatggatactgcacaacagaggctggcagtgctttatctgaaactgtcatgggattggagccaaataaagaaactgcggttccaatgcaagagaatattggagaagctaatgataattttaataattgcgaagcacacaataattcggagattcatgcatttgaagtgtcgatggaaacgcagtcatcagaagtcaaggaagtatcttctattcagtctggtgcagcaaatttgagcacacagacaactgcactgcctgatgtaacaggacaaaccagtatggcatcgactggagaactagtatctacaaatgaacacatacacatgcaaggcactgaaatcaattcagagcaacaaacaaagatggtttcacctgctgaatcagcacctgctaatgatgaacacgtgcaagacattgtgattcttagttcagaacagcaaacaaagatggttttagctgcagagattgacgcattatgcgtccaggagactgcaattattgatcttgggggagcaagaggaacagttgacctgaatgacataagaacacaggttcctgcattacctggaagggatgtgctagatgtggaggcacatattttggagcaaaaaaaaacatcttcaccaggtgatgaaattaagggttcagaacaagcaaaaatcgaatcgattgcagagatcgaaacagtgggcgtcaaggagaatgtcattgctgatcataaggaaacaggtaacaacagtggcgtaagtatacatgcgcctctattagttgaatctggacaaaaggcatcacctggagttgaattgcgtggtattgaggttgatgctcatgttttggaacaagcaaagatggtttcagctctagaaccagactctactccagaagtttgtgctgacaagttagaaccttctggtgctgatgatgttggaatgattgttgtccaggaggctgcttctgttgatgatcacaatagagcacaaggtggtgaggctcattgttcagaacaaataaagatggcttcaattgcacaagcggtgtctagcatggctttagtaggatattcttcttcagaagactcaatggtggatgctgctgcccgagtaactgatgctgattttgtggatagtaaagcagctggtgtttatcgccaagaaactatgcctactcaaaccacctctaccctcccagagaacatggattctcctgcaactgctgctaccatggttgaatcgaagtttgctgcctcgtctgagcacgttgcaggacccgagccaattgatgaaacttctgttatgcaagtggaactggcaacaagcacaggggatggatgtgcagcagatggtcacaatcttgtttcatctgaaactgttgttgaagtgaagcttgctcaagaaattgttgttcctagtccaggtggtagcatagaagctaataatacttctaccatcagcgaagtatacaaagatacccagtctcgtgcatctggtgaagcatgcaatgatggtcagtctcatggtgatgaaaatatgaaacttggtgaagcttacactgaactgcagctggcaccttcctctggtgaggaggccatgacatgtatgtgtagtgagctgcccagccaggaggtggaggctccaagcagtgaccctttggagaataatgaagaaacgaaaaatgaagctgctgctcaaggatcagtaaatgaggattctgctcctcgtgctgaaaatgcaaagattgatgaagctgacacagaacaggaactgcttccatctggtgaggccacggtagacgaatccagcgagctactcagccaagacgaaaaggtggctcgtaaagatgcaaagatggaagagtctgctgctgctgctgctgcacagagacagctaactactgaagttgctcatgcaagtgaaaacgcgaaacttggtgaagatggcacggagctgcaactgccaccaccttcaatggtagacatatctagggagcaactcagccaggaagtggaggttgcaagctctgggccttcaggaactgatgaaactgctgagatgaaacggctaaacactgaacattcacctggtgatgaaacttcaaaacttgttggaactgatctaggactgcaattgtcaccttctggtgatgccatggtagatatatctaataagccacccagctgccaagacgtaaaggaggccccgagcagtgacattttgggaaatgatgaaaattcagacaccgagaagactcctgctgccttgcatggacggctgaacaccgaacttgctcctagtggcagaaatacagaatttagtgaagctgacactggaaaacaagagacacccgtgtctgctgaggctatggtagaatcatcgagcgagcctcgcagccatgaggcaaaggaagctccaacccctgacctgtctggggatgatgaaaaagcgaagtcagcaagggctgctgttgttgcggaactttttggagatgcaacagaaggtggttcggatcagccattgccgtctcctagagaacaaggcaaggaagcagaggccgatggaggcttttagagtaaagttgcaaatattgtatcaagagatactagaatccgtgtaagtaagaactgctaatagtgcttttagttgtaactggtgtaagcttctactcagaatcaaaagcgacgtgctgagattacagcaacagtggcctacggcagtttactactgttttgtgcaatattgctgctgagttttgttgagacaggcaattgatctgtcatctgtctcgtcttgcatcgaagttggcagcaccatggtgaggtgctcccgccttaacctggaagcgctgacagagggaagaacaatactctctggtttcctaatgttttcctgttcactgttttgatttgatgctgcattgcagtagtgtgacttagtaacataatggtgcgtttggatagacggacataccgatccagaatcatctgaacctaaatattgagtacaagcttagattatctgtttggtctgctttatgtctgggtgcaatgctctctgatttctggacggagtggtaccgcaatccaaacagactttaatgtttgggtgcttcaggtcataatcaaccatctaatttactttgcaaatgaatgtttcaaactggactgctcaagcctaccaagtttaatggtccttcctagtattgaatccttttgagtctagcccgtttcctcatttgaattttcactgttagtgtgcctatacttgcctcacgtagaattttgaaagcttatggttgggtgcg

SEQ ID NO: 218347 - DNA, 12258 bp, Zea Mays
ggagagagtgcatcagcactgcaggggtctactgaggcactccaagtggggaaatggcggaggcgacgaattcgagcttgggcacgtaggcgtcgctcctgccatcgccgcagcggtcactggactctcacgccgccgccgccgccgccggagaccattagttctcctgcgcggcggctccgcggctcccgccctctcccttaccttcttcccgctagggttttctccgatccccaatcactgctggttcacaaatggcttcatctcagcatgttgagatggaggctgcgaaacttctacataaacttatccaggagtcgaaggatgagcctgctaaactagcaacaaaactttacgtgatatgtcagcatatgaaactaagtggaaaggagcaatcactgccatatcaagtcatatcaagggctatggagacagttgtgaaccaacatggaattgatatggatgcattgcgatcatcacgaattccatttgctggtggtcctcaggcaggggattctagtggtgtcatgtcaaaggacaaggaggtcattggtaaccagtctcccatggtcggaagtgatgcttcccaaagtagtggacaagctggattatggcagcttccatcaggttcaaccgatatgataagacatggggcatctatttcaggtagggtacccacagggccaaataggggagatttctcagcagctgatattcatcaaggctccatgtcacaaaaaagcggtagatcctctggcattgaaagccctgcaagtctgcagatggaggacaccagatctatgaattcacatgattctttgaaatccgatgagaaaacaagtaagaaaacctcttccaagagaaaaaggatggattcaaaaggagctggtgatttgcgttcagaagacaactcaaagtcagatgttatctccactggacagaataccaggaaggggaaacaggttggtaaggctggtagacaaggtcagccttccatgggaattgagcatgagcagcaacctcataaactgcaaggtggtactggtcaggtaccacctatacatggtggtgcaccttttctcaggactcgctcagaaggtccttctgggaggacaatggacaagactaaaccatcaaatccattctcaatgggtcaaattccaaattttcctgaagggctggcttctactggtgctccaatcgagttgcagaaaagtatacagggtggagcaagtttatttaatcctggttttggctggaaccaaaatccacaagttcaaaccttgaagaattctcaaggttctattcataatttagtgaggtctggagttactgttgaagggaaagttaatgtaggggcacaaggagcttttaactctgcctctgcaccacagatggaatttcccacagttcctccatacaacccctcttccttcggagctagctcacagtttctggacaaaggcaaggagttggtttccagcattataagcactgaacctcattcatctaaagttgcatctcagcctgggatttctcatggaagtcccatgcaagaaaggcaaggtatgatcagggtgccacagagaggcgaggcatcatttcaggaacgcaggccatcttcacttccgagtagaagtactgggccaagtccaatgtctcacatttcttccaacacaccatttaaagaacagcagctgaagcagctcagagcacagtgcttagtatttcttgcatttaggaataatttgcagcccaggaaggtacatcttgaaattgctttgggcagagggcctcctgcagaaagtgacagtgcaggtcaaaggggcagcgagggcagagtgtctgatgctctgggaaaggaaaatggtagcagtcgggagaactctggtgtcttttgtaggcaaactgatatctctagacttccagccacatctgcaggaagtattgcagaggatgattccttatcgaaggatccagaaaatgctacaaaaaaaatcaagttagctgaacaggagaagtcattgatggaagtagaaaatgtccagcaagcttctgttatgcaaggaactagttctgaaatgcgttcccaagaaactgcatctcaaaatccatatcgaccacaacagtcatattatcaaggagatacaagaagaatcgcctcggatatccataggactgatgctgaaattttgaaccagaatttaagttggggaggccagggatctactgctttgggtggtactagacagcttctgaatcaggaaactaaagaatcacttgcaccttcaaagtcacaccatatgcctgttgatggttacaactccaatatacaaggaatagatcggactccagagatagctggagctggtaatgatgttgaaaattgtagccacgtagcagatattgtgcctgagcaggctgctgatgaaggagatgaggacctctcagagcatgaggatttattgtcatctccaaagcacacaatgacggaaaaatggatcttagattaccagaagagaatttacaatgagaaacaaaagagaacattggagcagcataaggtacacagcagaatgtcagcaacatatgaggagctaaaggagagcgttaattcatccgaagatctttctgcaaagaccaagagcgtcattgaattgaaaaagcttcagcttctgccacttcaacgtcgtgtacgcagtgaatttttgctggattttttcaagcctaatacatccgacttagagcgcataaaatcactgaagaaacataggcatgggcggcgggtgaaacagcttgaaaaaattgaacagaaaatgaaggaagaaaggcaaaagagaattcgtgagagacagaaggaattctttgctgatattgaagcttacagagagaaactcgaggataacttcaaggttaagagagagcgcttgaaggggttcaatcgatacataaaagaatttcacaaaaggaaagaaagaattcatcgggagaaactggataggatccaacgcgagaaaatcaacctgcttaagaacaatgatgttgaaggttatcttagaatggtcaaggatgcaaaatctgatcgtgtcaagcaactattgcgtgaaactgagaaatatcttcagaaacttgggaacaaattacagagtgcaaagtccacagatggccgctcatcttttgttactgataagagtgacactgcaaacgacattgaagatgagagctaccagccacagcattatctggaaagtaatgaaaagtactatcaactggcacacagtgtaaaggaaactgtaaatgatcagccatcttatcttcagggcggcaaattgcgagagtaccaaatgaatggcttgcgttggctggtttcattgtacaataataatttgaatggtattttagcagatgagatgggccttggtaaaacagtacaagtaatctctttgatatgctaccttatggaaacaaaaaatgaccgtgggccttttctcgtggttgtaccatcatctgttcttcctggatgggaatctgaactcagcttctgggcacctagtataaataaaattgcttatgctggtcctcctgaagaaaggcgcaggatgttcaaagagatgattgttcatcagaagttcaatgttcttctgacaacatatgagtacttgatgaacaagcatgataggccaaaactaagcaaaatacaatggcactatataataatcgatgaagggcatcgtattaaaaatgcttcttgtaaacttaatgctgatttgaagctttatcggagctctcatcggatattattgacaggaacacctcttcaggtcgaaaatgagcttcctgaaaaaattgaaagacttgtaagatgtgaggcatctgcttatcagaaacttctcatgacaagggtggaagaaaatcttggtggaattggagccgttaaggttcgctccgttcacaactctgtcatggaattgaggaacatatgcaaccatccatacttgagccagcttcatgttgaagagattgagggctacctacctaaacattacctaccatctattttgaggctctgcggaaaacttgagatgttggacagattgctgcctaaactcaaagctacgggccatagggttctacttttttctacaatgacaagattgcttgatgtaatggaggattacttggtttggaaaaagtataaatatcttcgattggatgggcacacttctggccatgaaagaggagctcttatcgataaatttaacgatcctaattctcaagcattcatttttcttcttagtatacgagctggaggtgttggggtcaatctccaagctgccgatacagttatcatatttgatactgattggaatcctcaggttgatctgcaagcacaggctagggcccacaggattggtcaaaagaaggaggttcttgttttacgtttagaaacggtccgaactgttgaagagcaagtcagggcttcagcagaacacaaattaggtgttgctaatcagagtataactgctggtttttttgacaataacacaagtgctgaagatcgaagagagtatcttgaatcactcctacgtgagtctaaaaaggaagaagcagctccagtgttagatgatgatgctctgaatgacattctagctcggagcgaagctgagattgacatattcgaatctattgacaagcaaaggagagaagaagaaatggcagcttggcaaaaggtggttcaggatggttcaactagtgggctagaccctggagtattgccttctcgtcttgtaactgatgatgatctgaagcccttctgccatgctatgaaactttatgagccatcaaatgtgaaaacagtaaatgtgaatgtgaggaagaagggtgaacttgggggccttgatacacagcactatggaaggggtaaacgagcccgtgaggttcgctcttatgaagaccaatggactgaagaagaatttgaaaaactttgtcaagctgattctcctgaatcatcccaacctggtggcatgtcgaaggatttggatattcttaataaaggcattaagactgaaattcttgtggagagttcaaaagaaccagaacaaacgaagatggaggcatccccaactgtcggtgactctccaccagccaaacggcggagaggtagacctaaaaggtcagatgtttttgtatctcctactgctggtctgactgatgctgtcaaacaagacacaggaaccacacaggacggtagttctgctacaccagcaagtaccatccactctgatgcaccagctactgcaatcaattcagctgtttcagatgttaatatacattctattccaccagctgataccaagaaacaagagttcagtactgataccaaggtttccagttctgtttctgttttggaaggatctgtgccgaatgaaattggtacaccattacagagtgttcataatgtagcagtttctgcaccaccgcatcaatcagctaggggcaggaaatgccaagcaggagaaacacctcgtaggcgaggccgaaaaccaaaatctctatcttcatctggtgtagatgatgttagtcttaacccaaccttttcaactgttagtggtgtagcagacactagttatgttccttcatattctcaggtctcatcacaaggcactgctgtggcactggcaggaatccagaaggattttgtgacagttaagttggatacattgttaccagatagtggtaagggtgctcctcctgttaatgagggagataaaggtgctactgttacaacacctgtggcaaaagatatatgtgctgggactgtgacaacatcagacaacactgtcaccctgacaccaaatactcttaaggaaaacattggattagttcaagtggcatctgcaccttctatgctcgtggcttctgaagaactaatgaaaatagcacatgttgcggtggccgataagcctgttgagaagcaaactgcttcacgtcgccgcagaaagaaaacatctagtagcgaggatactggagtcagcactagacaaagatcagctatgaaaagatcttactacaacacctctgttgccgttgatgatattggttctgctgtgatcccaaatgaaaaatcaggaataacgaaggaaagagatgtcagttcaattcaaagtacatccaatgaactaccaaatattaactcaccattgtatgagaagtctggatatgattctcaaccaagcacacctatagctgtccccatcaatgaagacactcttcctagtggttttgacacctgtactaattctatgataactcttgccacatctgccaactctgctgaagatgataaaccagttgatttgcaccttaatgcacctgtttctgttgattcccaaaaccaagaacaacacatgacagggaaggaccatttggcagtgtgttctagaatctttgctactcagttacagacggacactgcaaatcctgctattgatcataaaccaggaactgcccagtttgaaccatctgcttccttgccccagaattcaggcaaggatgctactgcactaccttctgaggttgacagtgctgctccaaatagggcatcaagcaggaggaggaaagggtcaactcgagaaccacgcaccagaagtaattctgcatcagctgcaagtgaacgtcgtgcccgacttactggattgaagcaggcagaggacataaagaagttagagatgtcagcaacgccgaccacaacagtgtgtatttcatcggtagagcaacagggagctgcttctttaagtgcgaagattaccaatgcttctgtttctgaaggacagaagaatcctggaaattatatgccttctgccatttcaattcccgtggggagccatgttctgggcctgggcgcaacaagtattgaagaaacaactgccactatgataactcaggctcctgcagtttcaaaatcagaacgaagaaaacttccaggaggcagtcaacaaggtattcagtttgagagttcagcatcaaaaacaaagatggtatcagctgtggaaccagcacctgcaaatgttgaatgcatgcaaggtactgaagttaatagttcagaacagacaatagtttctgctactgaaccagcacctgcaaatgatgaacacatgcaagagcaaccaacaaatatcgtttcatctgtggaatcagaaccttcaaatgatgaagagcacacaaagcatgaagtgtttcttgcgactactggtgataatatgcttgcttctagtgcaggaactgaaatattgcgggatacagttgagcatgctgcttgccagccagaagcagtatgcacagatggaactgcaaggcagtctgaattgtcgcaacttgatagaaaagcctttcatgatgcctcatataaatacactcatgggtccactaaagatgatggtatcttgcccagtgaaggtacttctgttgatgttactggttctaagcaggatgatgtgaacattgttggcacacaaactgatgatgtttctcggggttctagtcattttccagttattttacaatcaactgagtcagatcggcctccaggtcaagtgaagaatttggagagtaggatggagcaggtgaaaacagaagaagctttggttaacagttctggtggcaatcaaactcacagtctgggcgatgaaccttctcataatacatcattagcaagaaattctccctcagaacactcgaatgagcgttgctctgatcaagtaattggtgaaaatttcaaaagtaaagaaaatattgttgaagtccattctggcattaatactgatggccccgatgaagctctgaatgcattgcacacccaatctaaggaggccagcatgacagatattggtgtacctactgatggtgatagatgtgaaggtaaagggactagtgtcgaggtctgtgctgacatgaatactgatgggcctgtggctacccaggatgcttcgtccacgaaatctgataaagagtcctgcatgatggaatgtggtgtgtctaccgatggctgtcccacagtttgcaaaacacacaatgatctccagggtcatgtatcttgtgaagaaacctttgttaggactggtggtgatgacacaacccatatcaccaatgcaaattatggttctaataatgaaagtgaggccaccattgctagtcctgttgaaaccacacaaaaactgatggaagggagcactgttattgtgtcggagaattctgatttaaataagcaatgccacacattgcatactagaaatgatcctcctgcaaataccctgttgatagttgagtctaacaaagttacttgtgatgctgaaattgtttgtgctagcaggttagaatcttctggcattgaggctgaaacagtgggtatccaagagtcagctcttactgattttgagggaacaaaaggaactggggatttgggtgacagaactaacagtcaactgcatgatgatgttcatgggacatcatgttccacgatagctcttgtatctgagaaagaaccttccgaagatcttaccaccggtagccattcagaagcatctaatttacttgctgctgtagaacaaactcaagaaactactgttgagaaccaagagatcatagatgcagtagtgtttatggatgcctgcaaggcagaacctgttggtgattttactattgctaaaggagctgaacagactgtagaaatggttcattatgttgataagcaatctgctgtattagactatgttgagacacagacaaaacgaacttcggtttgtggttctacgctaaatgaatcccctcaggctgcagggttggaagaagactgctctgtactgaagcatggtgatcctacttcatctgagcttcttactgtagcacctaatccaatcggtgaaacttctgttattcaagtggaaccagaggcaagaaactcagatggatactgcacaacagaggctggcagtgctttatctgaaactgtcatgggattggagccaaataaagaaactgcggttccaatgcaagagaatattggagaagctaatgataattttaataattgcgaagcacacaataattcggagattcatgcatttgaagtgtcgatggaaacgcagtcatcagaagtcaaggaagtatcttctattcagtctggtgcagcaaatttgagcacacagacaactgcactgcctgatgtaacaggacaaaccagtatggcatcgactggagaactagtatctacaaatgaacacatacacatgcaaggcactgaaatcaattcagagcaacaaacaaagatggtttcacctgctgaatcagcacctgctaatgatgaacacgtgcaagacattgtgattcttagttcagaacagcaaacaaagatggttttagctgcagagattgacgcattatgcgtccaggagactgcaattattgatcttgggggagcaagaggaacagttgacctgaatgacataagaacacaggttcctgcattacctggaagggatgtgctagatgtggaggcacatattttggagcaaaaaaaaacatcttcaccaggtgatgaaattaagggttcagaacaagcaaaaatcgaatcgattgcagagatcgaaacagtgggcgtcaaggagaatgtcattgctgatcataaggaaacaggtaacaacagtggcgtaagtatacatgcgcctctattagttgaatctggacaaaaggcatcacctggagttgaattgcgtggtattgaggttgatgctcatgttttggaacaagcaaagatggtttcagctctagaaccagactctactccagaagtttgtgctgacaagttagaaccttctggtgctgatgatgttggaatgattgttgtccaggaggctgcttctgttgatgatcacaatagagcacaaggtggtgaggctcattgttcagaacaaataaagatggcttcaattgcacaagcggtgtctagcatggctttagtaggatattcttcttcagaagactcaatggtggatgctgctgcccgagtaactgatgctgattttgtggatagtaaagcagctggtgtttatcgccaagaaactatgcctactcaaaccacctctaccctcccagagaacatggattctcctgcaactgctgctaccatggttgaatcgaagtttgctgcctcgtctgagcacgttgcaggacccgagccaattgatgaaacttctgttatgcaagtggaactggcaacaagcacaggggatggatgtgcagcagatggtcacaatcttgtttcatctgaaactgttgttgaagtgaagcttgctcaagaaattgttgttcctagtccaggtggtagcatagaagctaataatacttctaccatcagcgaagtatacaaagatacccagtctcgtgcatctggtgaagcatgcaatgatggtcagtctcatggtgatgaaaatatgaaacttggtgaagcttacactgaactgcagctggcaccttcctctggtgaggaggccatgacatgtatgtgtagtgagctgcccagccaggaggtggaggctccaagcagtgaccctttggagaataatgaagaaacgaaaaatgaagctgctgctcaaggatcagtaaatgaggattctgctcctcgtgctgaaaatgcaaagattgatgaagctgacacagaacaggaactgcttccatctggtgaggccacggtagacgaatccagcgagctactcagccaagacgaaaaggtggctcgtaaagatgcaaagatggaagagtctgctgctgctgctgctgcacagagacagctaactactgaagttgctcatgcaagtgaaaacgcgaaacttggtgaagatggcacggagctgcaactgccaccaccttcaatggtagacatatctagggagcaactcagccaggaagtggaggttgcaagctctgggccttcaggaactgatgaaactgctgagatgaaacggctaaacactgaacattcacctggtgatgaaacttcaaaacttgttggaactgatctaggactgcaattgtcaccttctggtgatgccatggtagatatatctaataagccacccagctgccaagacgtaaaggaggccccgagcagtgacattttgggaaatgatgaaaattcagacaccgagaagactcctgctgccttgcatggacggctgaacaccgaacttgctcctagtggcagaaatacagaatttagtgaagctgacactggaaaacaagagacacccgtgtctgctgaggctatggtagaatcatcgagcgagcctcgcagccatgaggcaaaggaagctccaacccctgacctgtctggggatgatgaaaaagcgaagtcagcaagggctgctgttgttgcggaactttttggagatgcaacagaaggtggttcggatcagccattgccgtctcctagagaacaaggcaaggaagcagaggccgatggaggcttttagagtaaagttgcaaatattgtatcaagagatactagaatccgtgtaagtaagaactgctaatagtgcttttagttgtaactggtgtaagcttctactcagaatcaaaagcgacgtgctgagattacagcaacagtggcctacggcagtttactactgttttgtgcaatattgctgctgagttttgttgagacaggcaattgatctgtcatctgtctcgtcttgcatcgaagttggcagcaccatggtgaggtgctcccgccttaacctggaagcgctgacagagggaagaacaatactctctggtttcctaatgttttcctgttcactgttttgatttgatgctgcattgcagtagtgtgacttagtaacataatggtgcgtttggatagacggacataccgatccagaatcatctgaacctaaatattgagtacaagcttagattatctgtttggtctgctttatgtctgggtgcaatgctctctgatttctggacggagtggtaccgcaatccaaacagactttaatgtttgggtgcttcaggtcataatcaaccatctaatttactttgcaaatgaatgtttcaaactggactgctcaagcctaccaagtttaatggtccttcctagtattgaatccttttgagtctagcccgtttcctcatttgaattttcactgttagtgtgcctatacttgcctcacgtagaattttgaaagcttatggttgggtgcg

SEQ ID NO: 218348 - DNA, 12307 bp, Zea Mays
gagagagtgcatcagcactgcaggggtctactgaggcactccaagtggggaaatggcggaggcgacgaattcgagcttgggcacgtaggcgtcgctcctgccatcgccgcagcggtcactggactctcacgccgccgccgccgccgccggagaccattagttctcctgcgcggcggctccgcggctcccgccctctcccttaccttcttcccgctagggttttctccgatccccaatcactgctggttcacaaatggcttcatctcagcatgttgagatggaggctgcgaaacttctacataaacttatccaggagtcgaaggatgagcctgctaaactagcaacaaaactttacgtgatatgtcagcatatgaaactaagtggaaaggagcaatcactgccatatcaagtcatatcaagggctatggagacagttgtgaaccaacatggaattgatatggatgcattgcgatcatcacgaattccatttgctggtggtcctcaggcaggggattctagtggtgtcatgtcaaaggacaaggaggtcattggtaaccagtctcccatggtcggaagtgatgcttcccaaagtagtggacaagctggattatggcagcttccatcaggttcaaccgatatgataagacatggggcatctatttcaggtagggtacccacagggccaaataggggagatttctcagcagctgatattcatcaaggctccatgtcacaaaaaagcggtagatcctctggcattgaaagccctgcaagtctgcagatggaggacaccagatctatgaattcacatgattctttgaaatccgatgagaaaacaagtaagaaaacctcttccaagagaaaaaggatggattcaaaaggagctggtgatttgcgttcagaagacaactcaaagtcagatgttatctccactggacagaataccaggaaggggaaacaggttggtaaggctggtagacaaggtcagccttccatgggaattgagcatgagcagcaacctcataaactgcaaggtggtactggtcaggtaccacctatacatggtggtgcaccttttctcaggactcgctcagaaggtccttctgggaggacaatggacaagactaaaccatcaaatccattctcaatgggtcaaattccaaattttcctgaagggctggcttctactggtgctccaatcgagttgcagaaaagtatacagggtggagcaagtttatttaatcctggttttggctggaaccaaaatccacaagttcaaaccttgaagaattctcaaggttctattcataatttagtgaggtctggagttactgttgaagggaaagttaatgtaggggcacaaggagcttttaactctgcctctgcaccacagatggaatttcccacagttcctccatacaacccctcttccttcggagctagctcacagtttctggacaaaggcaaggagttggtttccagcattataagcactgaacctcattcatctaaagttgcatctcagcctgggatttctcatggaagtcccatgcaagaaaggcaaggtatgatcagggtgccacagagaggcgaggcatcatttcaggaacgcaggccatcttcacttccgagtagaagtactgggccaagtccaatgtctcacatttcttccaacacaccatttaaagaacagcagctgaagcagctcagagcacagtgcttagtatttcttgcatttaggaataatttgcagcccaggaaggtacatcttgaaattgctttgggcagagggcctcctgcagaaagtgacagtgcaggtcaaaggggcagcgagggcagagtgtctgatgctctgggaaaggaaaatggtagcagtcgggagaactctggtgtcttttgtaggcaaactgatatctctagacttccagccacatctgcaggaagtattgcagaggatgattccttatcgaaggatccagaaaatgctacaaaaaaaatcaagttagctgaacaggagaagtcattgatggaagtagaaaatgtccagcaagcttctgttatgcaaggaactagttctgaaatgcgttcccaagaaactgcatctcaaaatccatatcgaccacaacagtcatattatcaaggagatacaagaagaatcgcctcggatatccataggactgatgctgaaattttgaaccagaatttaagttggggaggccagggatctactgctttgggtggtactagacagcttctgaatcaggaaactaaagaatcacttgcaccttcaaagtcacaccatatgcctgttgatggttacaactccaatatacaaggaatagatcggactccagagatagctggagctggtaatgatgttgaaaattgtagccacgtagcagatattgtgcctgagcaggctgctgatgaaggagatgaggacctctcagagcatgaggatttattgtcatctccaaagcacacaatgacggaaaaatggatcttagattaccagaagagaatttacaatgagaaacaaaagagaacattggagcagcataaggtacacagcagaatgtcagcaacatatgaggagctaaaggagagcgttaattcatccgaagatctttctgcaaagaccaagagcgtcattgaattgaaaaagcttcagcttctgccacttcaacgtcgtgtacgcagtgaatttttgctggattttttcaagcctaatacatccgacttagagcgcataaaatcactgaagaaacataggcatgggcggcgggtgaaacagcttgaaaaaattgaacagaaaatgaaggaagaaaggcaaaagagaattcgtgagagacagaaggaattctttgctgatattgaagcttacagagagaaactcgaggataacttcaaggttaagagagagcgcttgaaggggttcaatcgatacataaaagaatttcacaaaaggaaagaaagaattcatcgggagaaactggataggatccaacgcgagaaaatcaacctgcttaagaacaatgatgttgaaggttatcttagaatggtcaaggatgcaaaatctgatcgtgtcaagcaactattgcgtgaaactgagaaatatcttcagaaacttgggaacaaattacagagtgcaaagtccacagatggccgctcatcttttgttactgataagagtgacactgcaaacgacattgaagatgagagctaccagccacagcattatctggaaagtaatgaaaagtactatcaactggcacacagtgtaaaggaaactgtaaatgatcagccatcttatcttcagggcggcaaattgcgagagtaccaaatgaatggcttgcgttggctggtttcattgtacaataataatttgaatggtattttagcagatgagatgggccttggtaaaacagtacaagtaatctctttgatatgctaccttatggaaacaaaaaatgaccgtgggccttttctcgtggttgtaccatcatctgttcttcctggatgggaatctgaactcagcttctgggcacctagtataaataaaattgcttatgctggtcctcctgaagaaaggcgcaggatgttcaaagagatgattgttcatcagaagttcaatgttcttctgacaacatatgagtacttgatgaacaagcatgataggccaaaactaagcaaaatacaatggcactatataataatcgatgaagggcatcgtattaaaaatgcttcttgtaaacttaatgctgatttgaagctttatcggagctctcatcggatattattgacaggaacacctcttcagaataatctcgaggagctgtgggcacttctaaattttttgttgcccaatatttttaattcgtcagaggacttctctcagtggtttaacaaaccatttgaaagtaatggtgataattcacctgatgaggccttactttcagaggaggagaacttgttgatcataaatcgtcttcaccaggttcttcggccctttgtactcagaagacttaagcataaggtcgaaaatgagcttcctgaaaaaattgaaagacttgtaagatgtgaggcatctgcttatcagaaacttctcatgacaagggtggaagaaaatcttggtggaattggagccgttaaggttcgctccgttcacaactctgtcatggaattgaggaacatatgcaaccatccatacttgagccagcttcatgttgaagagattgagggctacctacctaaacattacctaccatctattttgaggctctgcggaaaacttgagatgttggacagattgctgcctaaactcaaagctacgggccatagggttctacttttttctacaatgacaagattgcttgatgtaatggaggattacttggtttggaaaaagtataaatatcttcgattggatgggcacacttctggccatgaaagaggagctcttatcgataaatttaacgatcctaattctcaagcattcatttttcttcttagtatacgagctggaggtgttggggtcaatctccaagctgccgatacagttatcatatttgatactgattggaatcctcaggttgatctgcaagcacaggctagggcccacaggattggtcaaaagaaggaggttcttgttttacgtttagaaacggtccgaactgttgaagagcaagtcagggcttcagcagaacacaaattaggtgttgctaatcagagtataactgctggtttttttgacaataacacaagtgctgaagatcgaagagagtatcttgaatcactcctacgtgagtctaaaaaggaagaagcagctccagtgttagatgatgatgctctgaatgacattctagctcggagcgaagctgagattgacatattcgaatctattgacaagcaaaggagagaagaagaaatggcagcttggcaaaaggtggttcaggatggttcaactagtgggctagaccctggagtattgccttctcgtcttgtaactgatgatgatctgaagcccttctgccatgctatgaaactttatgagccatcaaatgtgaaaacagtaaatgtgaatgtgaggaagaagggtgaacttgggggccttgatacacagcactatggaaggggtaaacgagcccgtgaggttcgctcttatgaagaccaatggactgaagaagaatttgaaaaactttgtcaagctgattctcctgaatcatcccaacctggtggcatgtcgaaggatttggatattcttaataaaggcattaagactgaaattcttgtggagagttcaaaagaaccagaacaaacgaagatggaggcatccccaactgtcggtgactctccaccagccaaacggcggagaggtagacctaaaaggtcagatgtttttgtatctcctactgctggtctgactgatgctgtcaaacaagacacaggaaccacacaggacggtagttctgctacaccagcaagtaccatccactctgatgcaccagctactgcaatcaattcagctgtttcagatgttaatatacattctattccaccagctgataccaagaaacaagagttcagtactgataccaaggtttccagttctgtttctgttttggaaggatctgtgccgaatgaaattggtacaccattacagagtgttcataatgtagcagtttctgcaccaccgcatcaatcagctaggggcaggaaatgccaagcaggagaaacacctcgtaggcgaggccgaaaaccaaaatctctatcttcatctggtgtagatgatgttagtcttaacccaaccttttcaactgttagtggtgtagcagacactagttatgttccttcatattctcaggtctcatcacaaggcactgctgtggcactggcaggaatccagaaggattttgtgacagttaagttggatacattgttaccagatagtggtaagggtgctcctcctgttaatgagggagataaaggtgctactgttacaacacctgtggcaaaagatatatgtgctgggactgtgacaacatcagacaacactgtcaccctgacaccaaatactcttaaggaaaacattggattagttcaagtggcatctgcaccttctatgctcgtggcttctgaagaactaatgaaaatagcacatgttgcggtggccgataagcctgttgagaagcaaactgcttcacgtcgccgcagaaagaaaacatctagtagcgaggatactggagtcagcactagacaaagatcagctatgaaaagatcttactacaacacctctgttgccgttgatgatattggttctgctgtgatcccaaatgaaaaatcaggaataacgaaggaaagagatgtcagttcaattcaaagtacatccaatgaactaccaaatattaactcaccattgtatgagaagtctggatatgattctcaaccaagcacacctatagctgtccccatcaatgaagacactcttcctagtggttttgacacctgtactaattctatgataactcttgccacatctgccaactctgctgaagatgataaaccagttgatttgcaccttaatgcacctgtttctgttgattcccaaaaccaagaacaacacatgacagggaaggaccatttggcagtgtgttctagaatctttgctactcagttacagacggacactgcaaatcctgctattgatcataaaccaggaactgcccagtttgaaccatctgcttccttgccccagaattcaggcaaggatgctactgcactaccttctgaggttgacagtgctgctccaaatagggcatcaagcaggaggaggaaagggtcaactcgagaaccacgcaccagaagtaattctgcatcagctgcaagtgaacgtcgtgcccgacttactggattgaagcaggcagaggacataaagaagttagagatgtcagcaacgccgaccacaacagtgtgtatttcatcggtagagcaacagggagctgcttctttaagtgcgaagattaccaatgcttctgtttctgaaggacagaagaatcctggaaattatatgccttctgccatttcaattcccgtggggagccatgttctgggcctgggcgcaacaagtattgaagaaacaactgccactatgataactcaggctcctgcagtttcaaaatcagaacgaagaaaacttccaggaggcagtcaacaaggtattcagtttgagagttcagcatcaaaaacaaagatggtatcagctgtggaaccagcacctgcaaatgttgaatgcatgcaaggtactgaagttaatagttcagaacagacaatagtttctgctactgaaccagcacctgcaaatgatgaacacatgcaagagcaaccaacaaatatcgtttcatctgtggaatcagaaccttcaaatgatgaagagcacacaaagcatgaagtgtttcttgcgactactggtgataatatgcttgcttctagtgcaggaactgaaatattgcgggatacagttgagcatgctgcttgccagccagaagcagtatgcacagatggaactgcaaggcagtctgaattgtcgcaacttgatagaaaagcctttcatgatgcctcatataaatacactcatgggtccactaaagatgatggtatcttgcccagtgaagtcattttccagttattttacaatcaactgagtcagatcggcctccaggtcaagtgaagaatttggagagtaggatggagcaggtgaaaacagaagaagctttggttaacagttctggtggcaatcaaactcacagtctgggcgatgaaccttctcataatacatcattagcaagaaattctccctcagaacactcgaatgagcgttgctctgatcaagtaattggtgaaaatttcaaaagtaaagaaaatattgttgaagtccattctggcattaatactgatggccccgatgaagctctgaatgcattgcacacccaatctaaggaggccagcatgacagatattggtgtacctactgatggtgatagatgtgaaggtaaagggactagtgtcgaggtctgtgctgacatgaatactgatgggcctgtggctacccaggatgcttcgtccacgaaatctgataaagagtcctgcatgatggaatgtggtgtgtctaccgatggctgtcccacagtttgcaaaacacacaatgatctccagggtcatgtatcttgtgaagaaacctttgttaggactggtggtgatgacacaacccatatcaccaatgcaaattatggttctaataatgaaagtgaggccaccattgctagtcctgttgaaaccacacaaaaactgatggaagggagcactgttattgtgtcggagaattctgatttaaataagcaatgccacacattgcatactagaaatgatcctcctgcaaataccctgttgatagttgagtctaacaaagttacttgtgatgctgaaattgtttgtgctagcaggttagaatcttctggcattgaggctgaaacagtgggtatccaagagtcagctcttactgattttgagggaacaaaaggaactggggatttgggtgacagaactaacagtcaactgcatgatgatgttcatgggacatcatgttccacgatagctcttgtatctgagaaagaaccttccgaagatcttaccaccggtagccattcagaagcatctaatttacttgctgctgtagaacaaactcaagaaactactgttgagaaccaagagatcatagatgcagtagtgtttatggatgcctgcaaggcagaacctgttggtgattttactattgctaaaggagctgaacagactgtagaaatggttcattatgttgataagcaatctgctgtattagactatgttgagacacagacaaaacgaacttcggtttgtggttctacgctaaatgaatcccctcaggctgcagggttggaagaagactgctctgtactgaagcatggtgatcctacttcatctgagcttcttactgtagcacctaatccaatcggtgaaacttctgttattcaagtggaaccagaggcaagaaactcagatggatactgcacaacagaggctggcagtgctttatctgaaactgtcatgggattggagccaaataaagaaactgcggttccaatgcaagagaatattggagaagctaatgataattttaataattgcgaagcacacaataattcggagattcatgcatttgaagtgtcgatggaaacgcagtcatcagaagtcaaggaagtatcttctattcagtctggtgcagcaaatttgagcacacagacaactgcactgcctgatgtaacaggacaaaccagtatggcatcgactggagaactagtatctacaaatgaacacatacacatgcaaggcactgaaatcaattcagagcaacaaacaaagatggtttcacctgctgaatcagcacctgctaatgatgaacacgtgcaagacattgtgattcttagttcagaacagcaaacaaagatggttttagctgcagagattgacgcattatgcgtccaggagactgcaattattgatcttgggggagcaagaggaacagttgacctgaatgacataagaacacaggttcctgcattacctggaagggatgtgctagatgtggaggcacatattttggagcaaaaaaaaacatcttcaccaggtgatgaaattaagggttcagaacaagcaaaaatcgaatcgattgcagagatcgaaacagtgggcgtcaaggagaatgtcattgctgatcataaggaaacaggtattgaggttgatgctcatgttttggaacaagcaaagatggtttcagctctagaaccagactctactccagaagtttgtgctgacaagttagaaccttctggtgctgatgatgttggaatgattgttgtccaggaggctgcttctgttgatgatcacaatagagcacaaggtggtgaggctcattgttcagaacaaataaagatggcttcaattgcacaagcggtgtctagcatggctttagtaggatattcttcttcagaagactcaatggtggatgctgctgcccgagtaactgatgctgattttgtggatagtaaagcagctggtgtttatcgccaagaaactatgcctactcaaaccacctctaccctcccagagaacatggattctcctgcaactgctgctaccatggttgaatcgaagtttgctgcctcgtctgagcacgttgcaggacccgagccaattgatgaaacttctgttatgcaagtggaactggcaacaagcacaggggatggatgtgcagcagatggtcacaatcttgtttcatctgaaactgttgttgaagtgaagcttgctcaagaaattgttgttcctagtccaggtggtagcatagaagctaataatacttctaccatcagcgaagtatacaaagatacccagtctcgtgcatctggtgaagcatgcaatgatggtcagtctcatggtgatgaaaatatgaaacttggtgaagcttacactgaactgcagctggcaccttcctctggtgaggaggccatgacatgtatgtgtagtgagctgcccagccaggaggtggaggctccaagcagtgaccctttggagaataatgaagaaacgaaaaatgaagctgctgctcaaggatcagtaaatgaggattctgctcctcgtgctgaaaatgcaaagattgatgaagctgacacagaacaggaactgcttccatctggtgaggccacggtagacgaatccagcgagctactcagccaagacgaaaaggtggctcgtaaagatgcaaagatggaagagtctgctgctgctgctgctgcacagagacagctaactactgaagttgctcatgcaagtgaaaacgcgaaacttggtgaagatggcacggagctgcaactgccaccaccttcaatggtagacatatctagggagcaactcagccaggaagtggaggttgcaagctctgggccttcaggaactgatgaaactgctgagatgaaacggctaaacactgaacattcacctggtgatgaaacttcaaaacttgttggaactgatctaggactgcaattgtcaccttctggtgatgccatggtagatatatctaataagccacccagctgccaagacgtaaaggaggccccgagcagtgacattttgggaaatgatgaaaattcagacaccgagaagactcctgctgccttgcatggacggctgaacaccgaacttgctcctagtggcagaaatacagaatttagtgaagctgacactggaaaacaagagacacccgtgtctgctgaggctatggtagaatcatcgagcgagcctcgcagccatgaggcaaaggaagctccaacccctgacctgtctggggatgatgaaaaagcgaagtcagcaagggctgctgttgttgcggaactttttggagatgcaacagaaggtggttcggatcagccattgccgtctcctagagaacaaggcaaggaagcagaggccgatggaggcttttagagtaaagttgcaaatattgtatcaagagatactagaatccgtgtaagtaagaactgctaatagtgcttttagttgtaactggtgtaagcttctactcagaatcaaaagcgacgtgctgagattacagcaacagtggcctacggcagtttactactgttttgtgcaatattgctgctgagttttgttgagacaggcaattgatctgtcatctgtctcgtcttgcatcgaagttggcagcaccatggtgaggtgctcccgccttaacctggaagcgctgacagagggaagaacaatactctctggtttcctaatgttttcctgttcactgttttgatttgatgctgcattgcagtagtgtgacttagtaacataatggtgcgtttggatagacggacataccgatccagaatcatctgaacctaaatattgagtacaagcttagattatctgtttggtctgctttatgtctgggtgcaatgctctctgatttctggacggagtggtaccgcaatccaaacagactttaatgtttgggtgcttcaggtcataatcaaccatctaatttactttgcaaatgaatgtttcaaactggactgctcaagcctaccaagtttaatggtccttcctagtattgaatccttttgagtctagcccgtttcctcatttgaattttcactgttagtgtgcctatacttgcctcacgtagaattttgaaagcttatggttgggtgcg

SEQ ID NO: 218349 - DNA, 12470 bp, Zea Mays
gagagagtgcatcagcactgcaggggtctactgaggcactccaagtggggaaatggcggaggcgacgaattcgagcttgggcacgtaggcgtcgctcctgccatcgccgcagcggtcactggactctcacgccgccgccgccgccgccggagaccattagttctcctgcgcggcggctccgcggctcccgccctctcccttaccttcttcccgctagggttttctccgatccccaatcactgctggttcacaaatggcttcatctcagcatgttgagatggaggctgcgaaacttctacataaacttatccaggagtcgaaggatgagcctgctaaactagcaacaaaactttacgtgatatgtcagcatatgaaactaagtggaaaggagcaatcactgccatatcaagtcatatcaagggctatggagacagttgtgaaccaacatggaattgatatggatgcattgcgatcatcacgaattccatttgctggtggtcctcaggcaggggattctagtggtgtcatgtcaaaggacaaggaggtcattggtaaccagtctcccatggtcggaagtgatgcttcccaaagtagtggacaagctggattatggcagcttccatcaggttcaaccgatatgataagacatggggcatctatttcaggtagggtacccacagggccaaataggggagatttctcagcagctgatattcatcaaggctccatgtcacaaaaaagcggtagatcctctggcattgaaagccctgcaagtctgcagatggaggacaccagatctatgaattcacatgattctttgaaatccgatgagaaaacaagtaagaaaacctcttccaagagaaaaaggatggattcaaaaggagctggtgatttgcgttcagaagacaactcaaagtcagatgttatctccactggacagaataccaggaaggggaaacaggttggtaaggctggtagacaaggtcagccttccatgggaattgagcatgagcagcaacctcataaactgcaaggtggtactggtcaggtaccacctatacatggtggtgcaccttttctcaggactcgctcagaaggtccttctgggaggacaatggacaagactaaaccatcaaatccattctcaatgggtcaaattccaaattttcctgaagggctggcttctactggtgctccaatcgagttgcagaaaagtatacagggtggagcaagtttatttaatcctggttttggctggaaccaaaatccacaagttcaaaccttgaagaattctcaaggttctattcataatttagtgaggtctggagttactgttgaagggaaagttaatgtaggggcacaaggagcttttaactctgcctctgcaccacagatggaatttcccacagttcctccatacaacccctcttccttcggagctagctcacagtttctggacaaaggcaaggagttggtttccagcattataagcactgaacctcattcatctaaagttgcatctcagcctgggatttctcatggaagtcccatgcaagaaaggcaaggtatgatcagggtgccacagagaggcgaggcatcatttcaggaacgcaggccatcttcacttccgagtagaagtactgggccaagtccaatgtctcacatttcttccaacacaccatttaaagaacagcagctgaagcagctcagagcacagtgcttagtatttcttgcatttaggaataatttgcagcccaggaaggtacatcttgaaattgctttgggcagagggcctcctgcagaaagtgacagtgcaggtcaaaggggcagcgagggcagagtgtctgatgctctgggaaaggaaaatggtagcagtcgggagaactctggtgtcttttgtaggcaaactgatatctctagacttccagccacatctgcaggaagtattgcagaggatgattccttatcgaaggatccagaaaatgctacaaaaaaaatcaagttagctgaacaggagaagtcattgatggaagtagaaaatgtccagcaagcttctgttatgcaaggaactagttctgaaatgcgttcccaagaaactgcatctcaaaatccatatcgaccacaacagtcatattatcaaggagatacaagaagaatcgcctcggatatccataggactgatgctgaaattttgaaccagaatttaagttggggaggccagggatctactgctttgggtggtactagacagcttctgaatcaggaaactaaagaatcacttgcaccttcaaagtcacaccatatgcctgttgatggttacaactccaatatacaaggaatagatcggactccagagatagctggagctggtaatgatgttgaaaattgtagccacgtagcagatattgtgcctgagcaggctgctgatgaaggagatgaggacctctcagagcatgaggatttattgtcatctccaaagcacacaatgacggaaaaatggatcttagattaccagaagagaatttacaatgagaaacaaaagagaacattggagcagcataaggtacacagcagaatgtcagcaacatatgaggagctaaaggagagcgttaattcatccgaagatctttctgcaaagaccaagagcgtcattgaattgaaaaagcttcagcttctgccacttcaacgtcgtgtacgcagtgaatttttgctggattttttcaagcctaatacatccgacttagagcgcataaaatcactgaagaaacataggcatgggcggcgggtgaaacagcttgaaaaaattgaacagaaaatgaaggaagaaaggcaaaagagaattcgtgagagacagaaggaattctttgctgatattgaagcttacagagagaaactcgaggataacttcaaggttaagagagagcgcttgaaggggttcaatcgatacataaaagaatttcacaaaaggaaagaaagaattcatcgggagaaactggataggatccaacgcgagaaaatcaacctgcttaagaacaatgatgttgaaggttatcttagaatggtcaaggatgcaaaatctgatcgtgtcaagcaactattgcgtgaaactgagaaatatcttcagaaacttgggaacaaattacagagtgcaaagtccacagatggccgctcatcttttgttactgataagagtgacactgcaaacgacattgaagatgagagctaccagccacagcattatctggaaagtaatgaaaagtactatcaactggcacacagtgtaaaggaaactgtaaatgatcagccatcttatcttcagggcggcaaattgcgagagtaccaaatgaatggcttgcgttggctggtttcattgtacaataataatttgaatggtattttagcagatgagatgggccttggtaaaacagtacaagtaatctctttgatatgctaccttatggaaacaaaaaatgaccgtgggccttttctcgtggttgtaccatcatctgttcttcctggatgggaatctgaactcagcttctgggcacctagtataaataaaattgcttatgctggtcctcctgaagaaaggcgcaggatgttcaaagagatgattgttcatcagaagttcaatgttcttctgacaacatatgagtacttgatgaacaagcatgataggccaaaactaagcaaaatacaatggcactatataataatcgatgaagggcatcgtattaaaaatgcttcttgtaaacttaatgctgatttgaagctttatcggagctctcatcggatattattgacaggaacacctcttcagaataatctcgaggagctgtgggcacttctaaattttttgttgcccaatatttttaattcgtcagaggacttctctcagtggtttaacaaaccatttgaaagtaatggtgataattcacctgatgaggccttactttcagaggaggagaacttgttgatcataaatcgtcttcaccaggttcttcggccctttgtactcagaagacttaagcataaggtcgaaaatgagcttcctgaaaaaattgaaagacttgtaagatgtgaggcatctgcttatcagaaacttctcatgacaagggtggaagaaaatcttggtggaattggagccgttaaggttcgctccgttcacaactctgtcatggaattgaggaacatatgcaaccatccatacttgagccagcttcatgttgaagagattgagggctacctacctaaacattacctaccatctattttgaggctctgcggaaaacttgagatgttggacagattgctgcctaaactcaaagctacgggccatagggttctacttttttctacaatgacaagattgcttgatgtaatggaggattacttggtttggaaaaagtataaatatcttcgattggatgggcacacttctggccatgaaagaggagctcttatcgataaatttaacgatcctaattctcaagcattcatttttcttcttagtatacgagctggaggtgttggggtcaatctccaagctgccgatacagttatcatatttgatactgattggaatcctcaggttgatctgcaagcacaggctagggcccacaggattggtcaaaagaaggaggttcttgttttacgtttagaaacggtccgaactgttgaagagcaagtcagggcttcagcagaacacaaattaggtgttgctaatcagagtataactgctggtttttttgacaataacacaagtgctgaagatcgaagagagtatcttgaatcactcctacgtgagtctaaaaaggaagaagcagctccagtgttagatgatgatgctctgaatgacattctagctcggagcgaagctgagattgacatattcgaatctattgacaagcaaaggagagaagaagaaatggcagcttggcaaaaggtggttcaggatggttcaactagtgggctagaccctggagtattgccttctcgtcttgtaactgatgatgatctgaagcccttctgccatgctatgaaactttatgagccatcaaatgtgaaaacagtaaatgtgaatgtgaggaagaagggtgaacttgggggccttgatacacagcactatggaaggggtaaacgagcccgtgaggttcgctcttatgaagaccaatggactgaagaagaatttgaaaaactttgtcaagctgattctcctgaatcatcccaacctggtggcatgtcgaaggatttggatattcttaataaaggcattaagactgaaattcttgtggagagttcaaaagaaccagaacaaacgaagatggaggcatccccaactgtcggtgactctccaccagccaaacggcggagaggtagacctaaaaggtcagatgtttttgtatctcctactgctggtctgactgatgctgtcaaacaagacacaggaaccacacaggacggtagttctgctacaccagcaagtaccatccactctgatgcaccagctactgcaatcaattcagctgtttcagatgttaatatacattctattccaccagctgataccaagaaacaagagttcagtactgataccaaggtttccagttctgtttctgttttggaaggatctgtgccgaatgaaattggtacaccattacagagtgttcataatgtagcagtttctgcaccaccgcatcaatcagctaggggcaggaaatgccaagcaggagaaacacctcgtaggcgaggccgaaaaccaaaatctctatcttcatctggtgtagatgatgttagtcttaacccaaccttttcaactgttagtggtgtagcagacactagttatgttccttcatattctcaggtctcatcacaaggcactgctgtggcactggcaggaatccagaaggattttgtgacagttaagttggatacattgttaccagatagtggtaagggtgctcctcctgttaatgagggagataaaggtgctactgttacaacacctgtggcaaaagatatatgtgctgggactgtgacaacatcagacaacactgtcaccctgacaccaaatactcttaaggaaaacattggattagttcaagtggcatctgcaccttctatgctcgtggcttctgaagaactaatgaaaatagcacatgttgcggtggccgataagcctgttgagaagcaaactgcttcacgtcgccgcagaaagaaaacatctagtagcgaggatactggagtcagcactagacaaagatcagctatgaaaagatcttactacaacacctctgttgccgttgatgatattggttctgctgtgatcccaaatgaaaaatcaggaataacgaaggaaagagatgtcagttcaattcaaagtacatccaatgaactaccaaatattaactcaccattgtatgagaagtctggatatgattctcaaccaagcacacctatagctgtccccatcaatgaagacactcttcctagtggttttgacacctgtactaattctatgataactcttgccacatctgccaactctgctgaagatgataaaccagttgatttgcaccttaatgcacctgtttctgttgattcccaaaaccaagaacaacacatgacagggaaggaccatttggcagtgtgttctagaatctttgctactcagttacagacggacactgcaaatcctgctattgatcataaaccaggaactgcccagtttgaaccatctgcttccttgccccagaattcaggcaaggatgctactgcactaccttctgaggttgacagtgctgctccaaatagggcatcaagcaggaggaggaaagggtcaactcgagaaccacgcaccagaagtaattctgcatcagctgcaagtgaacgtcgtgcccgacttactggattgaagcaggcagaggacataaagaagttagagatgtcagcaacgccgaccacaacagtgtgtatttcatcggtagagcaacagggagctgcttctttaagtgcgaagattaccaatgcttctgtttctgaaggacagaagaatcctggaaattatatgccttctgccatttcaattcccgtggggagccatgttctgggcctgggcgcaacaagtattgaagaaacaactgccactatgataactcaggctcctgcagtttcaaaatcagaacgaagaaaacttccaggaggcagtcaacaaggtattcagtttgagagttcagcatcaaaaacaaagatggtatcagctgtggaaccagcacctgcaaatgttgaatgcatgcaaggtactgaagttaatagttcagaacagacaatagtttctgctactgaaccagcacctgcaaatgatgaacacatgcaagagcaaccaacaaatatcgtttcatctgtggaatcagaaccttcaaatgatgaagagcacacaaagcatgaagtgtttcttgcgactactggtgataatatgcttgcttctagtgcaggaactgaaatattgcgggatacagttgagcatgctgcttgccagccagaagcagtatgcacagatggaactgcaaggcagtctgaattgtcgcaacttgatagaaaagcctttcatgatgcctcatataaatacactcatgggtccactaaagatgatggtatcttgcccagtgaaggtacttctgttgatgttactggttctaagcaggatgatgtgaacattgttggcacacaaactgatgatgtttctcggggttctagtcattttccagttattttacaatcaactgagtcagatcggcctccaggtcaagtgaagaatttggagagtaggatggagcaggtgaaaacagaagaagctttggttaacagttctggtggcaatcaaactcacagtctgggcgatgaaccttctcataatacatcattagcaagaaattctccctcagaacactcgaatgagcgttgctctgatcaagtaattggtgaaaatttcaaaagtaaagaaaatattgttgaagtccattctggcattaatactgatggccccgatgaagctctgaatgcattgcacacccaatctaaggaggccagcatgacagatattggtgtacctactgatggtgatagatgtgaaggtaaagggactagtgtcgaggtctgtgctgacatgaatactgatgggcctgtggctacccaggatgcttcgtccacgaaatctgataaagagtcctgcatgatggaatgtggtgtgtctaccgatggctgtcccacagtttgcaaaacacacaatgatctccagggtcatgtatcttgtgaagaaacctttgttaggactggtggtgatgacacaacccatatcaccaatgcaaattatggttctaataatgaaagtgaggccaccattgctagtcctgttgaaaccacacaaaaactgatggaagggagcactgttattgtgtcggagaattctgatttaaataagcaatgccacacattgcatactagaaatgatcctcctgcaaataccctgttgatagttgagtctaacaaagttacttgtgatgctgaaattgtttgtgctagcaggttagaatcttctggcattgaggctgaaacagtgggtatccaagagtcagctcttactgattttgagggaacaaaaggaactggggatttgggtgacagaactaacagtcaactgcatgatgatgttcatgggacatcatgttccacgatagctcttgtatctgagaaagaaccttccgaagatcttaccaccggtagccattcagaagcatctaatttacttgctgctgtagaacaaactcaagaaactactgttgagaaccaagagatcatagatgcagtagtgtttatggatgcctgcaaggcagaacctgttggtgattttactattgctaaaggagctgaacagactgtagaaatggttcattatgttgataagcaatctgctgtattagactatgttgagacacagacaaaacgaacttcggtttgtggttctacgctaaatgaatcccctcaggctgcagggttggaagaagactgctctgtactgaagcatggtgatcctacttcatctgagcttcttactgtagcacctaatccaatcggtgaaacttctgttattcaagtggaaccagaggcaagaaactcagatggatactgcacaacagaggctggcagtgctttatctgaaactgtcatgggattggagccaaataaagaaactgcggttccaatgcaagagaatattggagaagctaatgataattttaataattgcgaagcacacaataattcggagattcatgcatttgaagtgtcgatggaaacgcagtcatcagaagtcaaggaagtatcttctattcagtctggtgcagcaaatttgagcacacagacaactgcactgcctgatgtaacaggacaaaccagtatggcatcgactggagaactagtatctacaaatgaacacatacacatgcaaggcactgaaatcaattcagagcaacaaacaaagatggtttcacctgctgaatcagcacctgctaatgatgaacacgtgcaagacattgtgattcttagttcagaacagcaaacaaagatggttttagctgcagagattgacgcattatgcgtccaggagactgcaattattgatcttgggggagcaagaggaacagttgacctgaatgacataagaacacaggttcctgcattacctggaagggatgtgctagatgtggaggcacatattttggagcaaaaaaaaacatcttcaccaggtgatgaaattaagggttcagaacaagcaaaaatcgaatcgattgcagagatcgaaacagtgggcgtcaaggagaatgtcattgctgatcataaggaaacaggtaacaacagtggcgtaagtatacatgcgcctctattagttgaatctggacaaaaggcatcacctggagttgaattgcgtggtattgaggttgatgctcatgttttggaacaagcaaagatggtttcagctctagaaccagactctactccagtttgtgctgacaagttagaaccttctggtgctgatgatgttggaatgattgttgtccaggaggctgcttctgttgatgatcacaatagagcacaaggtggtgaggctcattgttcagaacaaataaagatggcttcaattgcacaagcggtgtctagcatggctttagtaggatattcttcttcagaagactcaatggtggatgctgctgcccgagtaactgatgctgattttgtggatagtaaagcagctggtgtttatcgccaagaaactatgcctactcaaaccacctctaccctcccagagaacatggattctcctgcaactgctgctaccatggttgaatcgaagtttgctgcctcgtctgagcacgttgcaggacccgagccaattgatgaaacttctgttatgcaagtggaactggcaacaagcacaggggatggatgtgcagcagatggtcacaatcttgtttcatctgaaactgttgttgaagtgaagcttgctcaagaaattgttgttcctagtccaggtggtagcatagaagctaataatacttctaccatcagcgaagtatacaaagatacccagtctcgtgcatctggtgaagcatgcaatgatggtcagtctcatggtgatgaaaatatgaaacttggtgaagcttacactgaactgcagctggcaccttcctctggtgaggaggccatgacatgtatgtgtagtgagctgcccagccaggaggtggaggctccaagcagtgaccctttggagaataatgaagaaacgaaaaatgaagctgctgctcaaggatcagtaaatgaggattctgctcctcgtgctgaaaatgcaaagattgatgaagctgacacagaacaggaactgcttccatctggtgaggccacggtagacgaatccagcgagctactcagccaagacgaaaaggtggctcgtaaagatgcaaagatggaagagtctgctgctgctgctgctgcacagagacagctaactactgaagttgctcatgcaagtgaaaacgcgaaacttggtgaagatggcacggagctgcaactgccaccaccttcaatggtagacatatctagggagcaactcagccaggaagtggaggttgcaagctctgggccttcaggaactgatgaaactgctgagatgaaacggctaaacactgaacattcacctggtgatgaaacttcaaaacttgttggaactgatctaggactgcaattgtcaccttctggtgatgccatggtagatatatctaataagccacccagctgccaagacgtaaaggaggccccgagcagtgacattttgggaaatgatgaaaattcagacaccgagaagactcctgctgccttgcatggacggctgaacaccgaacttgctcctagtggcagaaatacagaatttagtgaagctgacactggaaaacaagagacacccgtgtctgctgaggctatggtagaatcatcgagcgagcctcgcagccatgaggcaaaggaagctccaacccctgacctgtctggggatgatgaaaaagcgaagtcagcaagggctgctgttgttgcggaactttttggagatgcaacagaaggtggttcggatcagccattgccgtctcctagagaacaaggcaaggaagcagaggccgatggaggcttttagagtaaagttgcaaatattgtatcaagagatactagaatccgtgtaagtaagaactgctaatagtgcttttagttgtaactggtgtaagcttctactcagaatcaaaagcgacgtgctgagattacagcaacagtggcctacggcagtttactactgttttgtgcaatattgctgctgagttttgttgagacaggcaattgatctgtcatctgtctcgtcttgcatcgaagttggcagcaccatggtgaggtgctcccgccttaacctggaagcgctgacagagggaagaacaatactctctggtttcctaatgttttcctgttcactgttttgatttgatgctgcattgcagtagtgtgacttagtaacataatggtgcgtttggatagacggacataccgatccagaatcatctgaacctaaatattgagtacaagcttagattatctgtttggtctgctttatgtctgggtgcaatgctctctgatttctggacggagtggtaccgcaatccaaacagactttaatgtttgggtgcttcaggtcataatcaaccatctaatttactttgcaaatgaatgtttcaaactggactgctcaagcctaccaagtttaatggtccttcctagtattgaatccttttgagtctagcccgtttcctcatttgaattttcactgttagtgtgcctatacttgcctcacgtagaattttgaaagcttatggttgggtgcg

SEQ ID NO: 218350 - DNA, 8694 bp, Zea Mays
gctgactgaacggtttgatcggagaagatgagttttatcagaataatctcgaggagctgtgggcacttctaaattttttgttgcccaatatttttaattcgtcagaggacttctctcagtggtttaacaaaccatttgaaagtaatggtgataattcacctgatgaggccttactttcagaggaggagaacttgttgatcataaatcgtcttcaccaggttcttcggccctttgtactcagaagacttaagcataaggtcgaaaatgagcttcctgaaaaaattgaaagacttgtaagatgtgaggcatctgcttatcagaaacttctcatgacaagggtggaagaaaatcttggtggaattggagccgttaaggttcgctccgttcacaactctgtcatggaattgaggaacatatgcaaccatccatacttgagccagcttcatgttgaagagattgagggctacctacctaaacattacctaccatctattttgaggctctgcggaaaacttgagatgttggacagattgctgcctaaactcaaagctacgggccatagggttctacttttttctacaatgacaagattgcttgatgtaatggaggattacttggtttggaaaaagtataaatatcttcgattggatgggcacacttctggccatgaaagaggagctcttatcgataaatttaacgatcctaattctcaagcattcatttttcttcttagtatacgagctggaggtgttggggtcaatctccaagctgccgatacagttatcatatttgatactgattggaatcctcaggttgatctgcaagcacaggctagggcccacaggattggtcaaaagaaggaggttcttgttttacgtttagaaacggtccgaactgttgaagagcaagtcagggcttcagcagaacacaaattaggtgttgctaatcagagtataactgctggtttttttgacaataacacaagtgctgaagatcgaagagagtatcttgaatcactcctacgtgagtctaaaaaggaagaagcagctccagtgttagatgatgatgctctgaatgacattctagctcggagcgaagctgagattgacatattcgaatctattgacaagcaaaggagagaagaagaaatggcagcttggcaaaaggtggttcaggatggttcaactagtgggctagaccctggagtattgccttctcgtcttgtaactgatgatgatctgaagcccttctgccatgctatgaaactttatgagccatcaaatgtgaaaacagtaaatgtgaatgtgaggaagaagggtgaacttgggggccttgatacacagcactatggaaggggtaaacgagcccgtgaggttcgctcttatgaagaccaatggactgaagaagaatttgaaaaactttgtcaagctgattctcctgaatcatcccaacctggtggcatgtcgaaggatttggatattcttaataaaggcattaagactgaaattcttgtggagagttcaaaagaaccagaacaaacgaagatggaggcatccccaactgtcggtgactctccaccagccaaacggcggagaggtagacctaaaaggtcagatgtttttgtatctcctactgctggtctgactgatgctgtcaaacaagacacaggaaccacacaggacggtagttctgctacaccagcaagtaccatccactctgatgcaccagctactgcaatcaattcagctgtttcagatgttaatatacattctattccaccagctgataccaagaaacaagagttcagtactgataccaaggtttccagttctgtttctgttttggaaggatctgtgccgaatgaaattggtacaccattacagagtgttcataatgtagcagtttctgcaccaccgcatcaatcagctaggggcaggaaatgccaagcaggagaaacacctcgtaggcgaggccgaaaaccaaaatctctatcttcatctggtgtagatgatgttagtcttaacccaaccttttcaactgttagtggtgtagcagacactagttatgttccttcatattctcaggtctcatcacaaggcactgctgtggcactggcaggaatccagaaggattttgtgacagttaagttggatacattgttaccagatagtggtaagggtgctcctcctgttaatgagggagataaaggtgctactgttacaacacctgtggcaaaagatatatgtgctgggactgtgacaacatcagacaacactgtcaccctgacaccaaatactcttaaggaaaacattggattagttcaagtggcatctgcaccttctatgctcgtggcttctgaagaactaatgaaaatagcacatgttgcggtggccgataagcctgttgagaagcaaactgcttcacgtcgccgcagaaagaaaacatctagtagcgaggatactggagtcagcactagacaaagatcagctatgaaaagatcttactacaacacctctgttgccgttgatgatattggttctgctgtgatcccaaatgaaaaatcaggaataacgaaggaaagagatgtcagttcaattcaaagtacatccaatgaactaccaaatattaactcaccattgtatgagaagtctggatatgattctcaaccaagcacacctatagctgtccccatcaatgaagacactcttcctagtggttttgacacctgtactaattctatgataactcttgccacatctgccaactctgctgaagatgataaaccagttgatttgcaccttaatgcacctgtttctgttgattcccaaaaccaagaacaacacatgacagggaaggaccatttggcagtgtgttctagaatctttgctactcagttacagacggacactgcaaatcctgctattgatcataaaccaggaactgcccagtttgaaccatctgcttccttgccccagaattcaggcaaggatgctactgcactaccttctgaggttgacagtgctgctccaaatagggcatcaagcaggaggaggaaagggtcaactcgagaaccacgcaccagaagtaattctgcatcagctgcaagtgaacgtcgtgcccgacttactggattgaagcaggcagaggacataaagaagttagagatgtcagcaacgccgaccacaacagtgtgtatttcatcggtagagcaacagggagctgcttctttaagtgcgaagattaccaatgcttctgtttctgaaggacagaagaatcctggaaattatatgccttctgccatttcaattcccgtggggagccatgttctgggcctgggcgcaacaagtattgaagaaacaactgccactatgataactcaggctcctgcagtttcaaaatcagaacgaagaaaacttccaggaggcagtcaacaaggtattcagtttgagagttcagcatcaaaaacaaagatggtatcagctgtggaaccagcacctgcaaatgttgaatgcatgcaaggtactgaagttaatagttcagaacagacaatagtttctgctactgaaccagcacctgcaaatgatgaacacatgcaagagcaaccaacaaatatcgtttcatctgtggaatcagaaccttcaaatgatgaagagcacacaaagcatgaagtgtttcttgcgactactggtgataatatgcttgcttctagtgcaggaactgaaatattgcgggatacagttgagcatgctgcttgccagccagaagcagtatgcacagatggaactgcaaggcagtctgaattgtcgcaacttgatagaaaagcctttcatgatgcctcatataaatacactcatgggtccactaaagatgatggtatcttgcccagtgaaggtacttctgttgatgttactggttctaagcaggatgatgtgaacattgttggcacacaaactgatgatgtttctcggggttctagtcattttccagttattttacaatcaactgagtcagatcggcctccaggtcaagtgaagaatttggagagtaggatggagcaggtgaaaacagaagaagctttggttaacagttctggtggcaatcaaactcacagtctgggcgatgaaccttctcataatacatcattagcaagaaattctccctcagaacactcgaatgagcgttgctctgatcaagtaattggtgaaaatttcaaaagtaaagaaaatattgttgaagtccattctggcattaatactgatggccccgatgaagctctgaatgcattgcacacccaatctaaggaggccagcatgacagatattggtgtacctactgatggtgatagatgtgaaggtaaagggactagtgtcgaggtctgtgctgacatgaatactgatgggcctgtggctacccaggatgcttcgtccacgaaatctgataaagagtcctgcatgatggaatgtggtgtgtctaccgatggctgtcccacagtttgcaaaacacacaatgatctccagggtcatgtatcttgtgaagaaacctttgttaggactggtggtgatgacacaacccatatcaccaatgcaaattatggttctaataatgaaagtgaggccaccattgctagtcctgttgaaaccacacaaaaactgatggaagggagcactgttattgtgtcggagaattctgatttaaataagcaatgccacacattgcatactagaaatgatcctcctgcaaataccctgttgatagttgagtctaacaaagttacttgtgatgctgaaattgtttgtgctagcaggttagaatcttctggcattgaggctgaaacagtgggtatccaagagtcagctcttactgattttgagggaacaaaaggaactggggatttgggtgacagaactaacagtcaactgcatgatgatgttcatgggacatcatgttccacgatagctcttgtatctgagaaagaaccttccgaagatcttaccaccggtagccattcagaagcatctaatttacttgctgctgtagaacaaactcaagaaactactgttgagaaccaagagatcatagatgcagtagtgtttatggatgcctgcaaggcagaacctgttggtgattttactattgctaaaggagctgaacagactgtagaaatggttcattatgttgataagcaatctgctgtattagactatgttgagacacagacaaaacgaacttcggtttgtggttctacgctaaatgaatcccctcaggctgcagggttggaagaagactgctctgtactgaagcatggtgatcctacttcatctgagcttcttactgtagcacctaatccaatcggtgaaacttctgttattcaagtggaaccagaggcaagaaactcagatggatactgcacaacagaggctggcagtgctttatctgaaactgtcatgggattggagccaaataaagaaactgcggttccaatgcaagagaatattggagaagctaatgataattttaataattgcgaagcacacaataattcggagattcatgcatttgaagtgtcgatggaaacgcagtcatcagaagtcaaggaagtatcttctattcagtctggtgcagcaaatttgagcacacagacaactgcactgcctgatgtaacaggacaaaccagtatggcatcgactggagaactagtatctacaaatgaacacatacacatgcaaggcactgaaatcaattcagagcaacaaacaaagatggtttcacctgctgaatcagcacctgctaatgatgaacacgtgcaagacattgtgattcttagttcagaacagcaaacaaagatggttttagctgcagagattgacgcattatgcgtccaggagactgcaattattgatcttgggggagcaagaggaacagttgacctgaatgacataagaacacaggttcctgcattacctggaagggatgtgctagatgtggaggcacatattttggagcaaaaaaaaacatcttcaccaggtgatgaaattaagggttcagaacaagcaaaaatcgaatcgattgcagagatcgaaacagtgggcgtcaaggagaatgtcattgctgatcataaggaaacaggtaacaacagtggcgtaagtatacatgcgcctctattagttgaatctggacaaaaggcatcacctggagttgaattgcgtggtattgaggttgatgctcatgttttggaacaagcaaagatggtttcagctctagaaccagactctactccagaagtttgtgctgacaagttagaaccttctggtgctgatgatgttggaatgattgttgtccaggaggctgcttctgttgatgatcacaatagagcacaaggtggtgaggctcattgttcagaacaaataaagatggcttcaattgcacaagcggtgtctagcatggctttagtaggatattcttcttcagaagactcaatggtggatgctgctgcccgagtaactgatgctgattttgtggatagtaaagcagctggtgtttatcgccaagaaactatgcctactcaaaccacctctaccctcccagagaacatggattctcctgcaactgctgctaccatggttgaatcgaagtttgctgcctcgtctgagcacgttgcaggacccgagccaattgatgaaacttctgttatgcaagtggaactggcaacaagcacaggggatggatgtgcagcagatggtcacaatcttgtttcatctgaaactgttgttgaagtgaagcttgctcaagaaattgttgttcctagtccaggtggtagcatagaagctaataatacttctaccatcagcgaagtatacaaagatacccagtctcgtgcatctggtgaagcatgcaatgatggtcagtctcatggtgatgaaaatatgaaacttggtgaagcttacactgaactgcagctggcaccttcctctggtgaggaggccatgacatgtatgtgtagtgagctgcccagccaggaggtggaggctccaagcagtgaccctttggagaataatgaagaaacgaaaaatgaagctgctgctcaaggatcagtaaatgaggattctgctcctcgtgctgaaaatgcaaagattgatgaagctgacacagaacaggaactgcttccatctggtgaggccacggtagacgaatccagcgagctactcagccaagacgaaaaggtggctcgtaaagatgcaaagatggaagagtctgctgctgctgctgctgcacagagacagctaactactgaagttgctcatgcaagtgaaaacgcgaaacttggtgaagatggcacggagctgcaactgccaccaccttcaatggtagacatatctagggagcaactcagccaggaagtggaggttgcaagctctgggccttcaggaactgatgaaactgctgagatgaaacggctaaacactgaacattcacctggtgatgaaacttcaaaacttgttggaactgatctaggactgcaattgtcaccttctggtgatgccatggtagatatatctaataagccacccagctgccaagacgtaaaggaggccccgagcagtgacattttgggaaatgatgaaaattcagacaccgagaagactcctgctgccttgcatggacggctgaacaccgaacttgctcctagtggcagaaatacagaatttagtgaagctgacactggaaaacaagagacacccgtgtctgctgaggctatggtagaatcatcgagcgagcctcgcagccatgaggcaaaggaagctccaacccctgacctgtctggggatgatgaaaaagcgaagtcagcaagggctgctgttgttgcggaactttttggagatgcaacagaaggtggttcggatcagccattgccgtctcctagagaacaaggcaaggaagcagaggccgatggaggcttttagagtaaagttgcaaatattgtatcaagagatactagaatccgtgtaagtaagaactgctaatagtgcttttagttgtaactggtgtaagcttctactcagaatcaaaagcgacgtgctgagattacagcaacagtggcctacggcagtttactactgttttgtgcaatattgctgctgagttttgttgagacaggcaattgatctgtcatctgtctcgtcttgcatcgaagttggcagcaccatggtgaggtgctcccgccttaacctggaagcgctgacagagggaagaacaatactctctggtttcctaatgttttcctgttcactgttttgatttgatgctgcattgcagtagtgtgacttagtaacataatggtgcgtttggatagacggacataccgatccagaatcatctgaacctaaatattgagtacaagcttagattatctgtttggtctgctttatgtctgggtgcaatgctctctgatttctggacggagtggtaccgcaatccaaacagactttaatgtttgggtgcttcaggtcataatcaaccatctaatttactttgcaaatgaatgtttcaaactggactgctcaagcctaccaagtttaatggtccttcctagtattgaatccttttgagtctagcccgtttcctcatttgaattttcactgttagtgtgcctatacttgcctcacgtagaattttgaaagcttatggttgggtgcg

SEQ ID NO: 218351 - DNA, 8342 bp, Zea Mays
ctgttctgagttgtgctagctggttcgctccgttcacaactctgtcatggaattgaggaacatatgcaaccatccatacttgagccagcttcatgttgaagagattgagggctacctacctaaacattacctaccatctattttgaggctctgcggaaaacttgagatgttggacagattgctgcctaaactcaaagctacgggccatagggttctacttttttctacaatgacaagattgcttgatgtaatggaggattacttggtttggaaaaagtataaatatcttcgattggatgggcacacttctggccatgaaagaggagctcttatcgataaatttaacgatcctaattctcaagcattcatttttcttcttagtatacgagctggaggtgttggggtcaatctccaagctgccgatacagttatcatatttgatactgattggaatcctcaggttgatctgcaagcacaggctagggcccacaggattggtcaaaagaaggaggttcttgttttacgtttagaaacggtccgaactgttgaagagcaagtcagggcttcagcagaacacaaattaggtgttgctaatcagagtataactgctggtttttttgacaataacacaagtgctgaagatcgaagagagtatcttgaatcactcctacgtgagtctaaaaaggaagaagcagctccagtgttagatgatgatgctctgaatgacattctagctcggagcgaagctgagattgacatattcgaatctattgacaagcaaaggagagaagaagaaatggcagcttggcaaaaggtggttcaggatggttcaactagtgggctagaccctggagtattgccttctcgtcttgtaactgatgatgatctgaagcccttctgccatgctatgaaactttatgagccatcaaatgtgaaaacagtaaatgtgaatgtgaggaagaagggtgaacttgggggccttgatacacagcactatggaaggggtaaacgagcccgtgaggttcgctcttatgaagaccaatggactgaagaagaatttgaaaaactttgtcaagctgattctcctgaatcatcccaacctggtggcatgtcgaaggatttggatattcttaataaaggcattaagactgaaattcttgtggagagttcaaaagaaccagaacaaacgaagatggaggcatccccaactgtcggtgactctccaccagccaaacggcggagaggtagacctaaaaggtcagatgtttttgtatctcctactgctggtctgactgatgctgtcaaacaagacacaggaaccacacaggacggtagttctgctacaccagcaagtaccatccactctgatgcaccagctactgcaatcaattcagctgtttcagatgttaatatacattctattccaccagctgataccaagaaacaagagttcagtactgataccaaggtttccagttctgtttctgttttggaaggatctgtgccgaatgaaattggtacaccattacagagtgttcataatgtagcagtttctgcaccaccgcatcaatcagctaggggcaggaaatgccaagcaggagaaacacctcgtaggcgaggccgaaaaccaaaatctctatcttcatctggtgtagatgatgttagtcttaacccaaccttttcaactgttagtggtgtagcagacactagttatgttccttcatattctcaggtctcatcacaaggcactgctgtggcactggcaggaatccagaaggattttgtgacagttaagttggatacattgttaccagatagtggtaagggtgctcctcctgttaatgagggagataaaggtgctactgttacaacacctgtggcaaaagatatatgtgctgggactgtgacaacatcagacaacactgtcaccctgacaccaaatactcttaaggaaaacattggattagttcaagtggcatctgcaccttctatgctcgtggcttctgaagaactaatgaaaatagcacatgttgcggtggccgataagcctgttgagaagcaaactgcttcacgtcgccgcagaaagaaaacatctagtagcgaggatactggagtcagcactagacaaagatcagctatgaaaagatcttactacaacacctctgttgccgttgatgatattggttctgctgtgatcccaaatgaaaaatcaggaataacgaaggaaagagatgtcagttcaattcaaagtacatccaatgaactaccaaatattaactcaccattgtatgagaagtctggatatgattctcaaccaagcacacctatagctgtccccatcaatgaagacactcttcctagtggttttgacacctgtactaattctatgataactcttgccacatctgccaactctgctgaagatgataaaccagttgatttgcaccttaatgcacctgtttctgttgattcccaaaaccaagaacaacacatgacagggaaggaccatttggcagtgtgttctagaatctttgctactcagttacagacggacactgcaaatcctgctattgatcataaaccaggaactgcccagtttgaaccatctgcttccttgccccagaattcaggcaaggatgctactgcactaccttctgaggttgacagtgctgctccaaatagggcatcaagcaggaggaggaaagggtcaactcgagaaccacgcaccagaagtaattctgcatcagctgcaagtgaacgtcgtgcccgacttactggattgaagcaggcagaggacataaagaagttagagatgtcagcaacgccgaccacaacagtgtgtatttcatcggtagagcaacagggagctgcttctttaagtgcgaagattaccaatgcttctgtttctgaaggacagaagaatcctggaaattatatgccttctgccatttcaattcccgtggggagccatgttctgggcctgggcgcaacaagtattgaagaaacaactgccactatgataactcaggctcctgcagtttcaaaatcagaacgaagaaaacttccaggaggcagtcaacaaggtattcagtttgagagttcagcatcaaaaacaaagatggtatcagctgtggaaccagcacctgcaaatgttgaatgcatgcaaggtactgaagttaatagttcagaacagacaatagtttctgctactgaaccagcacctgcaaatgatgaacacatgcaagagcaaccaacaaatatcgtttcatctgtggaatcagaaccttcaaatgatgaagagcacacaaagcatgaagtgtttcttgcgactactggtgataatatgcttgcttctagtgcaggaactgaaatattgcgggatacagttgagcatgctgcttgccagccagaagcagtatgcacagatggaactgcaaggcagtctgaattgtcgcaacttgatagaaaagcctttcatgatgcctcatataaatacactcatgggtccactaaagatgatggtatcttgcccagtgaaggtacttctgttgatgttactggttctaagcaggatgatgtgaacattgttggcacacaaactgatgatgtttctcggggttctagtcattttccagttattttacaatcaactgagtcagatcggcctccaggtcaagtgaagaatttggagagtaggatggagcaggtgaaaacagaagaagctttggttaacagttctggtggcaatcaaactcacagtctgggcgatgaaccttctcataatacatcattagcaagaaattctccctcagaacactcgaatgagcgttgctctgatcaagtaattggtgaaaatttcaaaagtaaagaaaatattgttgaagtccattctggcattaatactgatggccccgatgaagctctgaatgcattgcacacccaatctaaggaggccagcatgacagatattggtgtacctactgatggtgatagatgtgaaggtaaagggactagtgtcgaggtctgtgctgacatgaatactgatgggcctgtggctacccaggatgcttcgtccacgaaatctgataaagagtcctgcatgatggaatgtggtgtgtctaccgatggctgtcccacagtttgcaaaacacacaatgatctccagggtcatgtatcttgtgaagaaacctttgttaggactggtggtgatgacacaacccatatcaccaatgcaaattatggttctaataatgaaagtgaggccaccattgctagtcctgttgaaaccacacaaaaactgatggaagggagcactgttattgtgtcggagaattctgatttaaataagcaatgccacacattgcatactagaaatgatcctcctgcaaataccctgttgatagttgagtctaacaaagttacttgtgatgctgaaattgtttgtgctagcaggttagaatcttctggcattgaggctgaaacagtgggtatccaagagtcagctcttactgattttgagggaacaaaaggaactggggatttgggtgacagaactaacagtcaactgcatgatgatgttcatgggacatcatgttccacgatagctcttgtatctgagaaagaaccttccgaagatcttaccaccggtagccattcagaagcatctaatttacttgctgctgtagaacaaactcaagaaactactgttgagaaccaagagatcatagatgcagtagtgtttatggatgcctgcaaggcagaacctgttggtgattttactattgctaaaggagctgaacagactgtagaaatggttcattatgttgataagcaatctgctgtattagactatgttgagacacagacaaaacgaacttcggtttgtggttctacgctaaatgaatcccctcaggctgcagggttggaagaagactgctctgtactgaagcatggtgatcctacttcatctgagcttcttactgtagcacctaatccaatcggtgaaacttctgttattcaagtggaaccagaggcaagaaactcagatggatactgcacaacagaggctggcagtgctttatctgaaactgtcatgggattggagccaaataaagaaactgcggttccaatgcaagagaatattggagaagctaatgataattttaataattgcgaagcacacaataattcggagattcatgcatttgaagtgtcgatggaaacgcagtcatcagaagtcaaggaagtatcttctattcagtctggtgcagcaaatttgagcacacagacaactgcactgcctgatgtaacaggacaaaccagtatggcatcgactggagaactagtatctacaaatgaacacatacacatgcaaggcactgaaatcaattcagagcaacaaacaaagatggtttcacctgctgaatcagcacctgctaatgatgaacacgtgcaagacattgtgattcttagttcagaacagcaaacaaagatggttttagctgcagagattgacgcattatgcgtccaggagactgcaattattgatcttgggggagcaagaggaacagttgacctgaatgacataagaacacaggttcctgcattacctggaagggatgtgctagatgtggaggcacatattttggagcaaaaaaaaacatcttcaccaggtgatgaaattaagggttcagaacaagcaaaaatcgaatcgattgcagagatcgaaacagtgggcgtcaaggagaatgtcattgctgatcataaggaaacaggtaacaacagtggcgtaagtatacatgcgcctctattagttgaatctggacaaaaggcatcacctggagttgaattgcgtggtattgaggttgatgctcatgttttggaacaagcaaagatggtttcagctctagaaccagactctactccagaagtttgtgctgacaagttagaaccttctggtgctgatgatgttggaatgattgttgtccaggaggctgcttctgttgatgatcacaatagagcacaaggtggtgaggctcattgttcagaacaaataaagatggcttcaattgcacaagcggtgtctagcatggctttagtaggatattcttcttcagaagactcaatggtggatgctgctgcccgagtaactgatgctgattttgtggatagtaaagcagctggtgtttatcgccaagaaactatgcctactcaaaccacctctaccctcccagagaacatggattctcctgcaactgctgctaccatggttgaatcgaagtttgctgcctcgtctgagcacgttgcaggacccgagccaattgatgaaacttctgttatgcaagtggaactggcaacaagcacaggggatggatgtgcagcagatggtcacaatcttgtttcatctgaaactgttgttgaagtgaagcttgctcaagaaattgttgttcctagtccaggtggtagcatagaagctaataatacttctaccatcagcgaagtatacaaagatacccagtctcgtgcatctggtgaagcatgcaatgatggtcagtctcatggtgatgaaaatatgaaacttggtgaagcttacactgaactgcagctggcaccttcctctggtgaggaggccatgacatgtatgtgtagtgagctgcccagccaggaggtggaggctccaagcagtgaccctttggagaataatgaagaaacgaaaaatgaagctgctgctcaaggatcagtaaatgaggattctgctcctcgtgctgaaaatgcaaagattgatgaagctgacacagaacaggaactgcttccatctggtgaggccacggtagacgaatccagcgagctactcagccaagacgaaaaggtggctcgtaaagatgcaaagatggaagagtctgctgctgctgctgctgcacagagacagctaactactgaagttgctcatgcaagtgaaaacgcgaaacttggtgaagatggcacggagctgcaactgccaccaccttcaatggtagacatatctagggagcaactcagccaggaagtggaggttgcaagctctgggccttcaggaactgatgaaactgctgagatgaaacggctaaacactgaacattcacctggtgatgaaacttcaaaacttgttggaactgatctaggactgcaattgtcaccttctggtgatgccatggtagatatatctaataagccacccagctgccaagacgtaaaggaggccccgagcagtgacattttgggaaatgatgaaaattcagacaccgagaagactcctgctgccttgcatggacggctgaacaccgaacttgctcctagtggcagaaatacagaatttagtgaagctgacactggaaaacaagagacacccgtgtctgctgaggctatggtagaatcatcgagcgagcctcgcagccatgaggcaaaggaagctccaacccctgacctgtctggggatgatgaaaaagcgaagtcagcaagggctgctgttgttgcggaactttttggagatgcaacagaaggtggttcggatcagccattgccgtctcctagagaacaaggcaaggaagcagaggccgatggaggcttttagagtaaagttgcaaatattgtatcaagagatactagaatccgtgtaagtaagaactgctaatagtgcttttagttgtaactggtgtaagcttctactcagaatcaaaagcgacgtgctgagattacagcaacagtggcctacggcagtttactactgttttgtgcaatattgctgctgagttttgttgagacaggcaattgatctgtcatctgtctcgtcttgcatcgaagttggcagcaccatggtgaggtgctcccgccttaacctggaagcgctgacagagggaagaacaatactctctggtttcctaatgttttcctgttcactgttttgatttgatgctgcattgcagtagtgtgacttagtaacataatggtgcgtttggatagacggacataccgatccagaatcatctgaacctaaatattgagtacaagcttagattatctgtttggtctgctttatgtctgggtgcaatgctctctgatttctggacggagtggtaccgcaatccaaacagactttaatgtttgggtgcttcaggtcataatcaaccatctaatttactttgcaaatgaatgtttcaaactggactgctcaagcctaccaagtttaatggtccttcctagtattgaatccttttgagtctagcccgtttcctcatttgaattttcactgttagtgtgcctatacttgcctcacgtagaattttgaaagcttatggttgggtgcg

SEQ ID NO: 218352 - DNA, 582 bp, Zea Mays
atctactagttggaaacatggaagtggcataaaaatgatatgtagaagtttgaaatatccaaaagacgaaacctgctttctgctacttgtaccttcattcctgtatgctatcgtttaccttgctcagatgaagccattgatcaaccccatcctgagcggggagtgatctctcctctgcattaaaaagaatgaaagctaggtctgctgtaccattattcagtctgtgaacttcctattcatttggccccacctgatgaaataaataaactgccatgagtttttttttttttgctactccttcactgcagacattgagaaggctcgctgtgattagtgtatgcaattgtatgatatacgcaataataataatagtatctaaatatatgtgtgccgctcattggaatgtctgggtgcgtgtacccaactttgttcgtcacgactcaggtgtttgtctgcttgaaatggaattatgaacgtaaaacaatgtagcacaattttctgctttcagtgggtgttttgacttttgagcttacattttttggtggttctagtactggtacactgccaaatgtctgctatttt

SEQ ID NO: 218353 - DNA, 1347 bp, Zea Mays
cttactcccgtctcgtcgtcactcggcggttcagcccgcaggccacagaggcggacctgacctggccctggccaccaccgaacgagcgactcttcgagcagacgcatcggcagacgagcagacgcatcgccgcagcaagcttcgagcgccaggcatgacgctggacaccccggccgccgtggtcctggagctgatgaccatggggcagcagtccgcggcgcacctcggggacctgctccgggccgcgtcccctgctgcagcgtctccgcaccaggagctcgcggccgagatcctccgctgctgcggccgcgtcatcgacgcgctcagggccgccgccgccgccagcgggcacaagaggaaggcggcggcggagtaccaggacgcagcagcagggggaggcgcctcgcctcctcctcctcctcctcctccggggccgccactaaagagaagggcgcgcggcggagaggcgaccagggaagtgaccagcggcacgacggtggacggcttcatctggaggaagtacgggcagaaggacatcaacggccacaagcacccgaggctctactaccgctgcgcgcacaaggaccaggggtgcgacgcgacccggcgggtgcagcggacgcgggagcagcccgcggcgtacgagatcgcctactacggggaccacacgtgcaggggcgcggccaccgcctggcagcagggagcgccggcgcccgccgtcgtcgacttcggctccaactcctggggatccgcggacaccaccagcggaggctcgccggcctcggtgccgctgggagggtggtggtccccgtcggcgtcgtccgaggtcgggttcgaggcgcatgcggccgcgcacgagtggcgcgacacggctgcggctgctcctgatccggtaatggagttcctggacggcgccttcggctgggaatccgtcctcgaggaccgctttgacttgggcggtctacatggcatcgctacgtttcagtagattgttagcagagcagcagtagatctggacatgtgttgtcgccatcgctgtagtacgtgagaacagttaggccgaccgtgcagttaatgagtgacaacccccgaccccgacctaggagggtctcaacaagatgccgtagatcacactagtaatagtattactatcatgtttcaggcagatgccagagggatcagaacaaaacaaaggtatcgcgttctaaaaatgaggaatgtgttttttattttttggaagaaaaaaaaaacttcagtactttcttccccattagaaaatggagcggagcaaaggaacaaggtgacgtactttcttccctattatgtactttagcaggtcgcctaaaa

SEQ ID NO: 218354 - DNA, 4497 bp, Zea Mays
ttgggcgtgggccgcttccgcgtggttccagttccaggacctcagtcctcagccagcccccatcgaccaccatggtccacctgtctggtgtgcccgttcgtccaaacccgctgcgctacccgctcgccgtctcgactagctctaggttttcattcggcgcaccggaacagcgcaccatcaagagagcgaccgccgcacaggcgcgacaccgccgcccgccggtacagccaaaccgagctcgccgcatcgaaggggcttcccgaccgccgagcgtgcttctagacgacgacaacgagcacgaggaactgatggggcggaaggggcggaaggggaagggcgcagcggccggggggagcgccggcatgaaggaggcgacgctggtgcgcgtctcaaaggcgctcgaggacttccgcgcctccaacgccgaggtgtacacatttgaacctgatatatccaaacaagagcgagctgcaatccatgagatgtgtaggaaaatgggcatgatatccaaaagttctgggaacggggaacgtcgacgcctttctgtttataaaagaaaacagaagcgggggcctgaattggaacaaggccctagctaccttgggttttctgaagaggctaggcatgttttgcaggatttatttatgcattatcctcctggtgatgctgatttaagtggggatgttgaccagagttctagtgataaggctgcaaacatcaaatggagaacagataatgcgttttgcaggcccgcaatgagtaaacttgatataacgaagaaagttgagatgcttgcctcaaaaataaatggatccgaacagttgagaaaggtcatggaagatagaacaaaacttcctatttcatctttcaaggatgtcatcacttcaactttggaaaatcaccaggtgcctcaatacatcttggatcatatgtggggcaagggtgaatcatgtaagatcatatgcactcaaccacgtcggatatcagctatttcagttgctgagcgaatctctgctgaaagaggtgaggctgttggtgacacagttggatataagatacgtttggagtcaaaaggcgggaagaattcatcagtcttgttctgcacaaatggtgttcttttgagattattgataggaagaggaactaacgcttcaaaagcacgaaaccagaagcgctcattagatgatgcagttttgggaataacgcacatcattgtggatgaaatccatgaaagggataggttttctgatttcatgctgactattctaagagacttgttgcctttgtatcctcatcttcgtatggtactcatgagtgcaacaattgatgctgagcgtttttcgcaatatttcaatggatgttcggtcatacaagtccctggttttacctatcctgtcaaaactttctatttggaggatgtgctttctattctgcagtctgcaggtgataaccatcttaccagtcataaaacagagggcagcgttttaactcacgatttcaaaagctcaatggatgattcaattaatctggctttggtcaatgatgaatttgatcctcttcttgagcttatttctgcagagcagaacacagaagtctacaattaccagcattcagagactggtataactcctttaatggtttttgctatgaagggtcagcttggggacgtctgtatgcttttatcttttggtgtggattgttcagcacaggatcatgatggaaaatccgcattagattgggcacaacaagagaatcaacaagaggtctgtgaagtaataaagaaacatatggagtgtagttcagaaaaatcaactgaagataacgagctgcttaacaagtacttggcatctattaatccagagcacattgatactctgctaattgaacggctgcttcgaaaaatttgtgtggattccaatgaaggagccatcttggtattccttcctggctgggaagatatcagtcaaacacgtgaaagattatttgcttctccattctttcaggattcatcaagatttcttgtgttgtctcttcattctatgatcccgtcctcagagcagaaaaaggttttcaaacgtccaccagtgggggttcgtaaaattattctctcaactaatattgcagagactgctgtgacaattgatgatgttgtgtttgtcatagatagtgggagaatgaaagagaaaagttatgatccatacaataatgtgtccacacttcatgcttcttgggtttcaaaagccagtgcaagacaacgcgaagggcgtgctggccgatgtcagccaggaacttgctatcatctttactcaaggtttagagcttcatccttgccagactaccaaattcctgaaataaaaagaatgcccattgaggaactttgtttgcaggtcaaactgcttgattcaaactgcagaatagcagactttctgaagaaaaccttggaccctccaattccagaaactgtaagaaatgctattgctgtgcttcaggatcttggtgctttaacacaagacgaacaactaacagaattaggagaaaagctgggttccctgccagtccatccatccaccaccaagatgctcctgtttgctatattaatgaactgcctggatccagcattgacattggcatgtgcagctgattatagagatccatttgtccttccagtagcgcctgatgagaggaaaagggcagctgcagcgaaagttgagcttgcttcgttgtatggtgggttcagcgaccaacttgctgttgtcgcggcatttgacttctggaggcatgccaaagatagaggccaagattctcaattttgtgcgaagtactttgtctcttcaaacatcatgaatatgctatcaagcatgaggaaacaacttcagaatgaactgtctcaaagagggtttgtccctgcagatgcatctgcctgcagcttaaactctaaagatccaggtatcatgcgtgctgttcttatggctggtgcttacccaatggtagggaaaatgctccctcctcgcaaaaatgctagaaaatcagttctggaaacagcgagtggtgccaaagttcgtctgcacccacactcctgcaactttaacctatctttcagtaaatcttctgggaatccactgctgatatacgatgagatcactcgaggtgatggtggaatgtatataaaaaattcttcagttgttgggtcatatcctttgcttctaatagctgcagaaatggttgttgctccacctgatgatgatagtgatgaagatgaggaagattctagtgaggatgaagctgaggaaagcacattggtacagcacaaagaagagattatgtcttcacctgacagcattgtttcagttgttgttgatcggtggctccggtttgacgctacggctctggatgttgctcaaatatactgcttaagagaacgtctagcatctgctattcttttcaaagtgaaacatccacaagatgttctacctcctgcgcttggagcgtcaatgtatgccatcacatgcatcctttcattcgatggtttgccttctatggttccacctaatgacctttcagcaaaccgaggttcaggccaggatttagcagaagctagcaagttctctcagggaagaagagcgggttatattccaccaagtggttttctgatgtccttgttagctgataggacccataatgcaccttctttccagaactcatctaaccatccaggaggtggttcagcgcatactcggccatccagggctcctgttggtaggtttgatcgatctcggcgacctttccgcaattctggacctgggacttcagcaccacgttctttcaaaaggcagcgcgacgctccacggtgagcagggcataaaggcagccttttgcatgccagccatttcggatgtgctttgtcaacggtgcctagtctaagaaaaggacgtgctacagaatcacaagctttgctgtgttccgttgtagaaatgaaaggaaaagaattatagcactgcatcagattcctttgtcgaagagtttttgtaggtatgcccctgagtgttttgtgtactttgctcagccgagctcatttgcaccgtagatctcagaggtgcctgtaatcttttggatggagttcggatgttaaaaagaagtgggaaagaaaagggaagacctgttatctgctcaaatgatgagccccataattgacggtatcactggaccatagatgaactttgtgctgtagtgccataggcaatatggtgtgacgggcgagtggaatttgccctgcatcgcaagcgttaaattttgtccttgtatgtacgtacttagtaaacttagtaataaccctttctttgaattcagttttatagtgagtccaacatgatatggcgcattttgttcttgtttgggaaaaaatgcaagcgaagtacgatgcaccaacggatttttcgggggatgaaggttaaagtctgacaacttggaatccaggcaagtcggaatgttggattgttt

SEQ ID NO: 218355 - DNA, 4466 bp, Zea Mays
ttgggcgtgggccgcttccgcgtggttccagttccaggacctcagtcctcagccagcccccatcgaccaccatggtccacctgtctggtgtgcccgttcgtccaaacccgctgcgctacccgctcgccgtctcgactagctctaggttttcattcggcgcaccggaacagcgcaccatcaagagagcgaccgccgcacaggcgcgacaccgccgcccgccggtacagccaaaccgagctcgccgcatcgaaggggcttcccgaccgccgagcgtgcttctagacgacgacaacgagcacgaggaactgatggggcggaaggggcggaaggggaagggcgcagcggccggggggagcgccggcatgaaggaggcgacgctggtgcgcgtctcaaaggcgctcgaggacttccgcgcctccaacgccgaggtgtacacatttgaacctgatatatccaaacaagagcgagctgcaatccatgagatgtgtaggaaaatgggcatgatatccaaaagttctgggaacggggaacgtcgacgcctttctgtttataaaagaaaacagaagcgggggcctgaattggaacaaggccctagctaccttgggttttctgaagaggctaggcatgttttgcaggatttatttatgcattatcctcctggtgatgctgatttaagtggggatgttgaccagagttctagtgataaggctgcaaacatcaaatggagaacagataatgcgttttgcaggcccgcaatgagtaaacttgatataacgaagaaagttgagatgcttgcctcaaaaataaatggatccgaacagttgagaaaggtcatggaagatagaacaaaacttcctatttcatctttcaaggatgtcatcacttcaactttggaaaatcaccaggtggttcttatttctggacaaacaggctgcggtaaaaccacccaggtgcctcaatacatcttggatcatatgtggggcaagggtgaatcatgtaagatcatatgcactcaaccacgtcggatatcagctatttcagttgctgagcgaatctctgctgaaagaggtgaggctgttggtgacacagttggatataagatacgtttggagtcaaaaggcgggaagaattcatcagtcttgttctgcacaaatggtgttcttttgagattattgataggaagaggaactaacgcttcaaaagcacgaaaccagaagcgctcattagatgatgcagttttgggaataacgcacatcattgtggatgaaatccatgaaagggataggttttctgatttcatgctgactattctaagagacttgttgcctttgtatcctcatcttcgtatggtactcatgagtgcaacaattgatgctgagcgtttttcgcaatatttcaatggatgttcggtcatacaagtccctggttttacctatcctgtcaaaactttctatttggaggatgtgctttctattctgcagtctgcaggtgataaccatcttaccagtcataaaacagagggcagcgttttaactcacgatttcaaaagctcaatggatgattcaattaatctggctttggtcaatgatgaatttgatcctcttcttgagcttatttctgcagagcagaacacagaagtctacaattaccagcattcagagactggtataactcctttaatggtttttgctatgaagggtcagcttggggacgtctgtatgcttttatcttttggtgtggattgttcagcacaggatcatgatggaaaatccgcattagattgggcacaacaagagaatcaacaagaggtctgtgaagtaataaagaaacatatggagtgtagttcagaaaaatcaactgaagataacgagctgcttaacaagtacttggcatctattaatccagagcacattgatactctgctaattgaacggctgcttcgaaaaatttgtgtggattccaatgaaggagccatcttggtattccttcctggctgggaagatatcagtcaaacacgtgaaagattatttgcttctccattctttcaggattcatcaagatttcttgtgttgtctcttcattctatgatcccgtcctcagagcagaaaaaggttttcaaacgtccaccagtgggggttcgtaaaattattctctcaactaatattgcagagactgctgtgacaattgatgatgttgtgtttgtcatagatagtgggagaatgaaagagaaaagttatgatccatacaataatgtgtccacacttcatgcttcttgggtttcaaaagccagtgcaagacaacgcgaagggcgtgctggccgatgtcagccaggaacttgctatcatctttactcaaggtcaaactgcttgattcaaactgcagaatagcagactttctgaagaaaaccttggaccctccaattccagaaactgtaagaaatgctattgctgtgcttcaggatcttggtgctttaacacaagacgaacaactaacagaattaggagaaaagctgggttccctgccagtccatccatccaccaccaagatgctcctgtttgctatattaatgaactgcctggatccagcattgacattggcatgtgcagctgattatagagatccatttgtccttccagtagcgcctgatgagaggaaaagggcagctgcagcgaaagttgagcttgcttcgttgtatggtgggttcagcgaccaacttgctgttgtcgcggcatttgacttctggaggcatgccaaagatagaggccaagattctcaattttgtgcgaagtactttgtctcttcaaacatcatgaatatgctatcaagcatgaggaaacaacttcagaatgaactgtctcaaagagggtttgtccctgcagatgcatctgcctgcagcttaaactctaaagatccaggtatcatgcgtgctgttcttatggctggtgcttacccaatggtagggaaaatgctccctcctcgcaaaaatgctagaaaatcagttctggaaacagcgagtggtgccaaagttcgtctgcacccacactcctgcaactttaacctatctttcagtaaatcttctgggaatccactgctgatatacgatgagatcactcgaggtgatggtggaatgtatataaaaaattcttcagttgttgggtcatatcctttgcttctaatagctgcagaaatggttgttgctccacctgatgatgatagtgatgaagatgaggaagattctagtgaggatgaagctgaggaaagcacattggtacagcacaaagaagagattatgtcttcacctgacagcattgtttcagttgttgttgatcggtggctccggtttgacgctacggctctggatgttgctcaaatatactgcttaagagaacgtctagcatctgctattcttttcaaagtgaaacatccacaagatgttctacctcctgcgcttggagcgtcaatgtatgccatcacatgcatcctttcattcgatggtttgccttctatggttccacctaatgacctttcagcaaaccgaggttcaggccaggatttagcagaagctagcaagttctctcagggaagaagagcgggttatattccaccaagtggttttctgatgtccttgttagctgataggacccataatgcaccttctttccagaactcatctaaccatccaggaggtggttcagcgcatactcggccatccagggctcctgttggtaggtttgatcgatctcggcgacctttccgcaattctggacctgggacttcagcaccacgttctttcaaaaggcagcgcgacgctccacggtgagcagggcataaaggcagccttttgcatgccagccatttcggatgtgctttgtcaacggtgcctagtctaagaaaaggacgtgctacagaatcacaagctttgctgtgttccgttgtagaaatgaaaggaaaagaattatagcactgcatcagattcctttgtcgaagagtttttgtaggtatgcccctgagtgttttgtgtactttgctcagccgagctcatttgcaccgtagatctcagaggtgcctgtaatcttttggatggagttcggatgttaaaaagaagtgggaaagaaaagggaagacctgttatctgctcaaatgatgagccccataattgacggtatcactggaccatagatgaactttgtgctgtagtgccataggcaatatggtgtgacgggcgagtggaatttgccctgcatcgcaagcgttaaattttgtccttgtatgtacgtacttagtaaacttagtaataaccctttctttgaattcagttttatagtgagtccaacatgatatggcgcattttgttcttgtttgggaaaaaatgcaagcgaagtacgatgcaccaacggatttttcgggggatgaaggttaaagtctgacaacttggaatccaggcaagtcggaatgttggattgttt

SEQ ID NO: 218356 - DNA, 895 bp, Zea Mays
attgcatttcactgcccagatgtgcctaacagaattctacatagcggaagtcctcctggcactggagtacttgcacacgctcggtatcatataccgcgatctcaagcctgaaaatgtccttgtccgggaggacgggcacatcatgctctcggacttcgacctctctcttcgttgtgctgtcagtccaacactgatcaggtcctcaaaccctgacgcagaactgcagaagcgctcaggaagagcagccaaggctactgtgttgagccagcctgtgttgagccgtcctgcatcactcaaccgtcgtgtgcagccccaaccacctgcttcggcccacgcctgttctcctccaagtccaagaccaagagagaccggtaaccaaaaccagaagttgccaccccgatcagcccttggcctgagctcatagcggagcccagcgatgcacggtcgatgtcgtttgtgtgctatattgtttttccgttggtagatttttttgaggggtacttttacactttcttaaagttcacatctgtaattcagcaagtcctgattgtactgatctcctgcaatgcctttgcaaaacattgtcattttttttgtattccatcagttccaaattggaagtcgttttagtttgttccaagtcaaaacatgtcttactttaaccaactttgtaaaaaaaaatccaaattggaagtcgttttagtttgttccaagtcaaaacatgtggtcatgcatctaaccatcatggttttagtcttcgagttaaatttgggtacctattttaacgaaaaacggcatagtttttttttgtaatatcaactaaatgtactaacaacaaatatatttcatagtgtaccaagtaaatcttgttttttgtttcagacacttgtgtgtt

SEQ ID NO: 218357 - DNA, 2476 bp, Zea Mays
gacatcgtagcgtaggagcaaaaaaaaaaaaaaaaaaaaaaaaaaaacggcaaacgacgcgcgcgccgcctcttcgtaacaccactctgccgccccctcgctcgttcgatcgccctgtgagcttatccgacgccgtggtcacttgagccccgatggagtttgccgccggcgctgcggtggccccgcgcccgatgcccgccgggcccggccgaaaccgccgggtgggcggtggagcgatcggcatcggttgggcccgccgcgcgaccgcgccggggctctcgctggctcccgccgtcgcgagacgggcggcctccgcgtcgggaggaggccacgggcgcgtcgtcgttcgctcaaccggcggcggctgtctgtggttccgcggcgagggcgccgacggtgatcgatcatccctggcgcgcgcgtctccgtcggatggcgcggctcctgcgcgttcagttcgggaacagactataggaattaagaaggagctcttcaatctggccgttccagccatagttgggcaagcgatcgaccccgtggcgcagttactggaaaccgcatatgttggccgcttaggtcctgtggagctggcttcagcagccgtcggtatgtcagtattcaacattatatcaaagctcttcaaacatacccctcctaagtatcacaacatcatttgtggctgaagatgtgtcaaaacatgactcttcacagtatgcttcggctgcaattggtgtcattgaagccttggctttgattttggggtctggaatactcctcaacattatgggtgtctcacatgcatcagctatgcacaatccagcaaggctatttctttctgtaagagcacttggtgctcctgctgttgttgtttcattggctatccaaggtgtgtttcgtggactcaaagatacaaaaacacctctactttatagtggtttgggtaacatctcagctgtggttctgcttccttttttcgtgtattccttgaaccttggattgactggagctgcacttgcaactattgcttcacaatatattggtatgtttctgcttctttggtctttaagcaagagagcagttctattaccaccaaaaatgaaagacctagagtttgttgggtacataaaatccggtggcatgctgttagggagaaccctttcagttctgataacaatgactctcgggactgcaatggctgctcggcaaggcacagtagcgatggccgctcatcaaatatgtctgcaagtttggctggctgtatcattactttcggatgcattggctgtttctgcccaggcactgattgcaagttcatttgccaaacttgactacgaaaaagtggaggaggtcacattctatgtattaaaggcaggagtgttcgttggtatcgctttagcacttcttctgtttgtctcttttggtagacttgcagaaatattctccaaagaccccatggttatacaaattgtgaggagtggtgttttgttcgttagtgctagccagcctatcaatgccctcgcttttatctttgacggactccattttggtgtctcagacttctcgtactcagcttcctccatgatggtagttggagcaatatcctctttgtttttgctgtgtgctccacgatttttcgggcttcttggtgtttgggctggcctggctcttttcatgagtttgcgcatgactgctggatttatgagattgggatggagagcagggccttggtggtttttgcacagaaaagaacccaaatacaggctgcaatgaacaaaatgtggatctatggagccgaataaccaaatggcgagattaggatggaggatacaagttatgaaggcacactacaatggcgaaacatactttcatgttgactcccgtgtatgttttaaccagttcggttattctaattccatgtgtggtttggaatgtattttgacttgttatggatttcaaccaacttaggttttgttcggttaatcccgttacctatggattggatgagattggaaaaaaataagaagtttgacttacttgggatttaaactcatccaatcccacttaatccacatggattgagagctaaccgaacaaactctcaatatcagtcaatccacatagattaacggtgaaacgaacaagcccttaggtggttttagaacttggaatttgagagtaaagctacattggacaaattttcgcttgtatgtgtcacataggcgatgattgttcagtatctctatcctctctgtcaaactctagattgaatattgcagatttatttagacatatctgatgggttcaaactttacggttcaaacactcatacaccagattgattttagttgcagtttttacataacgaatgatagttcattatctctcctgcctcaagttattactgtttgcggaacatcatatgtgtcgtttggtttacgaaatgtaacgtaaaatgataataataataataatttac

SEQ ID NO: 218358 - DNA, 2622 bp, Zea Mays
gtgatcttccttgagttgtaccagccctcgaggtgagcatccctcccccggcgccgcgccctcggctttgtagcagccagccgtcatggcgccgccggccagcaccgacgagaccgcacgccacaagaaggccaggaaatccaagatcgatatagaagagaagaagcacaagaaaacaaataaggcgcgcgccgccgcagaggacgccccgatacccgacgccgccgagcgcaagaagcgtaagcacaaggacgggcgcgaggagaagcgggacggccagaagtccaagaaggagcgcaagtccgagggaaagggagaggaagccgaggcggccgtggggagggacgagaagatgaggcgtgcgatggaggacgagcggttcgcggcggcgcggactgacccgcggttccggccgatgcggaggaaggaatccaaggtggcgctggactcgaggttcagcagcatgatgacggacccgaggttcgcctcgtcggcggcgcccgtggacaagcgcgggaggcgccgcaagaaacgcgagaaccccatgctgcattactatctcaaccaagaggacttggaggatgatgggaaggggaaggaaaaggggaagaaggagaaaccagtgcttgttcaagaagaggaggaagatgaagaggaactagaggaacaggaggaagaagagagctctagcagcgatgacgacgaagatgaagatttggatgacgacgacgaagaggcagttgacctgtatatggtgatgacttcttgcctcccaaagggtgggcgagttttgtcggtctcaatctatccatcagaatttggactgaagtgcatggaaattgagtcaacacagggcccagctgctctggtcaatgccaatgttgataaaaaagacagtgatgaagatgaggatgacacggatgatgatgaagagagcactgatgatgatgttgatgaagaagaagaggaagttgactctgataaagagaataacaaactgcgtgcttacgagctaaacagattgaggtattactatgcagttgtggtgtgtgattccagcgcaacagcaaatcacctgtacatgactcttgatgggactgagttcttgaaaacagcaaatgtgtttgatttgcagttcattcctgactctagggagttcaaacatcctgctcgagacgccgctacagaggcacctccgagttacaaggaacctgattttgagactcgtgctttgcaacatagcagagttaagctcacctgggatgatgatgaacctgaacgtaagaaagtcttgaggcgaaagttcaatgatgatcagctagatgagcttaacatgtatttagcaagtgatgacagcgcgtcagataatgaaggtgtagacgattctgaggatgaatctctgccaaatgggggatccaaacggaagctaacaaaagaggagaggttggctcttctgctgcaaggagacaaatctgatgaggagcaaactgatgaccaggatatggagattacattcaacacggagcttgaggatcttagtaaacggatcctagagagaaagaacaatgaggagaagaccatctgggagaagcaccaagagaaaatgaaagagaaaaggaagggtaggaagaggggactaaaggacgaagatgatgataaccactacatcagcgatgatgagcctgagaatgatgatgatttctttgcagatgaacagtctgatgaagaacctaagccgagcaaaagcaagaaacacaaggcaaaggcaaaaggcgaagcaaagaggaaaggaaatgatgggaccacagatgagcatttggaacaagaagcaaccaaagatgagttggagctcttggttgctggtgaccaggatactgccaatggtgcaaagggttataacttgaagcgtaaaaagggcaagaagggcaaagaggaatctgctgatgacaaacttcctgacattgaccttagcaaggatgagaggttctcagcaatgtttacttcccacttgttcgcattggatccaactgatccccagtacaagaggagtgccgccttcatgcgaaagcaagctgggaagccaggggtacatgggggcaaatcaagcagagaacctccgctggagggttcgtctctgggaggtacagtaccacctgacgatgctgttactaacaatgatggtcagaaacctgatggttcagccacagagaagctgcaaattttgtctgctgttaagtctctcaagagaaaccttggtgcattcaaaaactcaaagacaggtgaccgataaaaagagcatcatttttgttccggctattacacttaatcagtgaaatccctttgttggaaaatggtctcagttatatagtcttcgagatagtttcatggttatgtatgcttatctctgattctgtagacacgcgtccaatctttggattttcagttttgacactatccagattccagaatccaatagaacgattctgttcatttctagtgagataattggtttaatttatcaatttagtcacagcgcatttgaatatctggccttgttgatgtaatctctatgcgggatactagcaagaggttgagactcgtagaaagtttattaggctgtgc

SEQ ID NO: 218359 - DNA, 2530 bp, Zea Mays
atgccccaccaggcaccaggttgctgggtttgggcctcacggtccagcagatgccagccagttgccacgcgtttcatcagcccgacccaaccaaagccagaagacacggtgccgtcagctgtgctcccggcgctcccgcaccacaagcaagcgcgtgcgcgccgtcaagtcgcctctacagcaacttccaccgcgtactccctccctccctcgtctcgtcttcgtctccaggtttcgcgggggccaaggtttctgccggagcagtcgcggtctgcgctgcggcacggcgacgaggtggggatggagtaccgcgacaagctcgtgctggcgcccatggtccgcgtgggcaccttgccatttaggctactggctgctgaatatggtgctgatattacttatggagaagaaattattgatcacaaattcttgaagtaatctcttgggactactgattttgtggagaaagggactgacagtgtagttttccgtacatgcccacaagaaaggggcagggttgtattccaaatgggcacatcaaatgctgtgagggcacttaaagctgctcagatcgtgtgccgtgatgtttctgctatagatatcaacatgggttgtccaaagtctttttcacttagtggagggatgggtgctgcattactctccaaacctgagcttatacacgatgtacttttcttaattgtttctttttgccttttgtataccatatatccattgctcttactagtatacactatagattctgacaacactgcggaggaacttggacacaactgtgacatgtaaaatccgtcttctgaacacacctaaagacactgtggagttggcacgccggattgagaaaactggtgttcctgctcttgctgtccatggaagaaagattaaagatagaccgagagatcttgccaagtgggatgagatagctgatgttgtgtcagcgctgtcaattccagttatagctaatggagatgtctttgagtatgaggattttaagagaattaaagatgcaacaggtgccgcgtctgttatggttgctagaggtgctatgtggaatgcctccatcttttgtgccaaaggaaaaacaccttgggaggatgtcaaaagagagtatgtaagaaagagcatattgtgggacaacgatgtgaagagcacgaaacataccttgaaagaaatgataatgcactattcttgccttgaacttcctgaggggaaaggcgttataaagtgtgatacatctgaagatttagcgagactatacggggaagaggactactataattttgttgttgcaaataggaaatgaatacaatttgatgttgtgagctctcatgtgtaccagcaaaaccggtgaaacttgcctggaacttgaagaaagatgttcacttgcatgattaaattgcaaatcagaggtacccatggccacaatgtaatttcgaaaggttttttcatcataataaaaaattgcaataattcagtgatcaatgggtaatggagcagaactctcaacttcatgattgattattcgcttcgattaaagccagctgtttggactgctgtagctgcaatccatagagataaaacactgtagaagcaatagaagcctacggattaaagtcaagcaaacaggctagacctctctctttctctgaaaaatgtactaccaagaacctgcatatctacatacaatgacacctctcctcacctgcccgtgacgctgagctgccttcgccccccccccccctcccccttcgccgccgctgcctagatgtttcatttcatctttgtgcgtgtgaggcacacggcacgataaggacgaatgttgggtggggctgctccctctttcaatggaatgacatggtcaatatcacgttgaggagggacttttgtgtactcctgacagaattcagagtattgttgcagtaaggcttgaatagccagacgaagagtgtggtgcctgcagagacaagctgttgagatgcagaatgaaactagaaatgcctttgttgagaagcttgttcattatccttttcagttgttcagtgtacgcatcctgagatgtacaatcctttaatgagaggagagtatcatcttctaaggagtcaagggtgttgttcaaggcatgttcctgaatagagaatgcagtgcctgttatgattgccccagatcttctgcttggattcctatctcaccctttattgatgggattaggaggaattcctgccaccaaggacaacgggatttgccattttggcgctgtctggacttaacactgaagctgctgatctttctcttgtactggtaatagttaggtttatacctgaaattaatcaaacaccatttttttgtaacaaatactaatttatttgctttctatactatggaaattttgtcatgtattgttggtggaaatactattgcgcttttgaaggaattgaaagactttgatatgttgactactattatggccctatggtctaagaaatattaaatgttttcatgatatgaccttgattgg

SEQ ID NO: 218360 - DNA, 1784 bp, Zea Mays
atgccccaccaggcaccaggttgctgggtttgggcctcacggtccagcagatgccagccagttgccacgcgtttcatcagcccgacccaaccaaagccagaagacacggtgccgtcagctgtgctcccggcgctcccgcaccacaagcaagcgcgtgcgcgccgtcaagtcgcctctacagcaacttccaccgcgtactccctccctccctcgtctcgtcttcgtctccaggtttcgcgggggccaaggtttctgccggagcagtcgcggtctgcgctgcggcacggcgacgaggtggggatggagtaccgcgacaagctcgtgctggcgcccatggtccgcgtgggcaccttgccatttaggctactggctgctgaatatggtgctgatattacttatggagaagaaattattgatcacaaattcttgaagtgtgagcgtgttacaaatgaatctcttgggactactgattttgtggagaaagggactgacagtgtagttttccgtacatgcccacaagaaaggggcagggttgtattccaaatgggcacatcaaatgctgtgagggcacttaaagctgctcagatcgtgtgccgtgatgtttctgctatagatatcaacatgggttgtccaaagtctttttcacttagtggagggatgggtgctgcattactctccaaacctgagcttatacacgatattctgacaacactgcggaggaacttggacacaactgtgacatgtaaaatccgtcttctgaacacacctaaagacactgtggagttggcacgccggattgagaaaactggtgttcctgctcttgctgtccatggaagaaagattaaagatagaccgagagatcttgccaagtgggatgagatagctgatgttgtgtcagcgctgtcaattccagttatagctaatggagatgtctttgagtatgaggattttaagagaattaaagatgcaacaggtgccgcgtctgttatggttgctagaggtgctatgtggaatgcctccatcttttgtgccaaaggaaaaacaccttgggaggatgtcaaaagagagtatgtaagaaagagcatattgtgggacaacgatgtgaagagcacgaaacataccttgaaagaaatgataatgcactattcttgccttgaacttcctgaggggaaaggcgttataaagtgtgatacatctgaagatttagcgagactatacggggaagaggactactataattttgttgttgcaaataggaaatgaatacaatttgatgttgtgagctctcatgtgtaccagaattcagagtattgttgcagtaaggcttgaatagccagacgaagagtgtggtgcctgcagagacaagctgttgagatgcagaatgaaactagaaatgcctttgttgagaagcttgttcattatccttttcagttgttcagtgtacgcatcctgagatgtacaatcctttaatgagaggagagtatcatcttctaaggagtcaagggtgttgttcaaggcatgttcctgaatagagaatgcagtgcctgttatgattgccccagatcttctgcttggattcctatctcaccctttattgatgggattaggaggaattcctgccaccaaggacaacgggatttgccattttggcgctgtctggacttaacactgaagctgctgatctttctcttgtactggaattgaaagactttgatatgttgactactattatggccctatggtctaagaaatattaaatgttttcatgatatgaccttgattgg

SEQ ID NO: 218361 - DNA, 2792 bp, Zea Mays
atgccccaccaggcaccaggttgctgggtttgggcctcacggtccagcagatgccagccagttgccacgcgtttcatcagcccgacccaaccaaagccagaagacacggtgccgtcagctgtgctcccggcgctcccgcaccacaagcaagcgcgtgcgcgccgtcaagtcgcctctacagcaacttccaccgcgtactccctccctccctcgtctcgtcttcgtctccaggtttcgcgggggccaaggtttctgccggagcagtcgcggtctgcgctgcggcacggcgacgaggtggggatggagtaccgcgacaagctcgtgctggcgcccatggtccgcgtgggcaccttgccatttaggctactggctgctgaatatggtgctgatattacttatggagaagaaattattgatcacaaattcttgaagtgtgagcgtgttacaaatgaatctcttgggactactgattttgtggagaaagggactgacagtgtagttttccgtacatgcccacaagaaaggggcagggttgtattccaaatgggcacatcaaatgctgtgagggcacttaaagctgctcagatcgtgccgtgatgtttctgctatagatatcaacatgggttgtccaaagtctttttcacttagtggagggatgggtgctgcattactctccaaacctgagcttatacacgatattctgacaacactgcggaggaacttggacacaactgtgacatgtaaaatccgtcttctgaacacacctaaagacactgtggagttggcacgccggattgagaaaactggtgttcctgctcttgctgtccatggaagaaagattaaagatagaccgagagatcttgccaagtgggatgagatagctgatgttgtgtcagcgctgtcaattccagttatagctaatggagatgtctttgagtatgaggattttaagagaattaaagatgcaacaggtgccgcgtctgttatggttgctagaggtgctatgtggaatgcctccatcttttgtgccaaaggaaaaacaccttgggaggatgtcaaaagagagtatgtaagaaagagcatattgtgggacaacgatgtgaagagcacgaaacataccttgaaagaaatgataatgcactattcttgccttgaacttcctgaggggaaaggcgttataaagtgtgatacatctgaagatttagcgagactatacggggaagaggactactataattttgttgttgcaaataggaaatgaatacaatttgatgttgtgagctctcatgtgtaccaggtatctatttccgaatacattgggtctagagctagtgaaaaaggaaataatattatgtgaaactgatgaagttgatagtttcatgtagtctacatgcggtactttttccttgcaaataacaattacttgcaaaataagcatgtttgttgacatgggtttcaaaactaaaattggttccagttccttggccaggtagccactcttaataggggcttgcatgctggtagtctgtaaactagcgattagagtttgtaaatgtatgatactgatcaagaagtcaagaactggctaaactaaatggtattttacctggacccagcaaaaccggtgaaacttgcctggaacttgaagaaagatgttcacttgcatgattaaattgcaaatcagaggtacccatggccacaatgtaatttcgaaaggttttttcatcataataaaaaattgcaataattcagtgatcaatgggtaatggagcagaactctcaacttcatgattgattattcgcttcgattaaagccagctgtttggactgctgtagctgcaatccatagagataaaacactgtagaagcaatagaagcctacggattaaagtcaagcaaacaggctagacctctctctttctctgaaaaatgtactaccaagaacctgcatatctacatacaatgacacctctcctcacctgcccgtgacgctgagctgccttcgccccccccccccctcccccttcgccgccgctgcctagatgtttcatttcatctttgtgcgtgtgaggcacacggcacgataaggacgaatgttgggtggggctgctccctctttcaatggaatgacatggtcaatatcacgttgaggagggacttttgtgtactcctgacagaattcagagtattgttgcagtaaggcttgaatagccagacgaagagtgtggtgcctgcagagacaagctgttgagatgcagaatgaaactagaaatgcctttgttgagaagcttgttcattatccttttcagttgttcagtgtacgcatcctgagatgtacaatcctttaatgagaggagagtatcatcttctaaggagtcaagggtgttgttcaaggcatgttcctgaatagagaatgcagtgcctgttatgattgccccagatcttctgcttggattcctatctcaccctttattgatgggattaggaggaattcctgccaccaaggacaacgggatttgccattttggcgctgtctggacttaacactgaagctgctgatctttctcttgtactggtaatagttaggtttatacctgaaattaatcaaacaccatttttttgtaacaaatactaatttatttgctttctatactatggaaattttgtcatgtattgttggtggaaatactattgcgcttttgaaggaattgaaagactttgatatgttgactactattatggccctatggtctaagaaatattaaatgttttcatgatatgaccttgattgg

SEQ ID NO: 218362 - DNA, 2776 bp, Zea Mays
atgccccaccaggcaccaggttgctgggtttgggcctcacggtccagcagatgccagccagttgccacgcgtttcatcagcccgacccaaccaaagccagaagacacggtgccgtcagctgtgctcccggcgctcccgcaccacaagcaagcgcgtgcgcgccgtcaagtcgcctctacagcaacttccaccgcgtactccctccctccctcgtctcgtcttcgtctccaggtttcgcgggggccaaggtttctgccggagcagtcgcggtctgcgctgcggcacggcgacgaggtggggatggagtaccgcgacaagctcgtgctggcgcccatggtccgcgtgggcaccttgccatttaggctactggctgctgaatatggtgctgatattacttatggagaagaaattattgatcacaaattcttgaagtaatctcttgggactactgattttgtggagaaagggactgacagtgtagttttccgtacatgcccacaagaaaggggcagggttgtattccaaatgggcacatcaaatgctgtgagggcacttaaagctgctcagatcgtgtgccgtgatgtttctgctatagatatcaacatgggttgtccaaagtctttttcacttagtggagggatgggtgctgcattactctccaaacctgagcttatacacgatattctgacaacactgcggaggaacttggacacaactgtgacatgtaaaatccgtcttctgaacacacctaaagacactgtggagttggcacgccggattgagaaaactggtgttcctgctcttgctgtccatggaagaaagattaaagatagaccgagagatcttgccaagtgggatgagatagctgatgttgtgtcagcgctgtcaattccagttatagctaatggagatgtctttgagtatgaggattttaagagaattaaagatgcaacaggtgccgcgtctgttatggttgctagaggtgctatgtggaatgcctccatcttttgtgccaaaggaaaaacaccttgggaggatgtcaaaagagagtatgtaagaaagagcatattgtgggacaacgatgtgaagagcacgaaacataccttgaaagaaatgataatgcactattcttgccttgaacttcctgaggggaaaggcgttataaagtgtgatacatctgaagatttagcgagactatacggggaagaggactactataattttgttgttgcaaataggaaatgaatacaatttgatgttgtgagctctcatgtgtaccaggtatctatttccgaatacattgggtctagagctagtgaaaaaggaaataatattatgtgaaactgatgaagttgatagtttcatgtagtctacatgcggtactttttccttgcaaataacaattacttgcaaaataagcatgtttgttgacatgggtttcaaaactaaaattggttccagttccttggccaggtagccactcttaataggggcttgcatgctggtagtctgtaaactagcgattagagtttgtaaatgtatgatactgatcaagaagtcaagaactggctaaactaaatggtattttacctggacccagcaaaaccggtgaaacttgcctggaacttgaagaaagatgttcacttgcatgattaaattgcaaatcagaggtacccatggccacaatgtaatttcgaaaggttttttcatcataataaaaaattgcaataattcagtgatcaatgggtaatggagcagaactctcaacttcatgattgattattcgcttcgattaaagccagctgtttggactgctgtagctgcaatccatagagataaaacactgtagaagcaatagaagcctacggattaaagtcaagcaaacaggctagacctctctctttctctgaaaaatgtactaccaagaacctgcatatctacatacaatgacacctctcctcacctgcccgtgacgctgagctgccttcgccccccccccccctcccccttcgccgccgctgcctagatgtttcatttcatctttgtgcgtgtgaggcacacggcacgataaggacgaatgttgggtggggctgctccctctttcaatggaatgacatggtcaatatcacgttgaggagggacttttgtgtactcctgacagaattcagagtattgttgcagtaaggcttgaatagccagacgaagagtgtggtgcctgcagagacaagctgttgagatgcagaatgaaactagaaatgcctttgttgagaagcttgttcattatccttttcagttgttcagtgtacgcatcctgagatgtacaatcctttaatgagaggagagtatcatcttctaaggagtcaagggtgttgttcaaggcatgttcctgaatagagaatgcagtgcctgttatgattgccccagatcttctgcttggattcctatctcaccctttattgatgggattaggaggaattcctgccaccaaggacaacgggatttgccattttggcgctgtctggacttaacactgaagctgctgatctttctcttgtactggtaatagttaggtttatacctgaaattaatcaaacaccatttttttgtaacaaatactaatttatttgctttctatactatggaaattttgtcatgtattgttggtggaaatactattgcgcttttgaaggaattgaaagactttgatatgttgactactattatggccctatggtctaagaaatattaaatgttttcatgatatgaccttgattgg

SEQ ID NO: 218363 - DNA, 2473 bp, Zea Mays
atgccccaccaggcaccaggttgctgggtttgggcctcacggtccagcagatgccagccagttgccacgcgtttcatcagcccgacccaaccaaagccagaagacacggtgccgtcagctgtgctcccggcgctcccgcaccacaagcaagcgcgtgcgcgccgtcaagtcgcctctacagcaacttccaccgcgtactccctccctccctcgtctcgtcttcgtctccaggtttcgcgggggccaaggtttctgccggagcagtcgcggtctgcgctgcggcacggcgacgaggtggggatggagtaccgcgacaagctcgtgctggcgcccatggtccgcgtgggcaccttgccatttaggctactggctgctgaatatggtgctgatattacttatggagaagaaattattgatcacaaattcttgaagtgtgagcgtgttacaaatgaatctcttgggactactgattttgtggagaaagggactgacagtgtagttttccgtacatgcccacaagaaaggggcagggttgtattccaaatgggcacatcaaatgctgtgagggcacttaaagctgctcagatcgtgccgtgatgtttctgctatagatatcaacatgggttgtccaaagtctttttcacttagtggagggatgggtgctgcattactctccaaacctgagcttatacacgatattctgacaacactgcggaggaacttggacacaactgtgacatgtaaaatccgtcttctgaacacacctaaagacactgtggagttggcacgccggattgagaaaactggtgttcctgctcttgctgtccatggaagaaagattaaagatagaccgagagatcttgccaagtgggatgagatagctgatgttgtgtcagcgctgtcaattccagttatagctaatggagatgtctttgagtatgaggattttaagagaattaaagatgcaacaggtgccgcgtctgttatggttgctagaggtgctatgtggaatgcctccatcttttgtgccaaaggaaaaacaccttgggaggatgtcaaaagagagtatgtaagaaagagcatattgtgggacaacgatgtgaagagcacgaaacataccttgaaagaaatgataatgcactattcttgccttgaacttcctgaggggaaaggcgttataaagtgtgatacatctgaagatttagcgagactatacggggaagaggactactataattttgttgttgcaaataggaaatgaatacaatttgatgttgtgagctctcatgtgtaccagcaaaaccggtgaaacttgcctggaacttgaagaaagatgttcacttgcatgattaaattgcaaatcagaggtacccatggccacaatgtaatttcgaaaggttttttcatcataataaaaaattgcaataattcagtgatcaatgggtaatggagcagaactctcaacttcatgattgattattcgcttcgattaaagccagctgtttggactgctgtagctgcaatccatagagataaaacactgtagaagcaatagaagcctacggattaaagtcaagcaaacaggctagacctctctctttctctgaaaaatgtactaccaagaacctgcatatctacatacaatgacacctctcctcacctgcccgtgacgctgagctgccttcgccccccccccccctcccccttcgccgccgctgcctagatgtttcatttcatctttgtgcgtgtgaggcacacggcacgataaggacgaatgttgggtggggctgctccctctttcaatggaatgacatggtcaatatcacgttgaggagggacttttgtgtactcctgacagaattcagagtattgttgcagtaaggcttgaatagccagacgaagagtgtggtgcctgcagagacaagctgttgagatgcagaatgaaactagaaatgcctttgttgagaagcttgttcattatccttttcagttgttcagtgtacgcatcctgagatgtacaatcctttaatgagaggagagtatcatcttctaaggagtcaagggtgttgttcaaggcatgttcctgaatagagaatgcagtgcctgttatgattgccccagatcttctgcttggattcctatctcaccctttattgatgggattaggaggaattcctgccaccaaggacaacgggatttgccattttggcgctgtctggacttaacactgaagctgctgatctttctcttgtactggtaatagttaggtttatacctgaaattaatcaaacaccatttttttgtaacaaatactaatttatttgctttctatactatggaaattttgtcatgtattgttggtggaaatactattgcgcttttgaaggaattgaaagactttgatatgttgactactattatggccctatggtctaagaaatattaaatgttttcatgatatgaccttgattgg

SEQ ID NO: 218364 - DNA, 2995 bp, Zea Mays
atgccccaccaggcaccaggttgctgggtttgggcctcacggtccagcagatgccagccagttgccacgcgtttcatcagcccgacccaaccaaagccagaagacacggtgccgtcagctgtgctcccggcgctcccgcaccacaagcaagcgcgtgcgcgccgtcaagtcgcctctacagcaacttccaccgcgtactccctccctccctcgtctcgtcttcgtctccaggtttcgcgggggccaaggtttctgccggagcagtcgcggtctgcgctgcggcacggcgacgaggtggggatggagtaccgcgacaagctcgtgctggcgcccatggtccgcgtgggcaccttgccatttaggctactggctgctgaatatggtgctgatattacttatggagaagaaattattgatcacaaattcttgaagtgtgagcgtgttacaaatgaatctcttgggactactgattttgtggagaaagggactgacagtgtagttttccgtacatgcccacaagaaaggggcagggttgtattccaaatgggcacatcaaatgctgtgagggcacttaaagctgctcagatcgtgtgccgtgatgtttctgctatagatatcaacatgggttgtccaaagtctttttcacttagtggagggatgggtgctgcattactctccaaacctgagcttatacacgatattctgacaacactgcggaggaacttggacacaactgtgacatgtaaaatccgtcttctgaacacacctaaagacactgtggagttggcacgccggattgagaaaactggtgttcctgctcttgctgtccatggaagaaagattaaagatagaccgagagatcttgccaagtgggatgagatagctgatgttgtgtcagcgctgtcaattccagttatagctaatggagatgtctttgagtatgaggattttaagagaattaaagatgcaacaggtttttgtttatttatactgtcatttcatagtttgctctgtttaatttgagttttcacctctatcagttagcaatcttgaaactgctttttaatatgcatctattcggactgctagaaaacttcaactgtttcttgaacgttgtatgccattaaacagaaaaaaggagctatcacatcattttttttaatgatgaacgcatataaaaatggtttctgaagaaatgactctgagatactttcatccttgctacgtgtttcctaacatgaattggtagatagagcttcgcctgttattttcaattgtagttgatatatccctataactgttaggtgccgcgtctgttatggttgctagaggtgctatgtggaatgcctccatcttttgtgccaaaggaaaaacaccttgggaggatgtcaaaagagagtatgtaagaaagagcatattgtgggacaacgatgtgaagagcacgaaacataccttgaaagaaatgataatgcactattcttgccttgaacttcctgaggggaaaggcgttataaagtgtgatacatctgaagatttagcgagactatacggggaagaggactactataattttgttgttgcaaataggaaatgaatacaatttgatgttgtgagctctcatgtgtaccaggtatctatttccgaatacattgggtctagagctagtgaaaaaggaaataatattatgtgaaactgatgaagttgatagtttcatgtagtctacatgcggtactttttccttgcaaataacaattacttgcaaaataagcatgtttgttgacatgggtttcaaaactaaaattggttccagttccttggccaggtagccactcttaataggggcttgcatgctggtagtctgtaaactagcgattagagtttgtaaatgtatgatactgatcaagaagtcaagaactggctaaactaaatggtattttacctggacccagcaaaaccggtgaaacttgcctggaacttgaagaaagatgttcacttgcatgattaaattgcaaatcagaggtacccatggccacaatgtaatttcgaaaggttttttcatcataataaaaaattgcaataattcagtgatcaatgggtaatggagcagaactctcaacttcatgattgattattcgcttcgattaaagccagctgtttggactgctgtagctgcaatccatagagataaaacactgtagaagcaatagaagcctacggattaaagtcaagcaaacaggctagacctctctctttctctgaaaaatgtactaccaagaacctgcatatctacatacaatgacacctctcctcacctgcccgtgacgctgagctgccttcgccccccccccccctcccccttcgccgccgctgcctagatgtttcatttcatctttgtgcgtgtgaggcacacggcacgataaggacgaatgttgggtggggctgctccctctttcaatggaatgacatggtcaatatcacgttgaggagggacttttgtgtactcctgacagaattcagagtattgttgcagtaaggcttgaatagccagacgaagagtgtggtgcctgcagagacaagctgttgagatgcagaatgaaactagaaatgcctttgttgagaagcttgttcattatccttttcagttgttcagtgtacgcatcctgagatgtacaatcctttaatgagaggagagtatcatcttctaaggagtcaagggtgttgttcaaggcatgttcctgaatagagaatgcagtgcctgttatgattgccccagatcttctgcttggattcctatctcaccctttattgatgggattaggaggaattcctgccaccaaggacaacgggatttgccattttggcgctgtctggacttaacactgaagctgctgatctttctcttgtactggaattgaaagactttgatatgttgactactattatggccctatggtctaagaaatattaaatgttttcatgatatgaccttgattgg

SEQ ID NO: 218365 - DNA, 2475 bp, Zea Mays
atgccccaccaggcaccaggttgctgggtttgggcctcacggtccagcagatgccagccagttgccacgcgtttcatcagcccgacccaaccaaagccagaagacacggtgccgtcagctgtgctcccggcgctcccgcaccacaagcaagcgcgtgcgcgccgtcaagtcgcctctacagcaacttccaccgcgtactccctccctccctcgtctcgtcttcgtctccaggtttcgcgggggccaaggtttctgccggagcagtcgcggtctgcgctgcggcacggcgacgaggtggggatggagtaccgcgacaagctcgtgctggcgcccatggtccgcgtgggcaccttgccatttaggctactggctgctgaatatggtgctgatattacttatggagaagaaattattgatcacaaattcttgaagtgtgagcgtgttacaaatgaatctcttgggactactgattttgtggagaaagggactgacagtgtagttttccgtacatgcccacaagaaaggggcagggttgtattccaaatgggcacatcaaatgctgtgagggcacttaaagctgctcagatcgtgtgccgtgatgtttctgctatagatatcaacatgggttgtccaaagtctttttcacttagtggagggatgggtgctgcattactctccaaacctgagcttatacacgatattctgacaacactgcggaggaacttggacacaactgtgacatgtaaaatccgtcttctgaacacacctaaagacactgtggagttggcacgccggattgagaaaactggtgttcctgctcttgctgtccatggaagaaagattaaagatagaccgagagatcttgccaagtgggatgagatagctgatgttgtgtcagcgctgtcaattccagttatagctaatggagatgtctttgagtatgaggattttaagagaattaaagatgcaacaggtgccgcgtctgttatggttgctagaggtgctatgtggaatgcctccatcttttgtgccaaaggaaaaacaccttgggaggatgtcaaaagagagtatgtaagaaagagcatattgtgggacaacgatgtgaagagcacgaaacataccttgaaagaaatgataatgcactattcttgccttgaacttcctgaggggaaaggcgttataaagtgtgatacatctgaagatttagcgagactatacggggaagaggactactataattttgttgttgcaaataggaaatgaatacaatttgatgttgtgagctctcatgtgtaccagcaaaaccggtgaaacttgcctggaacttgaagaaagatgttcacttgcatgattaaattgcaaatcagaggtacccatggccacaatgtaatttcgaaaggttttttcatcataataaaaaattgcaataattcagtgatcaatgggtaatggagcagaactctcaacttcatgattgattattcgcttcgattaaagccagctgtttggactgctgtagctgcaatccatagagataaaacactgtagaagcaatagaagcctacggattaaagtcaagcaaacaggctagacctctctctttctctgaaaaatgtactaccaagaacctgcatatctacatacaatgacacctctcctcacctgcccgtgacgctgagctgccttcgccccccccccccctcccccttcgccgccgctgcctagatgtttcatttcatctttgtgcgtgtgaggcacacggcacgataaggacgaatgttgggtggggctgctccctctttcaatggaatgacatggtcaatatcacgttgaggagggacttttgtgtactcctgacagaattcagagtattgttgcagtaaggcttgaatagccagacgaagagtgtggtgcctgcagagacaagctgttgagatgcagaatgaaactagaaatgcctttgttgagaagcttgttcattatccttttcagttgttcagtgtacgcatcctgagatgtacaatcctttaatgagaggagagtatcatcttctaaggagtcaagggtgttgttcaaggcatgttcctgaatagagaatgcagtgcctgttatgattgccccagatcttctgcttggattcctatctcaccctttattgatgggattaggaggaattcctgccaccaaggacaacgggatttgccattttggcgctgtctggacttaacactgaagctgctgatctttctcttgtactggtaatagttaggtttatacctgaaattaatcaaacaccatttttttgtaacaaatactaatttatttgctttctatactatggaaattttgtcatgtattgttggtggaaatactattgcgcttttgaaggaattgaaagactttgatatgttgactactattatggccctatggtctaagaaatattaaatgttttcatgatatgaccttgattgg

SEQ ID NO: 218366 - DNA, 1894 bp, Zea Mays
atgccccaccaggcaccaggttgctgggtttgggcctcacggtccagcagatgccagccagttgccacgcgtttcatcagcccgacccaaccaaagccagaagacacggtgccgtcagctgtgctcccggcgctcccgcaccacaagcaagcgcgtgcgcgccgtcaagtcgcctctacagcaacttccaccgcgtactccctccctccctcgtctcgtcttcgtctccaggtttcgcgggggccaaggtttctgccggagcagtcgcggtctgcgctgcggcacggcgacgaggtggggatggagtaccgcgacaagctcgtgctggcgcccatggtccgcgtgggcaccttgccatttaggctactggctgctgaatatggtgctgatattacttatggagaagaaattattgatcacaaattcttgaagtgtgagcgtgttacaaatgaatctcttgggactactgattttgtggagaaagggactgacagtgtagttttccgtacatgcccacaagaaaggggcagggttgtattccaaatgggcacatcaaatgctgtgagggcacttaaagctgctcagatcgtgtgccgtgatgtttctgctatagatatcaacatgggttgtccaaagtctttttcacttagtggagggatgggtgctgcattactctccaaacctgagcttatacacgatattctgacaacactgcggaggaacttggacacaactgtgacatgtaaaatccgtcttctgaacacacctaaagacactgtggagttggcacgccggattgagaaaactggtgttcctgctcttgctgtccatggaagaaagattaaagatagaccgagagatcttgccaagtgggatgagatagctgatgttgtgtcagcgctgtcaattccagttatagctaatggagatgtctttgagtatgaggattttaagagaattaaagatgcaacaggtgccgcgtctgttatggttgctagaggtgctatgtggaatgcctccatcttttgtgccaaaggaaaaacaccttgggaggatgtcaaaagagagtatgtaagaaagagcatattgtgggacaacgatgtgaagagcacgaaacataccttgaaagaaatgataatgcactattcttgccttgaacttcctgaggggaaaggcgttataaagtgtgatacatctgaagatttagcgagactatacggggaagaggactactataattttgttgttgcaaataggaaatgaatacaatttgatgttgtgagctctcatgtgtaccagtaaggcttgaatagccagacgaagagtgtggtgcctgcagagacaagctgttgagatgcagaatgaaactagaaatgcctttgttgagaagcttgttcattatccttttcagttgttcagtgtacgcatcctgagatgtacaatcctttaatgagaggagagtatcatcttctaaggagtcaagggtgttgttcaaggcatgttcctgaatagagaatgcagtgcctgttatgattgccccagatcttctgcttggattcctatctcaccctttattgatgggattaggaggaattcctgccaccaaggacaacgggatttgccattttggcgctgtctggacttaacactgaagctgctgatctttctcttgtactggtaatagttaggtttatacctgaaattaatcaaacaccatttttttgtaacaaatactaatttatttgctttctatactatggaaattttgtcatgtattgttggtggaaatactattgcgcttttgaaggaattgaaagactttgatatgttgactactattatggccctatggtctaagaaatattaaatgttttcatgatatgaccttgattgg

SEQ ID NO: 218367 - DNA, 1631 bp, Zea Mays
atgccccaccaggcaccaggttgctgggtttgggcctcacggtccagcagatgccagccagttgccacgcgtttcatcagcccgacccaaccaaagccagaagacacggtgccgtcagctgtgctcccggcgctcccgcaccacaagcaagcgcgtgcgcgccgtcaagtcgcctctacagcaacttccaccgcgtactccctccctccctcgtctcgtcttcgtctccaggtttcgcgggggccaaggtttctgccggagcagtcgcggtctgcgctgcggcacggcgacgaggtggggatggagtaccgcgacaagctcgtgctggcgcccatggtccgcgtgggcaccttgccatttaggctactggctgctgaatatggtgctgatattacttatggagaagaaattattgatcacaaattcttgaagtaatctcttgggactactgattttgtggagaaagggactgacagtgtagttttccgtacatgcccacaagaaaggggcagggttgtattccaaatgggcacatcaaatgctgtgagggcacttaaagctgctcagatcgtgtgccgtgatgtttctgctatagatatcaacatgggttgtccaaagtctttttcacttagtggagggatgggtgctgcattactctccaaacctgagcttatacacgatattctgacaacactgcggaggaacttggacacaactgtgacatgtaaaatccgtcttctgaacacacctaaagacactgtggagttggcacgccggattgagaaaactggtgttcctgctcttgctgtccatggaagaaagattaaagatagaccgagagatcttgccaagtgggatgagatagctgatgttgtgtcagcgctgtcaattccagttatagctaatggagatgtctttgagtatgaggattttaagagaattaaagatgcaacaggtgccgcgtctgttatggttgctagaggtgctatgtggaatgcctccatcttttgtgccaaaggaaaaacaccttgggaggatgtcaaaagagagtatgtaagaaagagcatattgtgggacaacgatgtgaagagcacgaaacataccttgaaagaaatgataatgcactattcttgccttgaacttcctgaggggaaaggcgttataaagtgtgatacatctgaagatttagcgagactatacggggaagaggactactataattttgttgttgcaaataggaaatgaatacaatttgatgttgtgagctctcatgtgtaccagcttctgcttggattcctatctcaccctttattgatgggattaggaggaattcctgccaccaaggacaacgggatttgccattttggcgctgtctggacttaacactgaagctgctgatctttctcttgtactggtaatagttaggtttatacctgaaattaatcaaacaccatttttttgtaacaaatactaatttatttgctttctatactatggaaattttgtcatgtattgttggtggaaatactattgcgcttttgaaggaattgaaagactttgatatgttgactactattatggccctatggtctaagaaatattaaatgttttcatgatatgaccttgattgg

SEQ ID NO: 218368 - DNA, 3701 bp, Zea Mays
atgccccaccaggcaccaggttgctgggtttgggcctcacggtccagcagatgccagccagttgccacgcgtttcatcagcccgacccaaccaaagccagaagacacggtgccgtcagctgtgctcccggcgctcccgcaccacaagcaagcgcgtgcgcgccgtcaagtcgcctctacagcaacttccaccgcgtactccctccctccctcgtctcgtcttcgtctccaggtttcgcgggggccaaggtttctgccggagcagtcgcggtctgcgctgcggcacggcgacgaggtggggatggagtaccgcgacaagctcgtgctggcgcccatggtccgcgtgggcaccttgccatttaggctactggctgctgaatatggtgctgatattacttatggagaagaaattattgatcacaaattcttgaagtgtgagcgtgttacaaatggtattgtagttcaattgatatttggcatctgatgtggtctattggtcctacaactgtctccactgcatcagtgttttagtttactcatccaagtatccaactgctttttaagatctaataagttgagtaccataggattgcaaataactttaccctaatatgttgcatctgaagttgataattaattaattggatatattcttcttaattgactcctggatgatgaagttcctgtaattggggtttggggaatgattggatgaatgctagaataagtttatgaatgctttatgaagtgaagagaaagctattttacttgtgaagctagggcgccttcaaagcacttccattatcttacctatttgctccatcagttgttcagattgattgcatttgctctggggctatatgatttgacacatccttatcatgctacgcattgtttaccagaatctcttgggactactgattttgtggagaaagggactgacagtgtagttttccgtacatgcccacaagaaaggggcagggttgtattccaaatgggcacatcaaatgctgtgagggcacttaaagctgctcagatcgtgtaagctctacttctgagaccttttaggatataagtcctgaagtcggtaatataaattgtgtttataccaggtttggtaccgaaaattttccaattggtagcattagattagaccatatagttttgctttgcgtatttatttaaccatattgttttgtcctcataggtgccgtgatgtttctgctatagatatcaacatgggttgtccaaagtctttttcacttagtggagggatgggtgctgcattactctccaaacctgagcttatacacgatgtacttttcttaattgtttctttttgccttttgtataccatatatccattgctcttactagtatacactatagattctgacaacactgcggaggaacttggacacaactgtgacatgtaaaatccgtcttctgaacacacctaaagacactgtggagttggcacgccggattgagaaaactggtgttcctgctcttgctgtccatggaagaaagattaaagatagaccgagagatcttgccaagtgggatgagatagctgatgttgtgtcagcgctgtcaattccagttatagctaatggagatgtctttgagtatgaggattttaagagaattaaagatgcaacaggtgccgcgtctgttatggttgctagaggtgctatgtggaatgcctccatcttttgtgccaaaggaaaaacaccttgggaggatgtcaaaagagagtatgtaagaaagagcatattgtgggacaacgatgtgaagagcacgaaacataccttgaaagaaatgataatgcactattcttgccttgaacttcctgaggggaaaggcgttataaagtgtgatacatctgaagatttagcgagactatacggggaagaggactactataattttgttgttgcaaataggaaatgaatacaatttgatgttgtgagctctcatgtgtaccaggtatctatttccgaatacattgggtctagagctagtgaaaaaggaaataatattatgtgaaactgatgaagttgatagtttcatgtagtctacatgcggtactttttccttgcaaataacaattacttgcaaaataagcatgtttgttgacatgggtttcaaaactaaaattggttccagttccttggccaggtagccactcttaataggggcttgcatgctggtagtctgtaaactagcgattagagtttgtaaatgtatgatactgatcaagaagtcaagaactggctaaactaaatggtattttacctggacccagcaaaaccggtgaaacttgcctggaacttgaagaaagatgttcacttgcatgattaaattgcaaatcagaggtacccatggccacaatgtaatttcgaaaggttttttcatcataataaaaaattgcaataattcagtgatcaatgggtaatggagcagaactctcaacttcatgattgattattcgcttcgattaaagccagctgtttggactgctgtagctgcaatccatagagataaaacactgtagaagcaatagaagcctacggattaaagtcaagcaaacaggctagacctctctctttctctgaaaaatgtactaccaagaacctgcatatctacatacaatgacacctctcctcacctgcccgtgacgctgagctgccttcgccccccccccccctcccccttcgccgccgctgcctagatgtttcatttcatctttgtgcgtgtgaggcacacggcacgataaggacgaatgttgggtggggctgctccctctttcaatggaatgacatggtcaatatcacgttgaggagggacttttgtgtactcctgacagaattcagagtattgttgcagtaaggcttgaatagccagacgaagagtgtggtgcctgcagagacaagctgttgagatgcagaatgaaactagaaatgcctttgttgagaagcttgttcattatccttttcagttgttcagtgtacgcatcctgagatgtacaatcctttaatgagaggagagtatcatcttctaaggagtcaagggtgttgttcaaggcatgttcctgaatagagaatgcagtgcctgttatgattgccccagatcttctgcttggattcctatctcaccctttattgatgggattaggaggaattcctgccaccaaggacaacgggatttgccattttggcgctgtctggacttaacactgaagctgctgatctttctcttgtactggcgcaaagctgcatcagccatgagtccatgacatcagagacggttatgctgatatgcatgcatggtattccccttacacaaaaccgtaatatctcattctcattcatactccataatctctgcgcataggccatcttcgattctttttatatttaataaagacgccatcttggagctaccataccaagatgcagaaatgtcgtgcaaaccaaaggcaccgaagaacagtcgagacctagctttgttggtaagccaaacctagtcttcaattctctaggacccaaaaatcgtgtcttaaactgtcagtctgtcactgccagaaaatgcgggccagatttttttttgatacctctggaacgtgtactaagctatttaaaaagtttgctttcaacttcgaggcttcagcgagtggatgaactctgcacgctcccttga

SEQ ID NO: 218369 - DNA, 3500 bp, Zea Mays
ctccaccaccacaccgcttgccctccccgatctccgcacgctccggccagcgggacccaacggacagccagccgaacatatcccccctacgctggcgccgtcgcacgcgccgccactaggtgtcacccgtccttgcgccgccgccgcatccttcgactttcgatctgcgagctagcgattctccgctgaggagtggggcccatccctccggagcccaaccccagggcatccgcccgcccccgccgccgtggctcaggccccacgcgtcatccccgcgacggacaacgtagtcacgcaggtggagcgcggtccactcccccccccccccccccccccgcgcttcgcctccgctgagaccgcgccctgctggtgcgagtacccgggagcttccaaaccctagggccgggcatcgagcgagcgagggggtgagcgcggagcccaggcatgccttgccgcccgcggggatccaggcagtgatgcgcggatcggcgcggcgggggcggcccggaagctcggccgcatgaggtgcctcgtcggcggcggcgtccaggacagcccgcgcgcagcggccaaaagagtatcgccggcgtcgtggcggctggacgccgccacagcggaggcggacgcggggagagctgaggccaagggggtcaggttctgcgtcaggccgccggacgtcatggagacggtgcacgaggtggccatttacatccaccgcttccacaacctcgatctgtttcagcaaggatggtatcagatgaagattagtgcaatgtgggaggaaggtggcaacaaaacaccggcttcacctgccagggtcgtgcaatatgaagcttctgatgttggtgcggatgatgcattaggcatttggaaaatagatgacgtcgacaatagcttccacacacagccgtttcggatcaagtatgccagacaagatatctatctgtcagttatggtgtcgttcaacatattcaacattgaagaggagggtccagcagcctcggcggtgatgttgaagtttgagctgatgtatgccccaacactagagaacgggtctgagcttcaagcttctagtgtcacatcttcagcagctgtgcatgaatttaggatcccccacagagcactcctgggtctacactcctactgtccagttcattttgatgcgttccactctgtgcttgttgatctgacattacacatagtgtacctgaaagctggtgcaactaaaccatcattgaaggtaccggaccaaggtttaggtcctacatcatatcatattgtcaaggcattattaacttctagaaagttgttgctggaagaactgaagaaaatcagtggtgctattggtaagacagtagaggaattagatgttgctgacttgaatcttggtagatatgagtcatttaatccatcaaaatctggattaccaaattctagtaaagtgttccctgcaactggcaagggtgtgggacagttgactggagttttacatgatttcttggagaaaaacaacgatatggttaatggtacagatgattctatgctgtatactcttccccaggaagagttgtttgaactatttctaactctgagcggacaacttttcacttatatggaatgcatttttgaaatttcatagggtaaataaaacaaagatattggagtacttgcacgatgcttgggctattgacaggaaggcagaatggtcaatatggactgttcactcaaaaattgagatccctcatcgctatttgcggagtatgaatgatgaatcatctcaccgtcattcacttcttagagtttctggatcaaggaagttccatgacgatcctgcacagaactctgcttcacgggctgaactacaccggaaaagcatagcacaaatgaagatcaatacacaatctgttcaagatatgcatatatatgctgatccttcacatgttcctgttgttcttatagaacaacatgtcatggttgttccacagcatagttccagcaaggatttggcttcgaatgcttctgaacaaaaggatactattgtgctacctaaactacaaggagagcctctggtacccaaaagtagtgttggtaaaaaaagtgggcgcatcttgcgagctgtcatttttgtgcatggttttcagggccaccatttggatttacgtcttgttagaaaccaatggcttctattggaccctggagctgattgcctaatgtctgaggctaatgaagataaaacatctggagacttcaaagaaatgggtagcaggttggccggggaggtaattgccttcctgaagaagaaaatggataagctttctagatatggaggctgcaaagagctgaagttaagttttgtcggccattccatcgggaacatcatcattagaagtgccctggcagaacctgcattgcagccatacttgaagaacctctacacttacatgtcaatatcagggcctcacttgggttactggtacagttcaaattctttgttcaattctggactctggctgctgaaaaagctcaagaatgctcaatgcatccatcaactcactttcagtgatgatcaagacccccacaatacatacttctataagctttgcaagttgaaaacattggagaacttcaaaaatatcatattgttatcatcaccacaggatggctatgtaccatatcactcagcgagaatggagctctgcccagccgcatcatcggacacctcaaagaagggtcaagtcttcacagaaatgctcaacaattgcttggatcagatccgtgcgccctcatctgacacccggacgttcatgcgctgcgatgtgaattttgaccagtccaaccacggacggagcctgaacaccatgattggcagggcagcccacatcgagttccttgagaccgacatctacgccaagttcatcatgtggtccttccctgacctgttccgatgacagacaacgccgctcgtctctgtaatgtctctgtaatactgctgcataccaaacctacaaaccgatagcgcacactactgagtactgaccaggcaaggaaaagtaagcttgcataaaggctcccccagaatccaacaccgccacaggcagagtagcgctgtaaagatcctagaagcaacggtttttccagcttgctagatctgattctgtataaatagttgattctttcgtcattccattcatagtgctgtagatgtgcacctttgctgtgaatttataatcctttgtcggcttgtgtatctaacgcttcggtttaggatgtgctgacaatcagtgagcttatgtccaaataagccccctttcttaatgtttggttttagtcaccttggtctttgtgctgctgtaaatccagggtgttgtttctgtttggtgaaatgactgctacatgaatatctggttctggcatcttgccatagccggatcttgcttctgctaaggttattcctatcagggatatataggattggaaaaaaatatgaaagattttgattt

SEQ ID NO: 218370 - DNA, 3447 bp, Zea Mays
ctccaccaccacaccgcttgccctccccgatctccgcacgctccggccagcgggacccaacggacagccagccgaacatatcccccctacgctggcgccgtcgcacgcgccgccactaggtgtcacccgtccttgcgccgccgccgcatccttcgactttcgatctgcgagctagcgattctccgctgaggagtggggcccatccctccggagcccaaccccagggcatccgcccgcccccgccgccgtggctcaggccccacgcgtcatccccgcgacggacaacgtagtcacgcaggtggagcgcggtccactcccccccccccccccccccccgcgcttcgcctccgctgagaccgcgccctgctggtgcgagtacccgggagcttccaaaccctagggccgggcatcgagcgagcgagggggtgagcgcggagcccaggcatgccttgccgcccgcggggatccaggcagtgatgcgcggatcggcgcggcgggggcggcccggaagctcggccgcatgaggtgcctcgtcggcggcggcgtccaggacagcccgcgcgcagcggccaaaagagtatcgccggcgtcgtggcggctggacgccgccacagcggaggcggacgcggggagagctgaggccaagggggtcaggttctgcgtcaggccgccggacgtcatggagacggtgcacgaggtggccatttacatccaccgcttccacaacctcgatctgtttcagcaaggatggtatcagatgaagattagtgcaatgtgggaggaaggtggcaacaaaacaccggcttcacctgccagggtcgtgcaatatgaagcttctgatgttggtgcggatgatgcattaggcatttggaaaatagatgacgtcgacaatagcttccacacacagccgtttcggatcaagtatgccagacaagatatctatctgtcagttatggtgtcgttcaacatattcaacattgaagaggagggtccagcagcctcggcggtgatgttgaagtttgagctgatgtatgccccaacactagagaacgggtctgagcttcaagcttctagtgtcacatcttcagcagctgtgcatgaatttaggatcccccacagagcactcctgggtctacactcctactgtccagttcattttgatgcgttccactctgtgcttgttgatctgacattacacatagtgtacctgaaagctggtgcaactaaaccatcattgaaggtaccggaccaaggtttaggtcctacatcatatcatattgtcaaggcattattaacttctagaaagttgttgctggaagaactgaagaaaatcagtggtgctattggtaagacagtagaggaattagatgttgctgacttgaatcttggtagatatgagtcatttaatccatcaaaatctggattaccaaattctagtaaagtgttccctgcaactggcaagggtgtgggacagttgactggagttttacatgatttcttggagaaaaacaacgatatggttaatggtacagatgattctatgctgtatactcttccccaggaagagttgtttgaactatttctaactctgagcggacaacttttcacttatatggaatgcatttttgaaatttcatagggtaaataaaacaaagatattggagtacttgcacgatgcttgggctattgacaggaaggcagaatggtcaatatggactgttcactcaaaaattgagatccctcatcgctatttgcggagtatgaatgatgaatcatctcaccgtcattcacttcttagagtttctggatcaaggaagttccatgacgatcctgcacagaactctgcttcacgggctgaactacaccggaaaagcatagcacaaatgaagatcaatacacaatctgttcaagatatgcatatatatgctgatccttcacatgttcctgttgttcttatagaacaacatgtcatggttgttccacagcatagttccagcaaggatttggcttcgaatgcttctgaacaaaaggatactattgtgctacctaaactacaaggagagcctctggtacccaaaagtagtgttgggccaccatttggatttacgtcttgttagaaaccaatggcttctattggaccctggagctgattgcctaatgtctgaggctaatgaagataaaacatctggagacttcaaagaaatgggtagcaggttggccggggaggtaattgccttcctgaagaagaaaatggataagctttctagatatggaggctgcaaagagctgaagttaagttttgtcggccattccatcgggaacatcatcattagaagtgccctggcagaacctgcattgcagccatacttgaagaacctctacacttacatgtcaatatcagggcctcacttgggttactggtacagttcaaattctttgttcaattctggactctggctgctgaaaaagctcaagaatgctcaatgcatccatcaactcactttcagtgatgatcaagacccccacaatacatacttctataagctttgcaagttgaaaacattggagaacttcaaaaatatcatattgttatcatcaccacaggatggctatgtaccatatcactcagcgagaatggagctctgcccagccgcatcatcggacacctcaaagaagggtcaagtcttcacagaaatgctcaacaattgcttggatcagatccgtgcgccctcatctgacacccggacgttcatgcgctgcgatgtgaattttgaccagtccaaccacggacggagcctgaacaccatgattggcagggcagcccacatcgagttccttgagaccgacatctacgccaagttcatcatgtggtccttccctgacctgttccgatgacagacaacgccgctcgtctctgtaatgtctctgtaatactgctgcataccaaacctacaaaccgatagcgcacactactgagtactgaccaggcaaggaaaagtaagcttgcataaaggctcccccagaatccaacaccgccacaggcagagtagcgctgtaaagatcctagaagcaacggtttttccagcttgctagatctgattctgtataaatagttgattctttcgtcattccattcatagtgctgtagatgtgcacctttgctgtgaatttataatcctttgtcggcttgtgtatctaacgcttcggtttaggatgtgctgacaatcagtgagcttatgtccaaataagccccctttcttaatgtttggttttagtcaccttggtctttgtgctgctgtaaatccagggtgttgtttctgtttggtgaaatgactgctacatgaatatctggttctggcatcttgccatagccggatcttgcttctgctaaggttattcctatcagggatatataggattggaaaaaaatatgaaagattttgattt

SEQ ID NO: 218371 - DNA, 3486 bp, Zea Mays
ctccaccaccacaccgcttgccctccccgatctccgcacgctccggccagcgggacccaacggacagccagccgaacatatcccccctacgctggcgccgtcgcacgcgccgccactaggtgtcacccgtccttgcgccgccgccgcatccttcgactttcgatctgcgagctagcgattctccgctgaggagtggggcccatccctccggagcccaaccccagggcatccgcccgcccccgccgccgtggctcaggccccacgcgtcatccccgcgacggacaacgtagtcacgcaggtggagcgcggtccactcccccccccccccccccccccgcgcttcgcctccgctgagaccgcgccctgctggtgcgagtacccgggagcttccaaaccctagggccgggcatcgagcgagcgagggggtgagcgcggagcccaggcatgccttgccgcccgcggggatccaggcagtgatgcgcggatcggcgcggcgggggcggcccggaagctcggccgcatgaggtgcctcgtcggcggcggcgtccaggacagcccgcgcgcagcggccaaaagagtatcgccggcgtcgtggcggctggacgccgccacagcggaggcggacgcggggagagctgaggccaagggggtcaggttctgcgtcaggccgccggacgtcatggagacggtgcacgaggtggccatttacatccaccgcttccacaacctcgatctgtttcagcaaggatggtatcagatgaagattagtgcaatgtgggaggaaggtggcaacaaaacaccggcttcacctgccagggtcgtgcaatatgaagcttctgatgttggtgcggatgatgcattaggcatttggaaaatagatgacgtcgacaatagcttccacacacagccgtttcggatcaagtatgccagacaagatatctatctgtcagttatggtgtcgttcaacatattcaacattgaagaggagggtccagcagcctcggcggtgatgttgaagtttgagctgatgtatgccccaacactagagaacgggtctgagcttcaagcttctagtgtcacatcttcagcagctgtgcatgaatttaggatcccccacagagcactcctgggtctacactcctactgtccagttcattttgatgcgttccactctgtgcttgttgatctgacattacacatagtgtacctgaaagctggtgcaactaaaccatcattgaaggtaccggaccaaggtttaggtcctacatcatatcatattgtcaaggcattattaacttctagaaagttgttgctggaagaactgaagaaaatcagtggtgctattggtaagacagtagaggaattagatgttgctgacttgaatcttggtagatatgagtcatttaatccatcaaaatctggattaccaaattctagtaaagtgttccctgcaactggcaagggtgtgggacagttgactggagttttacatgatttcttggagaaaaacaacgatatggttaatggtacagatgattctatgctgtatactcttccccaggaagagttgtttgaactatttctaactctgagcggacaacttttcacttatatggaatgcatttttgaaatttcatagggtaaataaaacaaagatattggagtacttgcacgatgcttgggctattgacaggaaggcagaatggtcaatatggactgttcactcaaaaattgagatccctcatcgctatttgcggagtatgaatgatgaatcatctcaccgtcattcacttcttagagtttctggatcaaggaagttccatgacgatcctgcacagaactctgcttcacgggctgaactacaccggaaaagcatagcacaaatgaagatcaatacacaatctgttcaagatatgcatatatatgctgatccttcacatgttcctgttgttcttatagaacaacatgtcatggttgttccacagcatagttccagcaaggatttggcttcgaatgcttctgaacaaaaggatactattgtgctacctaaactacaaggagagcctctggtacccaaaagtagtgttggtaaaaaaagtgggcgcatcttgcgagctgtcatttttgtgcatggttttcagggccaccatttggatttacgtcttgttagaaaccaatggcttctattggaccctggagctgattgcctaatgtctgaggctaatgaagataaaacatctggagacttcaaagaaatgggtagcaggttggccggggaggtaattgccttcctgaagaagaaaatggataagctttctagatatggaggctgcaaagagctgaagttaagttttgtcggccattccatcgggaacatcatcattagaagtgccctggcagccatacttgaagaacctctacacttacatgtcaatatcagggcctcacttgggttactggtacagttcaaattctttgttcaattctggactctggctgctgaaaaagctcaagaatgctcaatgcatccatcaactcactttcagtgatgatcaagacccccacaatacatacttctataagctttgcaagttgaaaacattggagaacttcaaaaatatcatattgttatcatcaccacaggatggctatgtaccatatcactcagcgagaatggagctctgcccagccgcatcatcggacacctcaaagaagggtcaagtcttcacagaaatgctcaacaattgcttggatcagatccgtgcgccctcatctgacacccggacgttcatgcgctgcgatgtgaattttgaccagtccaaccacggacggagcctgaacaccatgattggcagggcagcccacatcgagttccttgagaccgacatctacgccaagttcatcatgtggtccttccctgacctgttccgatgacagacaacgccgctcgtctctgtaatgtctctgtaatactgctgcataccaaacctacaaaccgatagcgcacactactgagtactgaccaggcaaggaaaagtaagcttgcataaaggctcccccagaatccaacaccgccacaggcagagtagcgctgtaaagatcctagaagcaacggtttttccagcttgctagatctgattctgtataaatagttgattctttcgtcattccattcatagtgctgtagatgtgcacctttgctgtgaatttataatcctttgtcggcttgtgtatctaacgcttcggtttaggatgtgctgacaatcagtgagcttatgtccaaataagccccctttcttaatgtttggttttagtcaccttggtctttgtgctgctgtaaatccagggtgttgtttctgtttggtgaaatgactgctacatgaatatctggttctggcatcttgccatagccggatcttgcttctgctaaggttattcctatcagggatatataggattggaaaaaaatatgaaagattttgattt

SEQ ID NO: 218372 - DNA, 3328 bp, Zea Mays
ccaccaccacaccgcttgccctccccgatctccgcacgctccggccagcgggacccaacggacagccagccgaacatatcccccctacgctggcgccgtcgcacgcgccgccactaggtgtcacccgtccttgcgccgccgccgcatccttcgactttcgatctgcgagctagcgattctccgctgaggagtggggcccatccctccggagcccaaccccagggcatccgcccgcccccgccgccgtggctcaggccccacgcgtcatccccgcgacggacaacgtagtcacgcaggtggagcgcggtccactcccccccccccccccccccccgcgcttcgcctccgctgagaccgcgccctgctggtgcgagtacccgggagcttccaaaccctagggccgggcatcgagcgagcgagggggtgagcgcggagcccaggcatgccttgccgcccgcggggatccaggcagtgatgcgcggatcggcgcggcgggggcggcccggaagctcggccgcatgaggtgcctcgtcggcggcggcgtccaggacagcccgcgcgcagcggccaaaagagtatcgccggcgtcgtggcggctggacgccgccacagcggaggcggacgcggggagagctgaggccaagggggtcaggttctgcgtcaggccgccggacgtcatggagacggtgcacgaggtggccatttacatccaccgcttccacaacctcgatctgtttcagcaaggatggtatcagatgaagattagtgcaatgtgggaggaaggtggcaacaaaacaccggcttcacctgccagggtcgtgcaatatgaagcttctgatgttggtgcggatgatgcattaggcatttggaaaatagatgacgtcgacaatagcttccacacacagccgtttcggatcaagtatgccagacaagatatctatctgtcagttatggtgtcgttcaacatattcaacattgaagaggagggtccagcagcctcggcggtgatgttgaagtttgagctgatgtatgccccaacactagagaacgggtctgagcttcaagcttctagtgtcacatcttcagcagctgtgcatgaatttaggatcccccacagagcactcctgggtctacactcctactgtccagttcattttgatgcgttccactctgtgcttgttgatctgacattacacatagtgtacctgaaagctggtgcaactaaaccatcattgaaggtacacaggtaccggaccaaggtttaggtcctacatcatatcatattgtcaaggcattattaacttctagaaagttgttgctggaagaactgaagaaaatcagtggtgctattgtaaagtgttccctgcaactggcaagggtgtgggacagttgactggagttttacatgatttcttggagaaaaacaacgatatggttaatggtacagatgattctatgctgtatactcttccccaggaagagttgtttgaactatttctaactctgagcggacaacttttcacttatatggaatgcatttttgaaatttcatagggtaaataaaacaaagatattggagtacttgcacgatgcttgggctattgacaggaaggcagaatggtcaatatggactgttcactcaaaaattgagatccctcatcgctatttgcggagtatgaatgatgaatcatctcaccgtcattcacttcttagagtttctggatcaaggaagttccatgacgatcctgcacagaactctgcttcacgggctgaactacaccggaaaagcatagcacaaatgaagatcaatacacaatctgttcaagatatgcatatatatgctgatccttcacatgttcctgttgttcttatagaacaacatgtcatggttgttccacagcatagttccagcaaggatttggcttcgaatgcttctgaacaaaaggatactattgtgctacctaaactacaaggagagcctctggtacccaaaagtagtgttggtaaaaaaagtgggcgcatcttgcgagctgtcatttttgtgcatggttttcagggccaccatttggatttacgtcttgttagaaaccaatggcttctattggaccctggagctgattgcctaatgtctgaggctaatgaagataaaacatctggagacttcaaagaaatgggtagcaggttggccggggaggtaattgccttcctgaagaagaaaatggataagctttctagatatggaggctgcaaagagctgaagttaagttttgtcggccattccatcgggaacatcatcattagaagtgccctggcagaacctgcattgcagccatacttgaagaacctctacacttacatgtcaatatcagggcctcacttgggttactgtgatgatcaagacccccacaatacatacttctataagctttgcaagttgaaaacattggagaacttcaaaaatatcatattgttatcatcaccacaggatggctatgtaccatatcactcagcgagaatggagctctgcccagccgcatcatcggacacctcaaagaagggtcaagtcttcacagaaatgctcaacaattgcttggatcagatccgtgcgccctcatctgacacccggacgttcatgcgctgcgatgtgaattttgaccagtccaaccacggacggagcctgaacaccatgattggcagggcagcccacatcgagttccttgagaccgacatctacgccaagttcatcatgtggtccttccctgacctgttccgatgacagacaacgccgctcgtctctgtaatgtctctgtaatactgctgcataccaaacctacaaaccgatagcgcacactactgagtactgaccaggcaaggaaaagtaagcttgcataaaggctcccccagaatccaacaccgccacaggcagagtagcgctgtaaagatcctagaagcaacggtttttccagcttgctagatctgattctgtataaatagttgattctttcgtcattccattcatagtgctgtagatgtgcacctttgctgtgaatttataatcctttgtcggcttgtgtatctaacgcttcggtttaggatgtgctgacaatcagtgagcttatgtccaaataagccccctttcttaatgtttggttttagtcaccttggtctttgtgctgctgtaaatccagggtgttgtttctgtttggtgaaatgactgctacatgaatatctggttctggcatcttgccatagccggatcttgcttctgctaaggttattcctatcagggatatataggattggaaaaaaatatgaaagattttgattt

SEQ ID NO: 218373 - DNA, 3382 bp, Zea Mays
caccaccacaccgcttgccctccccgatctccgcacgctccggccagcgggacccaacggacagccagccgaacatatcccccctacgctggcgccgtcgcacgcgccgccactaggtgtcacccgtccttgcgccgccgccgcatccttcgactttcgatctgcgagctagcgattctccgctgaggagtggggcccatccctccggagcccaaccccagggcatccgcccgcccccgccgccgtggctcaggccccacgcgtcatccccgcgacggacaacgtagtcacgcaggtggagcgcggtccactcccccccccccccccccccccgcgcttcgcctccgctgagaccgcgccctgctggtgcgagtacccgggagcttccaaaccctagggccgggcatcgagcgagcgagggggtgagcgcggagcccaggcatgccttgccgcccgcggggatccaggcagtgatgcgcggatcggcgcggcgggggcggcccggaagctcggccgcatgaggtgcctcgtcggcggcggcgtccaggacagcccgcgcgcagcggccaaaagagtatcgccggcgtcgtggcggctggacgccgccacagcggaggcggacgcggggagagctgaggccaagggggtcaggttctgcgtcaggccgccggacgtcatggagacggtgcacgaggtggccatttacatccaccgcttccacaacctcgatctgtttcagcaaggatggtatcagatgaagattagtgcaatgtgggaggaaggtggcaacaaaacaccggcttcacctgccagggtcgtgcaatatgaagcttctgatgttggtgcggatgatgcattaggcatttggaaaatagatgacgtcgacaatagcttccacacacagccgtttcggatcaagtatgccagacaagatatctatctgtcagttatggtgtcgttcaacatattcaacattgaagaggagggtccagcagcctcggcggtgatgttgaagtttgagctgatgtatgccccaacactagagaacgggtctgagcttcaagcttctagtgtcacatcttcagcagctgtgcatgaatttaggatcccccacagagcactcctgggtctacactcctactgtccagttcattttgatgcgttccactctgtgcttgttgatctgacattacacatagtgtacctgaaagctggtgcaactaaaccatcattgaaggtacacaggtaccggaccaaggtttaggtcctacatcatatcatattgtcaaggcattattaacttctagaaagttgttgctggaagaactgaagaaaatcagtggtgctattggtaagacagtagaggaattagatgttgctgacttgaatcttggtagatatgagtcatttaatccatcaaaatctggattaccaaattctagtaaagtgttccctgcaactggcaagggtgtgggacagttgactggagttttacatgatttcttggagaaaaacaacgatatggttaatggtacagatgattctatgctgtatactcttccccaggaagagttgtttgaactatttctaactctgagcggacaacttttcacttatatggaatgcatttttgaaatttcatagggtaaataaaacaaagatattggagtacttgcacgatgcttgggctattgacaggaaggcagaatggtcaatatggactgttcactcaaaaattgagatccctcatcgctatttgcggagtatgaatgatgaatcatctcaccgtcattcacttcttagagtttctggatcaaggaagttccatgacgatcctgcacagaactctgcttcacgggctgaactacaccggaaaagcatagcacaaatgaagaacaacatgtcatggttgttccacagcatagttccagcaaggatttggcttcgaatgcttctgaacaaaaggatactattgtgctacctaaactacaaggagagcctctggtacccaaaagtagtgttgggccaccatttggatttacgtcttgttagaaaccaatggcttctattggaccctggagctgattgcctaatgtctgaggctaatgaagataaaacatctggagacttcaaagaaatgggtagcaggttggccggggaggtaattgccttcctgaagaagaaaatggataagctttctagatatggaggctgcaaagagctgaagttaagttttgtcggccattccatcgggaacatcatcattagaagtgccctggcagaacctgcattgcagccatacttgaagaacctctacacttacatgtcaatatcagggcctcacttgggttactggtacagttcaaattctttgttcaattctggactctggctgctgaaaaagctcaagaatgctcaatgcatccatcaactcactttcagtgatgatcaagacccccacaatacatacttctataagctttgcaagttgaaaacattggagaacttcaaaaatatcatattgttatcatcaccacaggatggctatgtaccatatcactcagcgagaatggagctctgcccagccgcatcatcggacacctcaaagaagggtcaagtcttcacagaaatgctcaacaattgcttggatcagatccgtgcgccctcatctgacacccggacgttcatgcgctgcgatgtgaattttgaccagtccaaccacggacggagcctgaacaccatgattggcagggcagcccacatcgagttccttgagaccgacatctacgccaagttcatcatgtggtccttccctgacctgttccgatgacagacaacgccgctcgtctctgtaatgtctctgtaatactgctgcataccaaacctacaaaccgatagcgcacactactgagtactgaccaggcaaggaaaagtaagcttgcataaaggctcccccagaatccaacaccgccacaggcagagtagcgctgtaaagatcctagaagcaacggtttttccagcttgctagatctgattctgtataaatagttgattctttcgtcattccattcatagtgctgtagatgtgcacctttgctgtgaatttataatcctttgtcggcttgtgtatctaacgcttcggtttaggatgtgctgacaatcagtgagcttatgtccaaataagccccctttcttaatgtttggttttagtcaccttggtctttgtgctgctgtaaatccagggtgttgtttctgtttggtgaaatgactgctacatgaatatctggttctggcatcttgccatagccggatcttgcttctgctaaggttattcctatcagggatatataggattggaaaaaaatatgaaagattttgattt

SEQ ID NO: 218374 - DNA, 3373 bp, Zea Mays
accaccacaccgcttgccctccccgatctccgcacgctccggccagcgggacccaacggacagccagccgaacatatcccccctacgctggcgccgtcgcacgcgccgccactaggtgtcacccgtccttgcgccgccgccgcatccttcgactttcgatctgcgagctagcgattctccgctgaggagtggggcccatccctccggagcccaaccccagggcatccgcccgcccccgccgccgtggctcaggccccacgcgtcatccccgcgacggacaacgtagtcacgcaggtggagcgcggtccactcccccccccccccccccccccgcgcttcgcctccgctgagaccgcgccctgctggtgcgagtacccgggagcttccaaaccctagggccgggcatcgagcgagcgagggggtgagcgcggagcccaggcatgccttgccgcccgcggggatccaggcagtgatgcgcggatcggcgcggcgggggcggcccggaagctcggccgcatgaggtgcctcgtcggcggcggcgtccaggacagcccgcgcgcagcggccaaaagagtatcgccggcgtcgtggcggctggacgccgccacagcggaggcggacgcggggagagctgaggccaagggggtcaggttctgcgtcaggccgccggacgtcatggagacggtgcacgaggtggccatttacatccaccgcttccacaacctcgatctgtttcagcaaggatggtatcagatgaagattagtgcaatgtgggaggaaggtggcaacaaaacaccggcttcacctgccagggtcgtgcaatatgaagcttctgatgttggtgcggatgatgcattaggcatttggaaaatagatgacgtcgacaatagcttccacacacagccgtttcggatcaagtatgccagacaagatatctatctgtcagttatggtgtcgttcaacatattcaacattgaagaggagggtccagcagcctcggcggtgatgttgaagtttgagctgatgtatgccccaacactagagaacgggtctgagcttcaagcttctagtgtcacatcttcagcagctgtgcatgaatttaggatcccccacagagcactcctgggtctacactcctactgtccagttcattttgatgcgttccactctgtgcttgttgatctgacattacacatagtgtacctgaaagctggtgcaactaaaccatcattgaaggtaccggaccaaggtttaggtcctacatcatatcatattgtcaaggcattattaacttctagaaagttgttgctggaagaactgaagaaaatcagtggtgctattggtaagacagtagaggaattagatgttgctgacttgaatcttggtagatatgagtcatttaatccatcaaaatctggattaccaaattctagtaaagtgttccctgcaactggcaagggtgtgggacagttgactggagttttacatgatttcttggagaaaaacaacgatatggttaatggtacagatgattctatgctgtatactcttccccaggaagagttgtttgaactatttctaactctgagcggacaacttttcacttatatggaatgcatttttgaaatttcatagggtaaataaaacaaagatattggagtacttgcacgatgcttgggctattgacaggaaggcagaatggtcaatatggactgttcactcaaaaattgagatccctcatcgctatttgcggagtatgaatgatgaatcatctcaccgtcattcacttcttagagtttctggatcaaggaagttccatgacgatcctgcacagaactctgcttcacgggctgaactacaccggaaaagcatagcacaaatgaagaacaacatgtcatggttgttccacagcatagttccagcaaggatttggcttcgaatgcttctgaacaaaaggatactattgtgctacctaaactacaaggagagcctctggtacccaaaagtagtgttgggccaccatttggatttacgtcttgttagaaaccaatggcttctattggaccctggagctgattgcctaatgtctgaggctaatgaagataaaacatctggagacttcaaagaaatgggtagcaggttggccggggaggtaattgccttcctgaagaagaaaatggataagctttctagatatggaggctgcaaagagctgaagttaagttttgtcggccattccatcgggaacatcatcattagaagtgccctggcagaacctgcattgcagccatacttgaagaacctctacacttacatgtcaatatcagggcctcacttgggttactggtacagttcaaattctttgttcaattctggactctggctgctgaaaaagctcaagaatgctcaatgcatccatcaactcactttcagtgatgatcaagacccccacaatacatacttctataagctttgcaagttgaaaacattggagaacttcaaaaatatcatattgttatcatcaccacaggatggctatgtaccatatcactcagcgagaatggagctctgcccagccgcatcatcggacacctcaaagaagggtcaagtcttcacagaaatgctcaacaattgcttggatcagatccgtgcgccctcatctgacacccggacgttcatgcgctgcgatgtgaattttgaccagtccaaccacggacggagcctgaacaccatgattggcagggcagcccacatcgagttccttgagaccgacatctacgccaagttcatcatgtggtccttccctgacctgttccgatgacagacaacgccgctcgtctctgtaatgtctctgtaatactgctgcataccaaacctacaaaccgatagcgcacactactgagtactgaccaggcaaggaaaagtaagcttgcataaaggctcccccagaatccaacaccgccacaggcagagtagcgctgtaaagatcctagaagcaacggtttttccagcttgctagatctgattctgtataaatagttgattctttcgtcattccattcatagtgctgtagatgtgcacctttgctgtgaatttataatcctttgtcggcttgtgtatctaacgcttcggtttaggatgtgctgacaatcagtgagcttatgtccaaataagccccctttcttaatgtttggttttagtcaccttggtctttgtgctgctgtaaatccagggtgttgtttctgtttggtgaaatgactgctacatgaatatctggttctggcatcttgccatagccggatcttgcttctgctaaggttattcctatcagggatatataggattggaaaaaaatatgaaagattttgattt

SEQ ID NO: 218375 - DNA, 3425 bp, Zea Mays
ccaccacaccgcttgccctccccgatctccgcacgctccggccagcgggacccaacggacagccagccgaacatatcccccctacgctggcgccgtcgcacgcgccgccactaggtgtcacccgtccttgcgccgccgccgcatccttcgactttcgatctgcgagctagcgattctccgctgaggagtggggcccatccctccggagcccaaccccagggcatccgcccgcccccgccgccgtggctcaggccccacgcgtcatccccgcgacggacaacgtagtcacgcaggtggagcgcggtccactcccccccccccccccccccccgcgcttcgcctccgctgagaccgcgccctgctggtgcgagtacccgggagcttccaaaccctagggccgggcatcgagcgagcgagggggtgagcgcggagcccaggcatgccttgccgcccgcggggatccaggcagtgatgcgcggatcggcgcggcgggggcggcccggaagctcggccgcatgaggtgcctcgtcggcggcggcgtccaggacagcccgcgcgcagcggccaaaagagtatcgccggcgtcgtggcggctggacgccgccacagcggaggcggacgcggggagagctgaggccaagggggtcaggttctgcgtcaggccgccggacgtcatggagacggtgcacgaggtggccatttacatccaccgcttccacaacctcgatctgtttcagcaaggatggtatcagatgaagattagtgcaatgtgggaggaaggtggcaacaaaacaccggcttcacctgccagggtcgtgcaatatgaagcttctgatgttggtgcggatgatgcattaggcatttggaaaatagatgacgtcgacaatagcttccacacacagccgtttcggatcaagtatgccagacaagatatctatctgtcagttatggtgtcgttcaacatattcaacattgaagaggagggtccagcagcctcggcggtgatgttgaagtttgagctgatgtatgccccaacactagagaacgggtctgagcttcaagcttctagtgtcacatcttcagcagctgtgcatgaatttaggatcccccacagagcactcctgggtctacactcctactgtccagttcattttgatgcgttccactctgtgcttgttgatctgacattacacatagtgtacctgaaagctggtgcaactaaaccatcattgaaggtaccggaccaaggtttaggtcctacatcatatcatattgtcaaggcattattaacttctagaaagttgttgctggaagaactgaagaaaatcagtggtgctattggtaagacagtagaggaattagatgttgctgacttgaatcttggtagatatgagtcatttaatccatcaaaatctggattaccaaattctagtaaagtgttccctgcaactggcaagggtgtgggacagttgactggagttttacatgatttcttggagaaaaacaacgatatggttaatggtacagatgattctatgctgtatactcttccccaggaagagttgtttgaactatttctaactctgagcggacaacttttcacttatatggaatgcatttttgaaatttcatagggtaaataaaacaaagatattggagtacttgcacgatgcttgggctattgacaggaaggcagaatggtcaatatggactgttcactcaaaaattgagatccctcatcgctatttgcggagtatgaatgatgaatcatctcaccgtcattcacttcttagagtttctggatcaaggaagttccatgacgatcctgcacagaactctgcttcacgggctgaactacaccggaaaagcatagcacaaatgaagaacaacatgtcatggttgttccacagcatagttccagcaaggatttggcttcgaatgcttctgaacaaaaggatactattgtgctacctaaactacaaggagagcctctggtacccaaaagtagtgttggtaaaaaaagtgggcgcatcttgcgagctgtcatttttgtgcatggttttcagggccaccatttggatttacgtcttgttagaaaccaatggcttctattggaccctggagctgattgcctaatgtctgaggctaatgaagataaaacatctggagacttcaaagaaatgggtagcaggttggccggggaggtaattgccttcctgaagaagaaaatggataagctttctagatatggaggctgcaaagagctgaagttaagttttgtcggccattccatcgggaacatcatcattagaagtgccctggcagaacctgcattgcagccatacttgaagaacctctacacttacatgtcaatatcagggcctcacttgggttactggtacagttcaaattctttgttcaattctggactctggctgctgaaaaagctcaagaatgctcaatgcatccatcaactcactttcagtgatgatcaagacccccacaatacatacttctataagctttgcaagttgaaaacattggagaacttcaaaaatatcatattgttatcatcaccacaggatggctatgtaccatatcactcagcgagaatggagctctgcccagccgcatcatcggacacctcaaagaagggtcaagtcttcacagaaatgctcaacaattgcttggatcagatccgtgcgccctcatctgacacccggacgttcatgcgctgcgatgtgaattttgaccagtccaaccacggacggagcctgaacaccatgattggcagggcagcccacatcgagttccttgagaccgacatctacgccaagttcatcatgtggtccttccctgacctgttccgatgacagacaacgccgctcgtctctgtaatgtctctgtaatactgctgcataccaaacctacaaaccgatagcgcacactactgagtactgaccaggcaaggaaaagtaagcttgcataaaggctcccccagaatccaacaccgccacaggcagagtagcgctgtaaagatcctagaagcaacggtttttccagcttgctagatctgattctgtataaatagttgattctttcgtcattccattcatagtgctgtagatgtgcacctttgctgtgaatttataatcctttgtcggcttgtgtatctaacgcttcggtttaggatgtgctgacaatcagtgagcttatgtccaaataagccccctttcttaatgtttggttttagtcaccttggtctttgtgctgctgtaaatccagggtgttgtttctgtttggtgaaatgactgctacatgaatatctggttctggcatcttgccatagccggatcttgcttctgctaaggttattcctatcagggatatataggattggaaaaaaatatgaaagattttgattt

SEQ ID NO: 218376 - DNA, 2959 bp, Zea Mays
cacaccgcttgccctccccgatctccgcacgctccggccagcgggacccaacggacagccagccgaacatatcccccctacgctggcgccgtcgcacgcgccgccactaggtgtcacccgtccttgcgccgccgccgcatccttcgactttcgatctgcgagctagcgattctccgctgaggagtggggcccatccctccggagcccaaccccagggcatccgcccgcccccgccgccgtggctcaggccccacgcgtcatccccgcgacggacaacgtagtcacgcagatggtatcagatgaagattagtgcaatgtgggaggaaggtggcaacaaaacaccggcttcacctgccagggtcgtgcaatatgaagcttctgatgttggtgcggatgatgcattaggcatttggaaaatagatgacgtcgacaatagcttccacacacagccgtttcggatcaagtatgccagacaagatatctatctgtcagttatggtgtcgttcaacatattcaacattgaagaggagggtccagcagcctcggcggtgatgttgaagtttgagctgatgtatgccccaacactagagaacgggtctgagcttcaagcttctagtgtcacatcttcagcagctgtgcatgaatttaggatcccccacagagcactcctgggtctacactcctactgtccagttcattttgatgcgttccactctgtgcttgttgatctgacattacacatagtgtacctgaaagctggtgcaactaaaccatcattgaaggtacacaggtaccggaccaaggtttaggtcctacatcatatcatattgtcaaggcattattaacttctagaaagttgttgctggaagaactgaagaaaatcagtggtgctattgtaaagtgttccctgcaactggcaagggtgtgggacagttgactggagttttacatgatttcttggagaaaaacaacgatatggttaatggtacagatgattctatgctgtatactcttccccaggaagagttgtttgaactatttctaactctgagcggacaacttttcacttatatggaatgcatttttgaaatttcatagggtaaataaaacaaagatattggagtacttgcacgatgcttgggctattgacaggaaggcagaatggtcaatatggactgttcactcaaaaattgagatccctcatcgctatttgcggagtatgaatgatgaatcatctcaccgtcattcacttcttagagtttctggatcaaggaagttccatgacgatcctgcacagaactctgcttcacgggctgaactacaccggaaaagcatagcacaaatgaagatcaatacacaatctgttcaagatatgcatatatatgctgatccttcacatgttcctgttgttcttatagaacaacatgtcatggttgttccacagcatagttccagcaaggatttggcttcgaatgcttctgaacaaaaggatactattgtgctacctaaactacaaggagagcctctggtacccaaaagtagtgttggtaaaaaaagtgggcgcatcttgcgagctgtcatttttgtgcatggttttcagggccaccatttggatttacgtcttgttagaaaccaatggcttctattggaccctggagctgattgcctaatgtctgaggctaatgaagataaaacatctggagacttcaaagaaatgggtagcaggttggccggggaggtaattgccttcctgaagaagaaaatggataagctttctagatatggaggctgcaaagagctgaagttaagttttgtcggccattccatcgggaacatcatcattagaagtgccctggcagaacctgcattgcagccatacttgaagaacctctacacttacatgtcaatatcagggcctcacttgggttactggtacagttcaaattctttgttcaattctggactctggctgctgaaaaagctcaagaatgctcaatgcatccatcaactcactttcagtgatgatcaagacccccacaatacatacttctataagctttgcaagttgaaaacattggagaacttcaaaaatatcatattgttatcatcaccacaggatggctatgtaccatatcactcagcgagaatggagctctgcccagccgcatcatcggacacctcaaagaagggtcaagtcttcacagaaatgctcaacaattgcttggatcagatccgtgcgccctcatctgacacccggacgttcatgcgctgcgatgtgaattttgaccagtccaaccacggacggagcctgaacaccatgattggcagggcagcccacatcgagttccttgagaccgacatctacgccaagttcatcatgtggtccttccctgacctgttccgatgacagacaacgccgctcgtctctgtaatgtctctgtaatactgctgcataccaaacctacaaaccgatagcgcacactactgagtactgaccaggcaaggaaaagtaagcttgcataaaggctcccccagaatccaacaccgccacaggcagagtagcgctgtaaagatcctagaagcaacggtttttccagcttgctagatctgattctgtataaatagttgattctttcgtcattccattcatagtgctgtagatgtgcacctttgctgtgaatttataatcctttgtcggcttgtgtatctaacgcttcggtttaggatgtgctgacaatcagtgagcttatgtccaaataagccccctttcttaatgtttggttttagtcaccttggtctttgtgctgctgtaaatccagggtgttgtttctgtttggtgaaatgactgctacatgaatatctggttctggcatcttgccatagccggatcttgcttctgctaaggttattcctatcagggatatataggattggaaaaaaatatgaaagattttgattt

SEQ ID NO: 218377 - DNA, 3463 bp, Zea Mays
cgatctccgcacgctccggccagcgggacccaacggacagccagccgaacatatcccccctacgctggcgccgtcgcacgcgccgccactaggtgtcacccgtccttgcgccgccgccgcatccttcgactttcgatctgcgagctagcgattctccgctgaggagtggggcccatccctccggagcccaaccccagggcatccgcccgcccccgccgccgtggctcaggccccacgcgtcatccccgcgacggacaacgtagtcacgcaggtggagcgcggtccactcccccccccccccccccccccgcgcttcgcctccgctgagaccgcgccctgctggtgcgagtacccgggagcttccaaaccctagggccgggcatcgagcgagcgagggggtgagcgcggagcccaggcatgccttgccgcccgcggggatccaggcagtgatgcgcggatcggcgcggcgggggcggcccggaagctcggccgcatgaggtgcctcgtcggcggcggcgtccaggacagcccgcgcgcagcggccaaaagagtatcgccggcgtcgtggcggctggacgccgccacagcggaggcggacgcggggagagctgaggccaagggggtcaggttctgcgtcaggccgccggacgtcatggagacggtgcacgaggtggccatttacatccaccgcttccacaacctcgatctgtttcagcaaggatggtatcagatgaagattagtgcaatgtgggaggaaggtggcaacaaaacaccggcttcacctgccagggtcgtgcaatatgaagcttctgatgttggtgcggatgatgcattaggcatttggaaaatagatgacgtcgacaatagcttccacacacagccgtttcggatcaagtatgccagacaagatatctatctgtcagttatggtgtcgttcaacatattcaacattgaagaggagcctcggcggtgatgttgaagtttgagctgatgtatgccccaacactagagaacgggtctgagcttcaagcttctagtgtcacatcttcagcagctgtgcatgaatttaggatcccccacagagcactcctgggtctacactcctactgtccagttcattttgatgcgttccactctgtgcttgttgatctgacattacacatagtgtacctgaaagctggtgcaactaaaccatcattgaaggtaccggaccaaggtttaggtcctacatcatatcatattgtcaaggcattattaacttctagaaagttgttgctggaagaactgaagaaaatcagtggtgctattggtaagacagtagaggaattagatgttgctgacttgaatcttggtagatatgagtcatttaatccatcaaaatctggattaccaaattctagtaaagtgttccctgcaactggcaagggtgtgggacagttgactggagttttacatgatttcttggagaaaaacaacgatatggttaatggtacagatgattctatgctgtatactcttccccaggaagagttgtttgaactatttctaactctgagcggacaacttttcacttatatggaatgcatttttgaaatttcatagggtaaataaaacaaagatattggagtacttgcacgatgcttgggctattgacaggaaggcagaatggtcaatatggactgttcactcaaaaattgagatccctcatcgctatttgcggagtatgaatgatgaatcatctcaccgtcattcacttcttagagtttctggatcaaggaagttccatgacgatcctgcacagaactctgcttcacgggctgaactacaccggaaaagcatagcacaaatgaagatcaatacacaatctgttcaagatatgcatatatatgctgatccttcacatgttcctgttgttcttatagaacaacatgtcatggttgttccacagcatagttccagcaaggatttggcttcgaatgcttctgaacaaaaggatactattgtgctacctaaactacaaggagagcctctggtacccaaaagtagtgttggtaaaaaaagtgggcgcatcttgcgagctgtcatttttgtgcatggttttcagggccaccatttggatttacgtcttgttagaaaccaatggcttctattggaccctggagctgattgcctaatgtctgaggctaatgaagataaaacatctggagacttcaaagaaatgggtagcaggttggccggggaggtaattgccttcctgaagaagaaaatggataagctttctagatatggaggctgcaaagagctgaagttaagttttgtcggccattccatcgggaacatcatcattagaagtgccctggcagaacctgcattgcagccatacttgaagaacctctacacttacatgtcaatatcagggcctcacttgggttactggtacagttcaaattctttgttcaattctggactctggctgctgaaaaagctcaagaatgctcaatgcatccatcaactcactttcagtgatgatcaagacccccacaatacatacttctataagctttgcaagttgaaaacattggagaacttcaaaaatatcatattgttatcatcaccacaggatggctatgtaccatatcactcagcgagaatggagctctgcccagccgcatcatcggacacctcaaagaagggtcaagtcttcacagaaatgctcaacaattgcttggatcagatccgtgcgccctcatctgacacccggacgttcatgcgctgcgatgtgaattttgaccagtccaaccacggacggagcctgaacaccatgattggcagggcagcccacatcgagttccttgagaccgacatctacgccaagttcatcatgtggtccttccctgacctgttccgatgacagacaacgccgctcgtctctgtaatgtctctgtaatactgctgcataccaaacctacaaaccgatagcgcacactactgagtactgaccaggcaaggaaaagtaagcttgcataaaggctcccccagaatccaacaccgccacaggcagagtagcgctgtaaagatcctagaagcaacggtttttccagcttgctagatctgattctgtataaatagttgattctttcgtcattccattcatagtgctgtagatgtgcacctttgctgtgaatttataatcctttgtcggcttgtgtatctaacgcttcggtttaggatgtgctgacaatcagtgagcttatgtccaaataagccccctttcttaatgtttggttttagtcaccttggtctttgtgctgctgtaaatccagggtgttgtttctgtttggtgaaatgactgctacatgaatatctggttctggcatcttgccatagccggatcttgcttctgctaaggttattcctatcagggatatataggattggaaaaaaatatgaaagattttgattt

SEQ ID NO: 218378 - DNA, 1730 bp, Zea Mays
cacgcgccgccactaggtgtcacccgtccttgcgccgccgccgcatccttcgactttcgatctgcgagctagcgattctccgctgaggagtggggcccatccctccggagcccaaccccagggcatccgcccgcccccgccgccgtggctcaggccccacgcgtcatccccgcgacggacaacgtagtcacgcaggtggagcgcggtccactcccccccccccccccccccccgcgcttcgcctccgctgagaccgcgccctgctggtgcgagtacccgggagcttccaaaccctagggccgggcatcgagcgagcgagggggtgagcgcggagcccaggcatgccttgccgcccgcggggatccaggcagtgatgcgcggatcggcgcggcgggggcggcccggaagctcggccgcatgaggtgcctcgtcggcggcggcgtccaggacagcccgcgcgcagcggccaaaagagtatcgccggcgtcgtggcggctggacgccgccacagcggaggcggacgcggggagagctgaggccaagggggtcaggttctgcgtcaggccgccggacgtcatggagacggtgcacgaggtggccatttacatccaccgcttccacaacctcgatctgtttcagcaaggatggtatcagatgaagattagtgcaatgtgggaggaaggtggcaacaaaacaccggcttcacctgccagggtcgtgcaatatgaagcttctgatgttggtgcggatgatgcattaggcatttggaaaatagatgacgtcgacaatagcttccacacacagccgtttcggatcaagtatgccagacaagatatctatctgtcagttatggtgtcgttcaacatattcaacattgaagaggagcctcggcggtgatgttgaagtttgagctgatgtatgccccaacactagagaacgggtctgagcttcaagcttctagtgtcacatcttcagcagctgtgcatgaatttaggatcccccacagagcactcctgggtctacactcctactgtccagttcattttgatgcgttccactctgtgcttgttgatctgacattacacatagtgtacctgaaagctggtgcaactaaaccatcattgaaggtaccggaccaaggtttaggtcctacatcatatcatattgtcaaggcattattaacttctagaaagttgttgctggaagaactgaagaaaatcagtggtgctattggtaagacagtagaggaattagatgttgctgacttgaatcttggtagatatgagtcatttaatccatcaaaatctggattaccaaattctagtaaagtgttccctgcaactggcaagggtgtgggacagttgactggagttttacatgatttcttggagaaaaacaacgatatggttaatggtacagatgattctatgctggtaaataaaacaaagatattggagtacttgcacgatgcttgggctattgacaggaaggcagaatggtcaatatggactgttcactcaaaaattgagatccctcatcgctatttgcggagtatgaatgatgaatcatctcaccgtcattcacttcttagagtttctggatcaaggaagttccatgacgatcctgcacagaactctgcttcacgggctgaactacaccggaaaagcatagcacaaatgaagatcaatacacaatctgttcaagatatgcatatatatgctgatccttca

SEQ ID NO: 218379 - DNA, 3337 bp, Zea Mays
cacgcgccgccactaggtgtcacccgtccttgcgccgccgccgcatccttcgactttcgatctgcgagctagcgattctccgctgaggagtggggcccatccctccggagcccaaccccagggcatccgcccgcccccgccgccgtggctcaggccccacgcgtcatccccgcgacggacaacgtagtcacgcaggtggagcgcggtccactcccccccccccccccccccccgcgcttcgcctccgctgagaccgcgccctgctggtgcgagtacccgggagcttccaaaccctagggccgggcatcgagcgagcgagggggtgagcgcggagcccaggcatgccttgccgcccgcggggatccaggcagtgatgcgcggatcggcgcggcgggggcggcccggaagctcggccgcatgaggtgcctcgtcggcggcggcgtccaggacagcccgcgcgcagcggccaaaagagtatcgccggcgtcgtggcggctggacgccgccacagcggaggcggacgcggggagagctgaggccaagggggtcaggttctgcgtcaggccgccggacgtcatggagacggtgcacgaggtggccatttacatccaccgcttccacaacctcgatctgtttcagcaaggatggtatcagatgaagattagtgcaatgtgggaggaaggtggcaacaaaacaccggcttcacctgccagggtcgtgcaatatgaagcttctgatgttggtgcggatgatgcattaggcatttggaaaatagatgacgtcgacaatagcttccacacacagccgtttcggatcaagtatgccagacaagatatctatctgtcagttatggtgtcgttcaacatattcaacattgaagaggagcagcctcggcggtgatgttgaagtttgagctgatgtatgccccaacactagagaacgggtctgagcttcaagcttctagtgtcacatcttcagcagctgtgcatgaatttaggatcccccacagagcactcctgggtctacactcctactgtccagttcattttgatgcgttccactctgtgcttgttgatctgacattacacatagtgtacctgaaagctggtgcaactaaaccatcattgaaggtaccggaccaaggtttaggtcctacatcatatcatattgtcaaggcattattaacttctagaaagttgttgctggaagaactgaagaaaatcagtggtgctattggtaagacagtagaggaattagatgttgctgacttgaatcttggtagatatgagtcatttaatccatcaaaatctggattaccaaattctagtaaagtgttccctgcaactggcaagggtgtgggacagttgactggagttttacatgatttcttggagaaaaacaacgatatggttaatggtacagatgattctatgctgtatactcttccccaggaagagttgtttgaactatttctaactctgagcggacaacttttcacttatatggaatgcatttttgaaatttcatagggtaaataaaacaaagatattggagtacttgcacgatgcttgggctattgacaggaaggcagaatggtcaatatggactgttcactcaaaaattgagatccctcatcgctatttgcggagtatgaatgatgaatcatctcaccgtcattcacttcttagagtttctggatcaaggaagttccatgacgatcctgcacagaactctgcttcacgggctgaactacaccggaaaagcatagcacaaatgaagatcaatacacaatctgttcaagatatgcatatatatgctgatccttcacatgttcctgttgttcttatagaacaacatgtcatggttgttccacagcatagttccagcaaggatttggcttcgaatgcttctgaacaaaaggatactattgtgctacctaaactacaaggagagcctctggtacccaaaagtagtgttgggccaccatttggatttacgtcttgttagaaaccaatggcttctattggaccctggagctgattgcctaatgtctgaggctaatgaagataaaacatctggagacttcaaagaaatgggtagcaggttggccggggaggtaattgccttcctgaagaagaaaatggataagctttctagatatggaggctgcaaagagctgaagttaagttttgtcggccattccatcgggaacatcatcattagaagtgccctggcagaacctgcattgcagccatacttgaagaacctctacacttacatgtcaatatcagggcctcacttgggttactggtacagttcaaattctttgttcaattctggactctggctgctgaaaaagctcaagaatgctcaatgcatccatcaactcactttcagtgatgatcaagacccccacaatacatacttctataagctttgcaagttgaaaacattggagaacttcaaaaatatcatattgttatcatcaccacaggatggctatgtaccatatcactcagcgagaatggagctctgcccagccgcatcatcggacacctcaaagaagggtcaagtcttcacagaaatgctcaacaattgcttggatcagatccgtgcgccctcatctgacacccggacgttcatgcgctgcgatgtgaattttgaccagtccaaccacggacggagcctgaacaccatgattggcagggcagcccacatcgagttccttgagaccgacatctacgccaagttcatcatgtggtccttccctgacctgttccgatgacagacaacgccgctcgtctctgtaatgtctctgtaatactgctgcataccaaacctacaaaccgatagcgcacactactgagtactgaccaggcaaggaaaagtaagcttgcataaaggctcccccagaatccaacaccgccacaggcagagtagcgctgtaaagatcctagaagcaacggtttttccagcttgctagatctgattctgtataaatagttgattctttcgtcattccattcatagtgctgtagatgtgcacctttgctgtgaatttataatcctttgtcggcttgtgtatctaacgcttcggtttaggatgtgctgacaatcagtgagcttatgtccaaataagccccctttcttaatgtttggttttagtcaccttggtctttgtgctgctgtaaatccagggtgttgtttctgtttggtgaaatgactgctacatgaatatctggttctggcatcttgccatagccggatcttgcttctgctaaggttattcctatcagggatatataggattggaaaaaaatatgaaagattttgattt

SEQ ID NO: 218380 - DNA, 3345 bp, Zea Mays
cacgcgccgccactaggtgtcacccgtccttgcgccgccgccgcatccttcgactttcgatctgcgagctagcgattctccgctgaggagtggggcccatccctccggagcccaaccccagggcatccgcccgcccccgccgccgtggctcaggccccacgcgtcatccccgcgacggacaacgtagtcacgcaggtggagcgcggtccactcccccccccccccccccccccgcgcttcgcctccgctgagaccgcgccctgctggtgcgagtacccgggagcttccaaaccctagggccgggcatcgagcgagcgagggggtgagcgcggagcccaggcatgccttgccgcccgcggggatccaggcagtgatgcgcggatcggcgcggcgggggcggcccggaagctcggccgcatgaggtgcctcgtcggcggcggcgtccaggacagcccgcgcgcagcggccaaaagagtatcgccggcgtcgtggcggctggacgccgccacagcggaggcggacgcggggagagctgaggccaagggggtcaggttctgcgtcaggccgccggacgtcatggagacggtgcacgaggtggccatttacatccaccgcttccacaacctcgatctgtttcagcaaggatggtatcagatgaagattagtgcaatgtgggaggaaggtggcaacaaaacaccggcttcacctgccagggtcgtgcaatatgaagcttctgatgttggtgcggatgatgcattaggcatttggaaaatagatgacgtcgacaatagcttccacacacagccgtttcggatcaagtatgccagacaagatatctatctgtcagttatggtgtcgttcaacatattcaacattgaagaggagcagcctcggcggtgatgttgaagtttgagctgatgtatgccccaacactagagaacgggtctgagcttcaagcttctagtgtcacatcttcagcagctgtgcatgaatttaggatcccccacagagcactcctgggtctacactcctactgtccagttcattttgatgcgttccactctgtgcttgttgatctgacattacacatagtgtacctgaaagctggtgcaactaaaccatcattgaaggtacacaggtaccggaccaaggtttaggtcctacatcatatcatattgtcaaggcattattaacttctagaaagttgttgctggaagaactgaagaaaatcagtggtgctattggtaagacagtagaggaattagatgttgctgacttgaatcttggtagatatgagtcatttaatccatcaaaatctggattaccaaattctagtaaagtgttccctgcaactggcaagggtgtgggacagttgactggagttttacatgatttcttggagaaaaacaacgatatggttaatggtacagatgattctatgctgtatactcttccccaggaagagttgtttgaactatttctaactctgagcggacaacttttcacttatatggaatgcatttttgaaatttcatagggtaaataaaacaaagatattggagtacttgcacgatgcttgggctattgacaggaaggcagaatggtcaatatggactgttcactcaaaaattgagatccctcatcgctatttgcggagtatgaatgatgaatcatctcaccgtcattcacttcttagagtttctggatcaaggaagttccatgacgatcctgcacagaactctgcttcacgggctgaactacaccggaaaagcatagcacaaatgaagatcaatacacaatctgttcaagatatgcatatatatgctgatccttcacatgttcctgttgttcttatagaacaacatgtcatggttgttccacagcatagttccagcaaggatttggcttcgaatgcttctgaacaaaaggatactattgtgctacctaaactacaaggagagcctctggtacccaaaagtagtgttgggccaccatttggatttacgtcttgttagaaaccaatggcttctattggaccctggagctgattgcctaatgtctgaggctaatgaagataaaacatctggagacttcaaagaaatgggtagcaggttggccggggaggtaattgccttcctgaagaagaaaatggataagctttctagatatggaggctgcaaagagctgaagttaagttttgtcggccattccatcgggaacatcatcattagaagtgccctggcagaacctgcattgcagccatacttgaagaacctctacacttacatgtcaatatcagggcctcacttgggttactggtacagttcaaattctttgttcaattctggactctggctgctgaaaaagctcaagaatgctcaatgcatccatcaactcactttcagtgatgatcaagacccccacaatacatacttctataagctttgcaagttgaaaacattggagaacttcaaaaatatcatattgttatcatcaccacaggatggctatgtaccatatcactcagcgagaatggagctctgcccagccgcatcatcggacacctcaaagaagggtcaagtcttcacagaaatgctcaacaattgcttggatcagatccgtgcgccctcatctgacacccggacgttcatgcgctgcgatgtgaattttgaccagtccaaccacggacggagcctgaacaccatgattggcagggcagcccacatcgagttccttgagaccgacatctacgccaagttcatcatgtggtccttccctgacctgttccgatgacagacaacgccgctcgtctctgtaatgtctctgtaatactgctgcataccaaacctacaaaccgatagcgcacactactgagtactgaccaggcaaggaaaagtaagcttgcataaaggctcccccagaatccaacaccgccacaggcagagtagcgctgtaaagatcctagaagcaacggtttttccagcttgctagatctgattctgtataaatagttgattctttcgtcattccattcatagtgctgtagatgtgcacctttgctgtgaatttataatcctttgtcggcttgtgtatctaacgcttcggtttaggatgtgctgacaatcagtgagcttatgtccaaataagccccctttcttaatgtttggttttagtcaccttggtctttgtgctgctgtaaatccagggtgttgtttctgtttggtgaaatgactgctacatgaatatctggttctggcatcttgccatagccggatcttgcttctgctaaggttattcctatcagggatatataggattggaaaaaaatatgaaagattttgattt

SEQ ID NO: 218381 - DNA, 3367 bp, Zea Mays
cacgcgccgccactaggtgtcacccgtccttgcgccgccgccgcatccttcgactttcgatctgcgagctagcgattctccgctgaggagtggggcccatccctccggagcccaaccccagggcatccgcccgcccccgccgccgtggctcaggccccacgcgtcatccccgcgacggacaacgtagtcacgcaggtggagcgcggtccactcccccccccccccccccccccgcgcttcgcctccgctgagaccgcgccctgctggtgcgagtacccgggagcttccaaaccctagggccgggcatcgagcgagcgagggggtgagcgcggagcccaggcatgccttgccgcccgcggggatccaggcagtgatgcgcggatcggcgcggcgggggcggcccggaagctcggccgcatgaggtgcctcgtcggcggcggcgtccaggacagcccgcgcgcagcggccaaaagagtatcgccggcgtcgtggcggctggacgccgccacagcggaggcggacgcggggagagctgaggccaagggggtcaggttctgcgtcaggccgccggacgtcatggagacggtgcacgaggtggccatttacatccaccgcttccacaacctcgatctgtttcagcaaggatggtatcagatgaagattagtgcaatgtgggaggaaggtggcaacaaaacaccggcttcacctgccagggtcgtgcaatatgaaggcatttggaaaatagatgacgtcgacaatagcttccacacacagccgtttcggatcaagtatgccagacaagatatctatctgtcagttatggtgtcgttcaacatattcaacattgaagaggagggtccagcagcctcggcggtgatgttgaagtttgagctgatgtatgccccaacactagagaacgggtctgagcttcaagcttctagtgtcacatcttcagcagctgtgcatgaatttaggatcccccacagagcactcctgggtctacactcctactgtccagttcattttgatgcgttccactctgtgcttgttgatctgacattacacatagtgtacctgaaagctggtgcaactaaaccatcattgaaggtaccggaccaaggtttaggtcctacatcatatcatattgtcaaggcattattaacttctagaaagttgttgctggaagaactgaagaaaatcagtggtgctattggtaagacagtagaggaattagatgttgctgacttgaatcttggtagatatgagtcatttaatccatcaaaatctggattaccaaattctagtaaagtgttccctgcaactggcaagggtgtgggacagttgactggagttttacatgatttcttggagaaaaacaacgatatggttaatggtacagatgattctatgctgtatactcttccccaggaagagttgtttgaactatttctaactctgagcggacaacttttcacttatatggaatgcatttttgaaatttcatagggtaaataaaacaaagatattggagtacttgcacgatgcttgggctattgacaggaaggcagaatggtcaatatggactgttcactcaaaaattgagatccctcatcgctatttgcggagtatgaatgatgaatcatctcaccgtcattcacttcttagagtttctggatcaaggaagttccatgacgatcctgcacagaactctgcttcacgggctgaactacaccggaaaagcatagcacaaatgaagatcaatacacaatctgttcaagatatgcatatatatgctgatccttcacatgttcctgttgttcttatagaacaacatgtcatggttgttccacagcatagttccagcaaggatttggcttcgaatgcttctgaacaaaaggatactattgtgctacctaaactacaaggagagcctctggtacccaaaagtagtgttggtaaaaaaagtgggcgcatcttgcgagctgtcatttttgtgcatggttttcagggccaccatttggatttacgtcttgttagaaaccaatggcttctattggaccctggagctgattgcctaatgtctgaggctaatgaagataaaacatctggagacttcaaagaaatgggtagcaggttggccggggaggtaattgccttcctgaagaagaaaatggataagctttctagatatggaggctgcaaagagctgaagttaagttttgtcggccattccatcgggaacatcatcattagaagtgccctggcagaacctgcattgcagccatacttgaagaacctctacacttacatgtcaatatcagggcctcacttgggttactggtacagttcaaattctttgttcaattctggactctggctgctgaaaaagctcaagaatgctcaatgcatccatcaactcactttcagtgatgatcaagacccccacaatacatacttctataagctttgcaagttgaaaacattggagaacttcaaaaatatcatattgttatcatcaccacaggatggctatgtaccatatcactcagcgagaatggagctctgcccagccgcatcatcggacacctcaaagaagggtcaagtcttcacagaaatgctcaacaattgcttggatcagatccgtgcgccctcatctgacacccggacgttcatgcgctgcgatgtgaattttgaccagtccaaccacggacggagcctgaacaccatgattggcagggcagcccacatcgagttccttgagaccgacatctacgccaagttcatcatgtggtccttccctgacctgttccgatgacagacaacgccgctcgtctctgtaatgtctctgtaatactgctgcataccaaacctacaaaccgatagcgcacactactgagtactgaccaggcaaggaaaagtaagcttgcataaaggctcccccagaatccaacaccgccacaggcagagtagcgctgtaaagatcctagaagcaacggtttttccagcttgctagatctgattctgtataaatagttgattctttcgtcattccattcatagtgctgtagatgtgcacctttgctgtgaatttataatcctttgtcggcttgtgtatctaacgcttcggtttaggatgtgctgacaatcagtgagcttatgtccaaataagccccctttcttaatgtttggttttagtcaccttggtctttgtgctgctgtaaatccagggtgttgtttctgtttggtgaaatgactgctacatgaatatctggttctggcatcttgccatagccggatcttgcttctgctaaggttattcctatcagggatatataggattggaaaaaaatatgaaagattttgattt

SEQ ID NO: 218382 - DNA, 2464 bp, Zea Mays
ggtggattgtgcagcttctgatgttggtgcggatgatgcattaggcatttggaaaatagatgacgtcgacaatagcttccacacacagccgtttcggatcaagtatgccagacaagatatctatctgtcagttatggtgtcgttcaacatattcaacattgaagaggagggtccagcagcctcggcggtgatgttgaagtttgagctgatgtatgccccaacactagagaacgggtctgagcttcaagcttctagtgtcacatcttcagcagctgtgcatgaatttaggatcccccacagagcactcctgggtctacactcctactgtccagttcattttgatgcgttccactctgtgcttgttgatctgacattacacatagtgtacctgaaagctggtgcaactaaaccatcattgaaggtaccggaccaaggtttaggtcctacatcatatcatattgtcaaggcattattaacttctagaaagttgttgctggaagaactgaagaaaatcagtggtgctattggtaagacagtagaggaattagatgttgctgacttgaatcttggtagatatgagtcatttaatccatcaaaatctggattaccaaattctagtaaagtgttccctgcaactggcaagggtgtgggacagttgactggagttttacatgatttcttggagaaaaacaacgatatggttaatggtacagatgattctatgctggtaaataaaacaaagatattggagtacttgcacgatgcttgggctattgacaggaaggcagaatggtcaatatggactgttcactcaaaaattgagatccctcatcgctatttgcggagtatgaatgatgaatcatctcaccgtcattcacttcttagagtttctggatcaaggaagttccatgacgatcctgcacagaactctgcttcacgggctgaactacaccggaaaagcatagcacaaatgaagaacaacatgtcatggttgttccacagcatagttccagcaaggatttggcttcgaatgcttctgaacaaaaggatactattgtgctacctaaactacaaggagagcctctggtacccaaaagtagtgttgggccaccatttggatttacgtcttgttagaaaccaatggcttctattggaccctggagctgattgcctaatgtctgaggctaatgaagataaaacatctggagacttcaaagaaatgggtagcaggttggccggggaggtaattgccttcctgaagaagaaaatggataagctttctagatatggaggctgcaaagagctgaagttaagttttgtcggccattccatcgggaacatcatcattagaagtgccctggcagaacctgcattgcagccatacttgaagaacctctacacttacatgtcaatatcagggcctcacttgggttactggtacagttcaaattctttgttcaattctggactctggctgctgaaaaagctcaagaatgctcaatgcatccatcaactcactttcagtgatgatcaagacccccacaatacatacttctataagctttgcaagttgaaaacattggagaacttcaaaaatatcatattgttatcatcaccacaggatggctatgtaccatatcactcagcgagaatggagctctgcccagccgcatcatcggacacctcaaagaagggtcaagtcttcacagaaatgctcaacaattgcttggatcagatccgtgcgccctcatctgacacccggacgttcatgcgctgcgatgtgaattttgaccagtccaaccacggacggagcctgaacaccatgattggcagggcagcccacatcgagttccttgagaccgacatctacgccaagttcatcatgtggtccttccctgacctgttccgatgacagacaacgccgctcgtctctgtaatgtctctgtaatactgctgcataccaaacctacaaaccgatagcgcacactactgagtactgaccaggcaaggaaaagtaagcttgcataaaggctcccccagaatccaacaccgccacaggcagagtagcgctgtaaagatcctagaagcaacggtttttccagcttgctagatctgattctgtataaatagttgattctttcgtcattccattcatagtgctgtagatgtgcacctttgctgtgaatttataatcctttgtcggcttgtgtatctaacgcttcggtttaggatgtgctgacaatcagtgagcttatgtccaaataagccccctttcttaatgtttggttttagtcaccttggtctttgtgctgctgtaaatccagggtgttgtttctgtttggtgaaatgactgctacatgaatatctggttctggcatcttgccatagccggatcttgcttctgctaaggttattcctatcagggatatataggattggaaaaaaatatgaaagattttgattt

SEQ ID NO: 218383 - DNA, 2855 bp, Zea Mays
attacttagagcatatctaacaatgtatgtataattgtctgtattcctttcaatgttacctcaatagtagtcaaaatgtgcaagcccaaggatacatttccattttgtgataaagtggtgatgatgaactacggaaaagtgaaaacacaactaaacttctgatgttggtgcggatgatgcattaggcatttggaaaatagatgacgtcgacaatagcttccacacacagccgtttcggatcaagtatgccagacaagatatctatctgtcagttatggtgtcgttcaacatattcaacattgaagaggaggttggcattttgacatatcacctttgatttgaattaacattactatagctttattaaagcctgctatatttgttcaagggtccagcagcctcggcggtgatgttgaagtttgagctgatgtatgccccaacactagagaacgggtctgagcttcaagcttctagtgtcacatcttcagcagctgtgcatgaatttaggatcccccacagagcactcctgggtctacactcctactgtccagttcattttgatgcgttccactctgtgcttgttgatctgacattacacatagtgtacctgaaagctggtgcaactaaaccatcattgaaggtacacaggtaccggaccaaggtttaggtcctacatcatatcatattgtcaaggcattattaacttctagaaagttgttgctggaagaactgaagaaaatcagtggtgctattggtaagacagtagaggaattagatgttgctgacttgaatcttggtagatatgagtcatttaatccatcaaaatctggattaccaaattctagtaaagtgttccctgcaactggcaagggtgtgggacagttgactggagttttacatgatttcttggagaaaaacaacgatatggttaatggtacagatgattctatgctgtatactcttccccaggaagagttgtttgaactatttctaactctgagcggacaacttttcacttatatggaatgcatttttgaaatttcatagggtaaataaaacaaagatattggagtacttgcacgatgcttgggctattgacaggaaggcagaatggtcaatatggactgttcactcaaaaattgagatccctcatcgctatttgcggagtatgaatgatgaatcatctcaccgtcattcacttcttagagtttctggatcaaggaagttccatgacgatcctgcacagaactctgcttcacgggctgaactacaccggaaaagcatagcacaaatgaagatcaatacacaatctgttcaagatatgcatatatatgctgatccttcacatgttcctgttgttcttatagaacaacatgtcatggttgttccacagcatagttccagcaaggatttggcttcgaatgcttctgaacaaaaggatactattgtgctacctaaactacaaggagagcctctggtacccaaaagtagtgttgggccaccatttggatttacgtcttgttagaaaccaatggcttctattggaccctggagctgattgcctaatgtctgaggctaatgaagataaaacatctggagacttcaaagaaatgggtagcaggttggccggggaggtaattgccttcctgaagaagaaaatggataagctttctagatatggaggctgcaaagagctgaagttaagttttgtcggccattccatcgggaacatcatcattagaagtgccctggcagaacctgcattgcagccatacttgaagaacctctacacttacatgtcaatatcagggcctcacttgggttactggtacagttcaaattctttgttcaattctggactctggctgctgaaaaagctcaagaatgctcaatgcatccatcaactcactttcagtgatgatcaagacccccacaatacatacttctataagctttgcaagttgaaaacattggagaacttcaaaaatatcatattgttatcatcaccacaggatggctatgtaccatatcactcagcgagaatggagctctgcccagccgcatcatcggacacctcaaagaagggtcaagtcttcacagaaatgctcaacaattgcttggatcagatccgtgcgccctcatctgacacccggacgttcatgcgctgcgatgtgaattttgaccagtccaaccacggacggagcctgaacaccatgattggcagggcagcccacatcgagttccttgagaccgacatctacgccaagttcatcatgtggtccttccctgacctgttccgatgacagacaacgccgctcgtctctgtaatgtctctgtaatactgctgcataccaaacctacaaaccgatagcgcacactactgagtactgaccaggcaaggaaaagtaagcttgcataaaggctcccccagaatccaacaccgccacaggcagagtagcgctgtaaagatcctagaagcaacggtttttccagcttgctagatctgattctgtataaatagttgattctttcgtcattccattcatagtgctgtagatgtgcacctttgctgtgaatttataatcctttgtcggcttgtgtatctaacgcttcggtttaggatgtgctgacaatcagtgagcttatgtccaaataagccccctttcttaatgtttggttttagtcaccttggtctttgtgctgctgtaaatccagggtgttgtttctgtttggtgaaatgactgctacatgaatatctggttctggcatcttgccatagccggatcttgcttctgctaaggttattcctatcagggatatataggattggaaaaaaatatgaaagattttgattt

SEQ ID NO: 218384 - DNA, 2786 bp, Zea Mays
atgtgcaagcccaaggatacatttccattttgtgataaagtggtgatgatgaactacggaaaagtgaaaacacaactaaagcatttggaaaatagatgacgtcgacaatagcttccacacacagccgtttcggatcaagtatgccagacaagatatctatctgtcagttatggtgtcgttcaacatattcaacattgaagaggagggtccagcagcctcggcggtgatgttgaagtttgagctgatgtatgccccaacactagagaacgggtctgagcttcaagcttctagtgtcacatcttcagcagctgtgcatgaatttaggatcccccacagagcactcctgggtctacactcctactgtccagttcattttgatgcgttccactctgtgcttgttgatctgacattacacatagtgtacctgaaagctggtgcaactaaaccatcattgaaggtacacaggtaccggaccaaggtttaggtcctacatcatatcatattgtcaaggcattattaacttctagaaagttgttgctggaagaactgaagaaaatcagtggtgctattggtaagacagtagaggaattagatgttgctgacttgaatcttggtagatatgagtcatttaatccatcaaaatctggattaccaaattctagtaaagtgttccctgcaactggcaagggtgtgggacagttgactggagttttacatgatttcttggagaaaaacaacgatatggttaatggtacagatgattctatgctgtatactcttccccaggaagagttgtttgaactatttctaactctgagcggacaacttttcacttatatggaatgcatttttgaaatttcatagggtaaataaaacaaagatattggagtacttgcacgatgcttgggctattgacaggaaggcagaatggtcaatatggactgttcactcaaaaattgagatccctcatcgctatttgcggagtatgaatgatgaatcatctcaccgtcattcacttcttagagtttctggatcaaggaagttccatgacgatcctgcacagaactctgcttcacgggctgaactacaccggaaaagcatagcacaaatgaagatcaatacacaatctgttcaagatatgcatatatatgctgatccttcacatgttcctgttgttcttatagaacaacatgtcatggttgttccacagcatagttccagcaaggatttggcttcgaatgcttctgaacaaaaggatactattgtgctacctaaactacaaggagagcctctggtacccaaaagtagtgttggtaaaaaaagtgggcgcatcttgcgagctgtcatttttgtgcatggttttcagggccaccatttggatttacgtcttgttagaaaccaatggcttctattggaccctggagctgattgcctaatgtctgaggctaatgaagataaaacatctggagacttcaaagaaatgggtagcaggttggccggggaggtaattgccttcctgaagaagaaaatggataagctttctagatatggaggctgcaaagagctgaagttaagttttgtcggccattccatcgggaacatcatcattagaagtgccctggcagaacctgcattgcagccatacttgaagaacctctacacttacatgtcaatatcagggcctcacttgggttactgtgatgatcaagacccccacaatacatacttctataagctttgcaagttgaaaacattggagaacttcaaaaatatcatattgttatcatcaccacaggttattcccttttctcatctcaaatagtaatttacttgtgtacacggaatttgttttgctgcactaaatgatttggccccaatccctatatagtccttattgcatgtcatgacttgcgagcaatgcacatgtttttctttctttcaaggatggctatgtaccatatcactcagcgagaatggagctctgcccagccgcatcatcggacacctcaaagaagggtcaagtcttcacagaaatgctcaacaattgcttggatcagatccgtgcgccctcatctgacacccggacgttcatgcgctgcgatgtgaattttgaccagtccaaccacggacggagcctgaacaccatgattggcagggcagcccacatcgagttccttgagaccgacatctacgccaagttcatcatgtggtccttccctgacctgttccgatgacagacaacgccgctcgtctctgtaatgtctctgtaatactgctgcataccaaacctacaaaccgatagcgcacactactgagtactgaccaggcaaggaaaagtaagcttgcataaaggctcccccagaatccaacaccgccacaggcagagtagcgctgtaaagatcctagaagcaacggtttttccagcttgctagatctgattctgtataaatagttgattctttcgtcattccattcatagtgctgtagatgtgcacctttgctgtgaatttataatcctttgtcggcttgtgtatctaacgcttcggtttaggatgtgctgacaatcagtgagcttatgtccaaataagccccctttcttaatgtttggttttagtcaccttggtctttgtgctgctgtaaatccagggtgttgtttctgtttggtgaaatgactgctacatgaatatctggttctggcatcttgccatagccggatcttgcttctgctaaggttattcctatcagggatatataggattggaaaaaaatatgaaagattttgattt

SEQ ID NO: 218385 - DNA, 4186 bp, Zea Mays
cttcggcgttatattcggtccctgcgttctctctctccggttccccacctcccgcggcgagccggggcgctagggttttctacatggatccgcgccgcgcacccccgcggggcggcggcgggctctcttactccacgctgttcaacctcgagcctttgcagaacttaagggttcctgtaccagaaaatctcgcccgctacgggaacagcagctcaaatgggagtccaagcagtgagggtcaaggatccttgttggatcagtacaatggtgtacatgatgcttcccatggcttgcatcggaagcgaaaaaagcaccctgatggtgccggcgatgatgatcatgcagatgcctatagtaacaaaatgatggaggatcactaccgtgcgatgctcagtgaacatgtccagaagtaccgaaggtcaaagtttaaggagggtgcttttatttccgatccttctcaggtggcaatcccccaaataaaacacaaaaacggtggtaaaaaagttatgaagcacattagtaatttcagggatattgcggcattaaatgggatagaagcttcacatgagtataattggatagaatgtattgaaactcatggtggttttaataagcttgtagcatccgttgattccacctatttagatatgggggataatatacactacttagttccagagggttatgataagttagcattatcccttaacctccctatttcttctgatatacgtgttgaggagcacttcttgaagggcgcactagatttgtgcaccctatcagcaatgcttggtactgaccaaaggtttgaggcttccagccatggtggattatctgaacccctgccacaatttgaatctctcaaggaaagggtaaaggtgcagaaattttctcttcaagttaccgaggacccctttgcaattccggaaggagcagctgggaggatacgaaggtctattatatcagaaactggcaatttgcaggtccattacgtcaaagtcttggaaaaaggagatacatatgagattattgagcgcagcttaccaaagaagcaaatagtaaagaaggaaccttttgtaatcgtgaaagaagagtctgaaaagacttacaaactctggcagtatcttgctactaaaagcattccaaagcatcacaggaattttacttctttgatgaagaaacgacaagtagatgcgaagcgcttctctgatagttgtcaacgagaggtaaaattcaaagtaaggaggtcactgaaactgatgagatgtgctgcaatacgtacaaggcagttggctagggatatgctgatattttggaaacgagtagacaaagagcagtatgagttgagaaaaaaagaggaaagagaagctgctgaagctttaaaacgtgaggaggagcttcgtgaagccaaaagacaacaacagaggctaaactttctgctgtcacaaacggagctttatagtcatttcatgcagaacaaggctggtggctcagcgccacctgatgaggaagatgtccctgatgaagatgaggaagaagatcctgaagaagctcaattgaaaagagaggccttgagggcagctcagcatgccgtttctcaacaaaagatgaggactaatgcatttgatagtgaaactgtgaggcttcgtcaaacttctgagtctgttcttccaactgatgattcatctagcatggatcctagtaagattgatctattacacccttcaacaatgcctgagaagtcatctgtgcaaacaccagagttgtttaagggtgtattaaaagaatatcagttaaaaggcttacaatggctggttaattgttatgaacaggggttgaatggcattcttgctgatgagatgggtcttggcaaaactgttcaggctatggcattcctgtctcatttggctgaggacaaaaacatatggggcccctttctagtggtggctcctgcatctgttgtgaataactgggctgaggagttgattagattctgccctgacctaaagatacttccttactggggcccagagaggatgattcttcgaaagaacatcaaccccaagcgtttgtatcgcagagatgctagcttccacattcttattacaaactatcagatacttgtgaatgaagagaagcttttgagacgtgttaagtggcaatacatggtactggatgaggcccaggctatcaaaagttcaagcagcgctggaagacattactgagctttagctgtagaaatcgtctacttcttactgggacaccaatacagaacaatatggctgagttatgggcacttcttcatttcatcatgcccactctatttgacagccatgaacagttcaacgagtggttctcaaagggtattgagggtcatgctgagcatggaggagctttgaatgaacatcagcttagtagattgcatgctattttgaagcccttcatgctccgccgggttaagattgatgtcattgctgaaatgaccaaaaagaaagaagaaattgttccctgcaaattgagttctcgtcaacaaattttctatcaagctataaaaaataagatctcgcttaacgagttgcttgatggaagtcgtggcaatctaaatgacaagaagttacttagcctgatgaatattgtcatgcagctacggaaggtctgcaatcacccggagctgtttgagcgcaatgagggaagctcttacttttactttgctgatatcccaaactcacttctttctcccccgtttggggcattacaagatgtacattatgcaggcaagagaaatcctataatctttgagatcccaaagttagtttatgatggaatcatctgcaacacagaaaattctggaagcatctgtggatttcagaatggatatttgaacaggttgtttaatatatttttgccaagcaatatccatcgctcagccattccagaagttaattcatcaaatgagtctgttttatcatctggtgcatttggctttacacgtttgtcaaacctgtgcccagttgaagctttcttcctggccacttcatcattctttgagggactagcattttcagtaatgcgatggaataggaactacactgatgaaattatggatgcattccttgattcagaagatactgacatccagttcagtcagaatgattccacaagagttcgtgcagttgcccggttgttgctttcttctacaaaggccaagcccagcttacttaggacaaagattggaactggcccaagtgaaggcccatatgaagcactggtgctttctcatcatgacaggcttgcttcgaacataagggttcttcgttcagcatacacttatattccgccagctagagcaccacctataaatgtttcatgtgctgatcgaaattttgcctataagttcactgatgagatgtatgatccttgggtcatgaaactgttcctgggatttgctcgtacttccgagttcaatggtcctagacaaccagttgctcttcatcctttgatacaagaactcaatactgatttgcctatccttgagccgatgctgcagctaccctataggatatttgggtcttctccaccgatgagtaattttgatccagctaaaatgctcactgattctgggaagctccacaccttggatatgctactacggcgccttcgagctgaaggtcaccgtgtgcttctttttgctcagatgactaaaatgctggacattcttgaggattacatgaattttagaaaattcaagtatttcagacttgatgggtcttctgcaatctcagaccgccgtgacatggtccgagctttccagaacaggaatgatgtatttgttttcttgttaagcacaagagctggggggcttggtattaatttgactgctgctgatactgttattttttatgaaattgactggaatccaacacaagaccagcaggcaatggatagaacacacagacttggtcaaacaaaggaggtaactgtgtacaggcttatatgcaaagatactatcgaggagaaaatattgcaaagagcaaagcagaaaaatgcagtgcaagagttggttatgaaggggaaacatgttcaggacgatcatttgttgagacaagaggatgttgtttcattacttattgatgacacacaaattgcacataagttgaaagaaatatccatgcaggtaaacatcaca

SEQ ID NO: 218386 - DNA, 2143 bp, Zea Mays
atgttccagtcctcggtactccagtccagacatgaggatctgtatggtgcagcaccatcaggattcaggacagtagtgcggctagtgcctgtggcgaccttgcatttgccactgcgagtaccggtccaagttcttgaaaagcgattgaatgatcaattcgtcatgcgccgtgctcttgagaaagctctaggttacaagccttgtgctatccatgcatcaagtgagaactgcattccaaagccgactgaggagctaataaaggagattgcagttctcgagctagaggtcatatgcttggagcaacatctcctaacactatacagaaaggcatttgagcaacaattttcccctgcaagttctgcttgtgacatggagagcaacaagcagccagcaaggtccttttcaggcatactctctgaagctccagagctgagcttctcgaccccaaggaagcatcatcagctaaaccagtccagtcgaatggtcctggcacgcaagtccacgcctacagcttctacaagcgagactagcaatgagaagatcaatatcggacgcagccattcctcgctcctgcaccgctccgttagggtatctccgtcggcaaacaatctcgctagagctctgaaaccatgccatacttcgcctctatcttttgttgaggaagggaaatgcatggatcctggcgtggtgagtttggcagacatcttggggaccagggtcgcggaccatgttccccaaacgccgaacaagatatccgaggacatgatcaaatgcattacggccgtatacatgaggctgagagacgtccccgccgtgcagcacgccttcttcccctcaccgtgctcatccttttcttcggcgagcgggctgtcttccaaatacaccgcggacatatggagccccaggtgcaggaaagagagcttcgttgaggagtggcaggacaacgggttaggcaacggtgaatctagggagctggccctgccatatgattctgtggtagaggtgtctgctctttgcaaaggtgatcagaggtccgctgacgtgaaggatatgctgcgcaaatacatgtcacttgtgcagcttctcgaaagcgttgatctcagcgggatgaaacatgaagagaagctcgctttctggatcaacgtgcataatgcgatgatgatgcatgcccatatagagtacgggatcccacagagtaacagcaaaaggatactgcttaccaaggtgtcgtacatcattagtggccaaagagtgaacgcggagctgatagagtaccagatcctgtgctgccgagcgcactcttctggacagtggcttcggctgctgctatacccgaaatggaagtccagggacaaggacgagctgcaaggcttcgccgtggaccgccccgagccgctggtgcacttcgcactgtcctccggtgcggctgtacagccccaagagcgtgttccagcagctggaggcggcgaaggaggagtacgtccgcgccaacgtgggcgtccgcgggcgggggcagcacaagatcatcctccccaaggccctggagctgtacgcgagggacgccgggctgggcgcgcaggaggtggtggccgcggtcgagtgccacctgcccgagggcctccgggacgccgtgcgccggagccagcagcaggccggccgggcgcgcgccgtggagtggaagccccacaacctggcgttccggtacctgctggccaaggagctggtcggcgggtcccccgcgtgcagccggccgctggagccggtcagtgcgccgctgcgggctggtccgtgatccgtcatcagatcgccgtgggcccgtggccgtgccgagccgagcacgagttgagatgtgcggcggcggcacactgcgttcgggccttgggggcgttgtatgtacagagagtcagagagatggacggcgaaacagacatctgattttactcgtaccagtatgcgccctgctgtcaaactgtgaatagtgaattccgcctagccgcccacgttattgactgacgctcgagcgctgcagctgcagctggcctgctgcgcttgccctgcgcctgcacaacccgccctcgttttttttttggataaaggggagtttatttcattaagctaatgaaaaacagtgctcggtctctac

SEQ ID NO: 218387 - DNA, 1676 bp, Zea Mays
caccgtcaccgggtgagtcatcatccaggtagccgttggcgttgggtggtggcctggtgggcgccgctcgctagtagagtagagcctactagccttttgtcctataaaacgcggcggcgggggcagcgcctcttcctcgcaccaccaccgtcactcaacacagcacaggcagctcgagagagagagagagagaaagatgtcgtggttcgggcaccaccaccacaaccagccggctcccccggcgtcgggccccaaccaggtgttcaagatcttctgccgcgccaacgagaactactgcctggccgtccgcgacggcgccgtcgtgctggccccggtcaaccccaaggacgaccaccagcactggtacaaggacatgcgcttcagcacccgggtcaaggacgaggaaggcatgccggcgttcgcgctcgtcaacaaggccacggggctcgcaatcaagcactccctcggccagtcccacccgcactccctcggcatgcaggtcaagctcgcgcctttcagcccggaccaggaggacgcgtcggtgctgtggacggagagcaaggacgtgggcaagggcttccgctgcatccgcatggtcaacaacacccgcctcaacttcgacgccttccacggcgacaaggaccacggcggcgtgcacgacggcaccgccgtcgtgctctgggagtggtgcaagggcgagaaccagagctggaagatcctgccgtggggtcccgaggccaactcctccgcggcccacgcgggaggcccgcacgccgtgcgcgtcttctgcaaggccggcggcgaggactacagcctcacggtgcgcaacggcacggcgtgcctggcgcccaccaacccgcgggacgagtaccagcactgggtcaaggacatgcgccacagcacccgggtgcgggacgaggagggctacccggccttcgcgctcgtcaacaaggtcaccggcgaggcgctcaagcactccacggggcagggccaccccgtcaagctcgtgccctacaacccggactaccaggacgagtccgtgctctggaccgagagccgcgacgtcggcaacggcttccgctgcgtccgcatggtcaacaacatctacctcaacttcgacgccttccacggcgacaaggcccacggcggcgtccatgacggtaccgagatcgtgctctggaagtggtgcgagggcgacaaccagcgctggaagatcctcccttggtgtaagaacgaacgaaagaaactactagctggtaccctaataataattctgctggctgcggcgatcccaaaataaaagaggccgggtgcgatgcatctcggacttctcgagtggtgtttgcgtcagacagccagccactgtggggctagtgttccaacatttgtcagcctgcttgcgcgaggaaggggggtcactgactcaagagaagggcctggtcataggctgctgcattatgaatttctgatgatgtcttatgtctgtactctgaatcaactatgtatgagatctcatctcctttctcctactgaatgaatgaatcattattggctttgctttgcttcacctgcttgaaagcaatgcattgtatggattacaaagatatgaccttttcgttgagcgagaaaaataatgttggtgacgagcaaataataaaactatgtataaatggaga

SEQ ID NO: 218388 - DNA, 1222 bp, Zea Mays
caccgtcaccgggtgagtcatcatccaggtagccgttggcgttgggtggtggcctggtgggcgccgctcgctagtagagtagagcctactagccttttgtcctataaaacgcggcggcgggggcagcgcctcttcctcgcaccaccaccgtcactcaacacagcacaggcagctcgagagagagagagagagaaagatgtcgtggttcgggcaccaccaccacaaccagccggctcccccggcgtcgggccccaaccaggtgttcaagatcttctgccgcgccaacgagaactactgcctggccgtccgcgacggcgccgtcgtgctggccccggtcaaccccaaggacgaccaccagcactggtacaaggacatgcgcttcagcacccgggtcaaggacgaggaaggcatgccggcgttcgcgctcgtcaacaaggacatgcgccacagcacccgggtgcgggacgaggagggctacccggccttcgcgctcgtcaacaaggtcaccggcgaggcgctcaagcactccacggggcagggccaccccgtcaagctcgtgccctacaacccggactaccaggacgagtccgtgctctggaccgagagccgcgacgtcggcaacggcttccgctgcgtccgcatggtcaacaacatctacctcaacttcgacgccttccacggcgacaaggcccacggcggcgtccatgacggtaccgagatcgtgctctggaagtggtgcgagggcgacaaccagcgctggaagatcctcccttggtgaacgaacgaaagaaactactagctggtaccctaataataattctgctggctgcggcgatcccaaaataaaagaggccgggtgcgatgcatctcggacttctcgagtggtgtttgcgtcagacagccagccactgtggggctagtgttccaacatttgtcagcctgcttgcgcgaggaaggggggtcactgactcaagagaagggcctggtcataggctgctgcattatgaatttctgatgatgtcttatgtctgtactctgaatcaactatgtatgagatctcatctcctttctcctactgaatgaatgaatcattattggctttgctttgcttcacctgcttgaaagcaatgcattgtatggattacaaagatatgaccttttcgttgagcgagaaaaataatgttggtgacgagcaaataataaaactatgtataaatggaga

SEQ ID NO: 218389 - DNA, 562 bp, Zea Mays
tgtcgccctcgcaccacttccagagcccacggcggcgtccatgacggtaccgagatcgtgctctggaagtggtgcgagggcgacaaccagcgctggaagatcctcccttggtgtaagaacgaacgaaagaaactactagctggtaccctaataataattctgctggctgcggcgatcccaaaataaaagaggccgggtgcgatgcatctcggacttctcgagtggtgtttgcgtcagacagccagccactgtggggctagtgttccaacatttgtcagcctgcttgcgcgaggaaggggggtcactgactcaagagaagggcctggtcataggctgctgcattatgaatttctgatgatgtcttatgtctgtactctgaatcaactatgtatgagatctcatctcctttctcctactgaatgaatgaatcattattggctttgctttgcttcacctgcttgaaagcaatgcattgtatggattacaaagatatgaccttttcgttgagcgagaaaaataatgttggtgacgagcaaataataaaactatgtataaatggaga

SEQ ID NO: 218390 - DNA, 1770 bp, Zea Mays
ttcggactctcacttcctgtgtgctctcgtcgcctccgatcgaatcgtgtcgggcgggctcgtgcccgatcttgtctggtcctgtcttggctccccgccaggaatagcgcaccgagatcccttgcgcgcacggaccagcagatcgcgcgcgggagtgagagggcgacagggcgtggccgcgaggtgggcatgggatcggagggacgggtctggaatggcgcgggcgtggccgccggcagcggctatggcggcagcgtcgaggcgaaagcgaccaccgcggcgcccgcggacgttcccacgtcggcggcctccgtcgacatctcgctgccgctcccggagatgtcgcctcacatcataggtctctgcaaggagttggtcaaagggtggtcgtcgattgacagctcgcgcttctccatcgagaccgtgtctgggggcatcaccaatctattgctcaaggtttctgtcaaaggaaacaatggcaatgattcttctgttactgttcggttgtatggaccaaatacagacttggtgattgatcggaaaagggaattgcaggcgataccgtatctctcagctgcagggttcggggctcggctgcttggaatgtttgaaaatggagtagttcagtcattcatctatgctcgaacactgtcacctgcagacatgaaagaacctaaaatagcagctgaaattgccaaggagctacgcaaatttcatcaagtagatataccagggtctaaagaaccacaattgtggaatgatatattcaagtttttgaagaaagctgcagcattgaagtttgaggataacgagcagcaaaagagatatgtaaagatctcatttacagaaatacaagatgaagttaaagaacttaaggatctcttggacattctgcatgcacctgtggtttatgcacacaatgacttgctttcaggaaatctgatgctcaatgatttggaagggaagctatattttattgattttgagtatgggtcatacagctaccgtgggtatgacattgcaaatcatttcaatgagtatgcaggatttgactgtgactttaatttgtacccagataaagatgcccagtatcacttcttcaggaattatctgcatcctgatagacctagtgaggcacaagatatggaagtgctttatgtggaaacaaacactttcagactagcatcgcacatttactgggcattatgggctcttattcaggcaaaggtatccccaattgactttgactatcttggatacttcttcttacggtatggtgagtacaagaaacaaagggactcctgcttcgccttggcacaaagtttcctctccgggctaagaaatggctagagcctgagaatctggtcaagggtttgcactgttgtacgcatactcggggcgggtacgcgttgtgatcatcgtctgctactcagaaactctattatagtggtggtagcagcctcattttgttgtatctgatggtagtttcgtcatcgcctgataggaaagtctcatgatcgccctcgggaacgcagggtggcgagatctgtacttatatttgtaataaacacaatccggatgggttctgtcctgtgcaatttgttgtgcgcataagcattccgtgtttttatacattattgtgaggaattgcataagtttttttgtttttcgattaaatcatatattgtttttcatgactgggtagtccttcggattgtgcgtacatacaacggatacaacggataaggatcacgatcaactagtatctct

SEQ ID NO: 218391 - DNA, 1660 bp, Zea Mays
gactctcacttcctgtgtgctctcgtcgcctccgatcgaatcgtgtcgggcgggctcgtgcccgatcttgtctggtcctgtcttggctccccgccaggaatagcgcaccgagatcccttgcgcgcacggaccagcagatcgcgcgcgggagtgagagggcgacagggcgtggccgcgaggtgggcatgggatcggagggacgggtctggaatggcgcgggcgtggccgccggcagcggctatggcggcagcgtcgaggcgaaagcgaccaccgcggcgcccgcggacgttcccacgtcggcggcctccgtcgacatctcgctgccgctcccggagatgtcgcctcacatcataggtctctgcaaggagttggtcaaagggtggtcgtcgattgacagctcgcgcttctccatcgagaccgtgtctgggggcatcaccaatctattgctcaaggtttctgtcaaaggaaacaatggcaatgattcttctgttactgttcggttgtatggaccaaatacagacttggtgattgatcggaaaagggaattgcagacatgaaagaacctaaaatagcagctgaaattgccaaggagctacgcaaatttcatcaagtagatataccagggtctaaagaaccacaattgtggaatgatatattcaagtttttgaagaaagctgcagcattgaagtttgaggataacgagcagcaaaagagatatgtaaagatctcatttacagaaatacaagatgaagttaaagaacttaaggatctcttggacattctgcatgcacctgtggtttatgcacacaatgacttgctttcaggaaatctgatgctcaatgatttggaagggaagctatattttattgattttgagtatgggtcatacagctaccgtgggtatgacattgcaaatcatttcaatgagtatgcaggatttgactgtgactttaatttgtacccagataaagatgcccagtatcacttcttcaggaattatctgcatcctgatagacctagtgaggcacaagatatggaagtgctttatgtggaaacaaacactttcagactagcatcgcacatttactgggcattatgggctcttattcaggcaaaggtatccccaattgactttgactatcttggatacttcttcttacggtatggtgagtacaagaaacaaagggactcctgcttcgccttggcacaaagtttcctctccgggctaagaaatggctagagcctgagaatctggtcaagggtttgcactgttgtacgcatactcggggcgggtacgcgttgtgatcatcgtctgctactcagaaactctattatagtggtggtagcagcctcattttgttgtatctgatggtagtttcgtcatcgcctgataggaaagtctcatgatcgccctcgggaacgcagggtggcgagatctgtacttatatttgtaataaacacaatccggatgggttctgtcctgtgcaatttgttgtgcgcataagcattccgtgtttttatacattattgtgaggaattgcataagtttttttgtttttcgattaaatcatatattgtttttcatgactgggtagtccttcggattgtgcgtacatacaacggatacaacggataaggatcacgatcaactagtatctct

SEQ ID NO: 218392 - DNA, 1779 bp, Zea Mays
gactctcacttcctgtgtgctctcgtcgcctccgatcgaatcgtgtcgggcgggctcgtgcccgatcttgtctggtcctgtcttggctccccgccaggaatagcgcaccgagatcccttgcgcgcacggaccagcagatcgcgcgcgggagtgagagggcgacagggcgtggccgcgaggtgggcatgggatcggagggacgggtctggaatggcgcgggcgtggccgccggcagcggctatggcggcagcgtcgaggcgaaagcgaccaccgcggcgcccgcggacgttcccacgtcggcggcctccgtcgacatctcgctgccgctcccggagatgtcgcctcacatcataggtctctgcaaggagttggtcaaagggtggtcgtcgattgacagctcgcgcttctccatcgagaccgtgtctgggggcatcaccaatctattgctcaaggtttctgtcaaaggaaacaatggcaatgattcttctgttactgttcggttgtatggaccaaatacagacttggtgattgatcggaaaagggaattgcaggcgataccgtatctctcagctgcagggttcggggctcggctgcttggaatgtttgaaaatggagtagttcagtcattcatctatgctcgaacactgtcacctgcagacatgaaagaacctaaaatagcagctgaaattgccaaggagctacgcaaatttcatcaagtagatataccagggtctaaagaaccacaattgtggaatgatatattcaagtttttgaagaaagctgcagcattgaagtttgaggataacgagcagcaaaagagatatgtaaagatctcatttacagaaatacaagatgaagttaaagaacttaaggatctcttggacattctgcatgcacctgtggtttatgcacacaatgacttgctttcaggaaatctgatgctcaatgatttggaagggaagctatattttattgattttgagtatgggtcatacagctaccgtgggtatgacattgcaaatcatttcaatgagtatgcaggatttgactgtgactttaatttgtacccagataaagatgcccagtatcacttcttcaggaattatctgcatcctgatagacctagtgaggcacaagatatggaagtgctttatgtggaaacaaacactttcagactagcatcgcacatttactgggcattatgggctcttattcagcacttgaatgcaggcaaaggtatccccaattgactttgactatcttggatacttcttcttacggtatggtgagtacaagaaacaaagggactcctgcttcgccttggcacaaagtttcctctccgggctaagaaatggctagagcctgagaatctggtcaagggtttgcactgttgtacgcatactcggggcgggtacgcgttgtgatcatcgtctgctactcagaaactctattatagtggtggtagcagcctcattttgttgtatctgatggtagtttcgtcatcgcctgataggaaagtctcatgatcgccctcgggaacgcagggtggcgagatctgtacttatatttgtaataaacacaatccggatgggttctgtcctgtgcaatttgttgtgcgcataagcattccgtgtttttatacattattgtgaggaattgcataagtttttttgtttttcgattaaatcatatattgtttttcatgactgggtagtccttcggattgtgcgtacatacaacggatacaacggataaggatcacgatcaactagtatctct

SEQ ID NO: 218393 - DNA, 1192 bp, Zea Mays
tacgattcacaacagctaaagccgctccatgaccatgggcacagttgtcggtgagatgcttgcatcggctgtcctgaaggtggtcatggggaagcttggtgcggttattgggcctgaggtcaacatgctgtggaagttcaaggatgatcttgagtcgatcaggagcactctgttgactctccaagctgtattgaatgacgctgagaagcggtcttcacgagaggaacgtgtgcgcctctggctcaagaggcttaagtttgctgcttatgacattcatgacattttagaggaaatggaatcaaataatgacattggctatggttcgtttaagaaggtcggatgtgtcaggcatatagaacaggagaatggtatatgccaaaatgtttcagttgacaaggtcggatgtacgagctctatcgacgttatagttgtgcctccgcgagtccgagctgacccagcagcgagtcagaatccagcagttgttgccaggaggatggttctgaagtcaccacgcctaaggatcaaaaggcctgtcgtagtggcacagctgatgaagggcagccaccgcaagcggcccgcagccaggaaaacaagaactggggacaaggcttcgagtagcacccgccagggaacgccgaatgacagcaatatcacgggtgaggtagatattggagatcttatcgacttccttcgggaggagtacggatgtcgaggaacgtcgacaaggagctatcaggcgcggcaaatgacggtgatgagcggattctcatgtatgaacttattctgctagcgtcgtgtcgtgtataggcagagtcattgaaaaaaatgcaaacgtgaaggcggctcaagacggcttcgccaaaatgcccactgagccatgtaactcgtcaaaatacccatgtcaacatgaaaacattgatgtaatgctcatacctctttatatattatgttttgtagacttgtatagaccaaaatagccttcttagatatgcatacacaaataaaggtacaaaataaaacgtaccatatttcatcaccagcatacagtggccgcagatatagaatgataattcatgggggccaacaaaccgcacgataaaattaaacaagaccataaaaaactagtgttgcatataatttaacttttatatacaggtttaaagaatgaaactacataaacaaaagaaacaaa

SEQ ID NO: 218394 - DNA, 1107 bp, Zea Mays
tagcgcccattaccgggcaccagggaggtgggatgagagtgaaagagtcgtcgcatggatccggccgccgaccccctacgttctttcgccgtcctcgggctggcggcaaccactgccgcagccaactccggcttcgcggactccaacccgatccgtcctgtcaccgtccgcgcggcctctgcgctcttccaccgtcttcgtcgcgctcggccgcacccgcgacgcgcttcgattcgccatcctcgatacacctggtgcaggcctgggtgttgcgacttgccgctggggggttctcgtggattcactagcaaggttaccctcggatgctcgcccaatttctcatcagagcttcaactccgtcgtgtgccgcaccgtgccgtatgaggctctttggacttgtgtctgcatctgggtcatgcaggcgtctcgatcggtgatgctccgccgtggggaagtcatcagcgccgccgtacttgctgccgagaagaaggtgggatggggggaattatcttgggccattggatccgtgttgtgcgcaccggattagatctagggataaccaaagcatgagccgttggatcgagatcgcacgcgttagaacggatcgcggcacatcaaaatctggaccgtccggatcagatcaagcggttgtgtgatgtccataccccttcgacctcgcgacttttacaaaataaaccccctggtttccagtattcaacccaccgtccatgcggatgttgtcctgagtctggagtcttttacgcgatagcccctgtactttacagaaaatgaggcttagtccagagattagaaaaccagggaaacaaaattagaaaataggtttttggtattaaattaattgcataaacttgtttaatttgtagaaaatccatatgaactccaagttggtccattccagttcctaaattttcataatattatcgtctatccattagtgcctctgttctggcatgaaatacacattaaaatttatctagcaattaatcttgtagtaaatacttaaaaccttcagaaattcatatcttaaaatctgtaactccaaatttaatgattctagttcctgtgatctcattttagtgtctagat

SEQ ID NO: 218395 - DNA, 1356 bp, Zea Mays
aatttcccttataaaaagaagattgattcattgctttgtcatttccttctctatgtaagccacaagcttaacttgaattctggaacgatttataacctacaaaatcttctcattttaattcatctgactgaaagtttggaagatactcgcacaatagaacatatgatacccatgtgcttcttacttgagtcaattattttttacattgcttagggttaatgattttgaatcaaatatttagcgatatcattgtgacatctgtgattcacatgcgtcatggaatcatcccatctttaatcaggctattgtttttacaggtccgagattacatccatgtggttgaccttgctgacggacatattgctgcattgcagaagctttttgagaactctagcatagggtgtgaagcgtacaaccttggaaccggaagaggtacatctgtgctggagattgttaaagcatttgagaaggcttctgggaagaaaatacctctgatttttggtgaaagacgcccaggtgatgcagagattctgttttcagagactactaaagcagagagggagcttaactggaagtaagtcatatatcgagagcaaaatacggtattgaagagatgtgccgcgaccaatggaactgggccagcaagaacccttatggctatggatcacctgactctatcaagcagaatggtcaccaaacaaacggatccgctgactcctccaagcagaatggccaccgcacaaacggttcaactgactcacccaagcggaacggccaccatgcgtatgggtctgctgactcacccaagcgcaacgggcactgcgtttttggatcatcagacctcaagccgaatggtaatggccacctgcgctgagcagaactgtttggcctgtgagctccctgtacattcggttgcgatgtgagctccctgcacgttcggtcgaggtctatcgtgaacccactatccgagattgatgtggatcattgggttgacaggtcatacagtatagagccggtggcagaggaattcctgtttgctgtgggtaaagcttatcttctgctttcgtgttttttcttgcttctttcgattatggtgtaggaatgtggtcataatgtattagctgattatcctttccctgctaattggactttattacgcttcattaagtttggctgattactgtttaacggggaaaagttgcacctgtgtacgattatttatttgtacctgtaatatttatggagaactagcctcgccgcaaatagccctgatgaattcagctgcagtttattcccagattggactgttgtttaatgtgaatgtaaatatgatgcctctgcaaacattgagcagat

SEQ ID NO: 218396 - DNA, 3732 bp, Zea Mays
tgtggcctgcaatctcgtcttgcgttgcggaatcgtgcggttccagcgtcgttttcccgatcccctgtccccgacgcggctaatcggccgcatttgcgtgttctgcttctgcagtggccgccccttttctctcctcggtttcaagccaaaagctgactcctttgcgtgcttttctacgtttctttgcctgatggatagagacggcacttcgttttttcaggtgccgtgacaagcaacgcaatgagtcttcgaggctccagtccgtgaacagaaagttgactgcaatgaacaagcttctcatggaggagaatgagcgattgcagaagcaggtttcccagctggttcacgagaatgcgtacatgaagcagcagctgcagaatccgtcactggcaactgatgcgagctgtgagtcaaatgcgaccactcctgcaaacctaagggatgcgagtaacccatcagggctccttgcaattgcagaggagaccttgacagagttcctctcaaaggctacagggactgctattgattgggtccagatgcctgggatgaagcctggtccggattcttttggtattgtgaccatttcacatggtggccgtggtgtcgctgcccgtgcctgtggtctggtgaacctagaaccaacaaagatagtggaaatcttgaaagatcgtccatcttggtttcgtgattgtcggagtcttgaagtctatacaatgttaccagctggaaatggtggaaccattgaacttgtttacatgcagatgtatgctcctactactttagttcctgcacgtgacttttggacactgagatacacaaccactatggaggacggcagtcttgtggtctgtgagagatccttaagtggttcaggagatggtcaaagtgctgccacaacacaacaatttgtaagagctgagatgcttcctagtggctatttagttcgccaatgtgagggtgggggctcgattgtgcgaatagtggaccatctggatcttgacgcttggagtgttcctgaagttcttcgtcccctctacgagtcgtctcgggtggttgcccagaagatgacaaccacagcgctacggcaccttagacaaattgctcaagaaacaagtggagaggttgtatatgcgctaggaaggcagccagctgttctacggacatttagtcagaggctgagtagaggctttaatgatgctataagtggtttcaatgatgatggttggtccgttatgtgtggagatggcatggaagatgttatcattgcttgcaactcgaagaagatcaggagcagtagcaatcctgctactggttttggagcccctggacctggaggtatcatatgcgctaaagcatcaatgttgctgcagagtgttccaccagcagtccttgttaggttcctgagggaacatcgatctgagtgggcagattataactttgatgcgtattcagcttcagcattgaaaacaagcccttgttcccttcctgggttgcggcctatgaggttttctgggagtcagatcatcatgccccttgctcacacggtggagaatgaggagatcttagaagttgttcgtcttgaaggacagactcttacacatgacgagggccttttgtctagagatatacatctgcttcagctttgcactggaatggacgagaaatcaatgggatcctgcttccagcttgtctttgcaccaatcgatgagcttttccctgatgatgctccattggtatcttcaggctttcgcgtgatcccgttggacataaaaacagacggaccaccctctggaagaacgttggatttggcctctagccttgaagttggcgcaaccacgcaacaagtggcagggaatggatctcaggacgtttgcaacctgagatctgtgctgacaattgcctttcagtttccctatgaaacacatctccaggacaccgttgcagctatggcccggcaatatgttcgaagcatcgtttctgcggttcaaagagtatcaatggccatttctccctcccattctggcttgaatactgctgggcagaagttaatttctggctcccccgaagctgctacacttgttcgctggatttgccaaagctaccggtatcacttgggggtggatttggtcagccactcggatcaagctggggaatcacttttgagaatgttctgggaccatcaagacgctgtcttgtgctgctctttcaaggaaaagcctgtgtttactttcggcaaccagatgggagttgacatgttagaaacgactttagtcgctctgcaagatctcacccttgacaagatctttgacgagcctggtagaaaggcactacatgcggaggttccgaaactgatggaacagggctatgcgtacctgccggctggggtgtgcctgtctgggatgggccgccatgtctcctacgagcaagctgttgcttggaaagttctcggtgaggacggcaacgtgcattgcctcgctttctgtttcgtcaactggtccttcatctgatgtgatccaagtgcgccgcggaaactttacgatcagcgtccatttttgcattctctgtagacgagaatggtgcggtgttgctgctactgttagctagacaacggcatgttcaggtagtcttggggaaagccagtattgtgaagatgtaaatttgcgcccgtttccgctaatttaacccgctggacttgctgttgtttgttaaggccaggggcactcgtacgtgagataaaatgttgtgaaattgtatgtgctgaaacataggtttacattgaaattggcatatagaatgttgtgcatgtgtgctaaactgctaataaatagtttcgatattaattaaggggtgtttgaaagcactagagctaaggtgttattttttagataatggaaaaccatcattggagactttctctaccatgcagagtatgaccaacattacatcaccatataacaaatatcaccgaactgaatttaacagagaacaaaacaactaggagaaacaaaacagactttgacgatatctaaacagtagtgatcctattcataaatcttcagccaaaatgagcgaatatttggacagacgtcgtcttcaatcgccaacataccacctttattaaattctcttcgtccttacgaagtttagtccaaagtctaagccaaagcgtcatttgaaacatcatctgcaaataagtaaccataggggatttgtcaaaaactaaattattcctactagtctagatagtccaacataatgctacgataagccaagatccaaaaacatgtttcactgatctaggtatactgaggccaaaacaacagtgagcgagcctccaacagaatcgagcaaaatggcacttaaaaaacaagtgttgtatatactcatctgaatcacaaaacacatattttttattgtcataccaattacgcctagctaggttatctttttgtgaaaataacccctttgagtaagtaacacataaaaacctttatcttcaatggtactttaagattccacaaaggtttgtgataaaaaccttggcattattcattaaaaaactatacatggacttaacagaaaatattcctgaaggtaataaattccatttgaaaatatcattctcttcactaagttgaatatgagcaatactggcaaccagcctattccatttccttaaattttccccaccaaagatctttagaaagaaatttgtaaaggaacactagcaaa

SEQ ID NO: 218397 - DNA, 4064 bp, Zea Mays
tgcgcgcgtgttttgcagtcgatggccgaggctccgtgcaccgtcgcggggggcggtttgcgcggacgcggtggtacgctgtgatgccggtcagcagctggcgacggtgcccgtgcgtctcttggctgctggtgcgcgcgcgcggaaagctgaacaggttttgatcggtgtgtgagaaggtggaattgcaggtagcgacggcgtgagaagggtccgtttgagtgtttgacaaaggggaagtggtggtcggaggcggagaggacgggtgcgtggtggagttttgctttcggtgctggtcggtggccgtgcaacgatggcagcagccgtagcgatgcggagcgggagcagcgatggcggcggcgggtacgagaagagcgggatggacacgggcaagtacgtgcggtacacgccggagcaggtggaggcgctggagcgggtgtacgccgagtgccccaagcccagctccgcgcgcaggcagcagctgctacgcgagtgccccatcctctcaaacatcgaggccaagcagattaaagtctggttccagaaccggaggtgccgtgacaagcaacgcaatgagtcttcgaggctccagtccgtgaacagaaagttgactgcaatgaacaagcttctcatggaggagaatgagcgattgcagaagcaggtttcccagctggttcacgagaatgcgtacatgaagcagcagctgcagaatccgtcactggcaactgatgcgagctgtgagtcaaatgcgaccactcctgcaaacctaagggatgcgagtaacccatcagggctccttgcaattgcagaggagaccttgacagagttcctctcaaaggctacagggactgctattgattgggtccagatgcctgggatgaagcctggtccggattcttttggtattgtgaccatttcacatggtggccgtggtgtcgctgcccgtgcctgtggtctggtgaacctagaaccaacaaagatagtggaaatcttgaaagatcgtccatcttggtttcgtgattgtcggagtcttgaagtctatacaatgttaccagctggaaatggtggaaccattgaacttgtttacatgcagatgtatgctcctactactttagttcctgcacgtgacttttggacactgagatacacaaccactatggaggacggcagtcttgtggtctgtgagagatccttaagtggttcaggagatggtcaaagtgctgccacaacacaacaatttgtaagagctgagatgcttcctagtggctatttagttcgccaatgtgagggtgggggctcgattgtgcgaatagtggaccatctggatcttgacgcttggagtgttcctgaagttcttcgtcccctctacgagtcgtctcgggtggttgcccagaagatgacaaccacagcgctacggcaccttagacaaattgctcaagaaacaagtggagaggttgtatatgcgctaggaaggcagccagctgttctacggacatttagtcagaggctgagtagaggctttaatgatgctataagtggtttcaatgatgatggttggtccgttatgtgtggagatggcatggaagatgttatcattgcttgcaactcgaagaagatcaggagcagtagcaatcctgctactggttttggagcccctggacctggaggtatcatatgcgctaaagcatcaatgttgctgcagagtgttccaccagcagtccttgttaggttcctgagggaacatcgatctgagtgggcagattataactttgatgcgtattcagcttcagcattgaaaacaagcccttgttcccttcctgggttgcggcctatgaggttttctgggagtcagatcatcatgccccttgctcacacggtggagaatgaggagatcttagaagttgttcgtcttgaaggacagactcttacacatgacgagggccttttgtctagagatatacatctgcttcagctttgcactggaatggacgagaaatcaatgggatcctgcttccagcttgtctttgcaccaatcgatgagcttttccctgatgatgctccattggtatcttcaggctttcgcgtgatcccgttggacataaaaacagacggaccaccctctggaagaacgttggatttggcctctagccttgaagttggcgcaaccacgcaacaagtggcagggaatggatctcaggacgtttgcaacctgagatctgtgctgacaattgcctttcagtttccctatgaaacacatctccaggacaccgttgcagctatggcccggcaatatgttcgaagcatcgtttctgcggttcaaagagtatcaatggccatttctccctcccattctggcttgaatactgctgggcagaagttaatttctggctcccccgaagctgctacacttgttcgctggatttgccaaagctaccggtatcacttgggggtggatttggtcagccactcggatcaagctggggaatcacttttgagaatgttctgggaccatcaagacgctgtcttgtgctgctctttcaaggaaaagcctgtgtttactttcggcaaccagatgggagttgacatgttagaaacgactttagtcgctctgcaagatctcacccttgacaagatctttgacgagcctggtagaaaggcactacatgcggaggttccgaaactgatggaacagggctatgcgtacctgccggctggggtgtgcctgtctgggatgggccgccatgtctcctacgagcaagctgttgcttggaaagttctcggtgaggacggcaacgtgcattgcctcgctttctgtttcgtcaactggtccttcatctgatgtgatccaagtgcgccgcggaaactttacgatcagcgtccatttttgcattctctgtagacgagaatggtgcggtgttgctgctactgttagctagacaacggcatgttcaggtagtcttggggaaagccagtattgtgaagatgtaaatttgcgcccgtttccgctaatttaacccgctggacttgctgttgtttgttaaggccaggggcactcgtacgtgagataaaatgttgtgaaattgtatgtgctgaaacataggtttacattgaaattggcatatagaatgttgtgcatgtgtgctaaactgctaataaatagtttcgatattaattaaggggtgtttgaaagcactagagctaaggtgttattttttagataatggaaaaccatcattggagactttctctaccatgcagagtatgaccaacattacatcaccatataacaaatatcaccgaactgaatttaacagagaacaaaacaactaggagaaacaaaacagactttgacgatatctaaacagtagtgatcctattcataaatcttcagccaaaatgagcgaatatttggacagacgtcgtcttcaatcgccaacataccacctttattaaattctcttcgtccttacgaagtttagtccaaagtctaagccaaagcgtcatttgaaacatcatctgcaaataagtaaccataggggatttgtcaaaaactaaattattcctactagtctagatagtccaacataatgctacgataagccaagatccaaaaacatgtttcactgatctaggtatactgaggccaaaacaacagtgagcgagcctccaacagaatcgagcaaaatggcacttaaaaaacaagtgttgtatatactcatctgaatcacaaaacacatattttttattgtcataccaattacgcctagctaggttatctttttgtgaaaataacccctttgagtaagtaacacataaaaacctttatcttcaatggtactttaagattccacaaaggtttgtgataaaaaccttggcattattcattaaaaaactatacatggacttaacagaaaatattcctgaaggtaataaattccatttgaaaatatcattctcttcactaagttgaatatgagcaatactggcaaccagcctattccatttccttaaattttccccaccaaagatctttagaaagaaatttgtaaaggaacactagcaaa

SEQ ID NO: 218398 - DNA, 264 bp, Zea Mays
gcaggggttgcctattagtaaggcaatcattcttccacaacaatccttccaattttgttgacctgggtggtggtgtagtgggctgtagaggttttcattctagttttcgagcaacccagagtggacttttcactcaatatcgatgtgtcgactacaatgatagtgaaacctggtcctgtcattgattttctgcttgacaatcagaaagttggtgatccaagcatgattgattgggctaagttttgcaatttgctttacttctgc

SEQ ID NO: 218399 - DNA, 646 bp, Zea Mays
ttttaggtagtgaacagaataagtcagcagatggtggaggaacttgtagttgatgatacacctgaaacttcaagaggaataattggcctctgtagtgatccatctacaggacttttctatgcatatgatgaaagttctatattccaggtttccacttcagacgagggttgtgacatgtggcaagtttacttggatatgaatcattatgctgctgctttatcccattgccgtaatcctttccagcgtgatcaagtctacctagttcaggctgatgctgcatttgctgcaaaagagtattacatagcagcatccttctatgcaaagataaattacatcctgtcgtttgaggagatcagcctgaaatttatatcaatagattacgatgatctcaacttgggctactgagctgtacttagacaagattaatcgcctcctattggaggataccactgtcaccattataaattcagtagcagagcctaatagctctgaatatcgttcgatagtaaatgaattccgtgcttttcttagtgacagcaaagatgtattagatgaagcaacaacaatgaaactactggaaagagttttatttaggactacaggatttgtctgcaataaatcaaatgcaaacttgaacacttgcaat

SEQ ID NO: 218400 - DNA, 703 bp, Zea Mays
gtagtgaacagaataagtcagcagatggtggaggaacttgtagttgatgatacacctgaaacttcaagaggaataattggcctctgtagtgatccatctacaggacttttctatgcatatgatgaaagttctatattccaggtttccacttcagacgagggttgtgacatgtggcaagtttacttggatatgaatcattatgctgctgctttatcccattgccgtaatcctttccagcgtgatcaagtctacctagttcaggctgatgctgcatttgctgcaaaagagtattacatagcagcatccttctatgcaaagataaattacatcctgtcgtttgaggagatcagcctgaaatttatatcaataggatgctctcagaactttcttattgagaaggctcgataacctcaccaaagaggacaagatgcagattacgatgatctcaacttgggctactgagctgtacttagacaagattaatcgcctcctattggaggataccactgtcaccattataaattcagtagcagagcctaatagctctgaatatcgttcgatagtaaatgaattccgtgcttttcttagtgacagcaaagatgtattagatgaagcaacaacaatgaaactactggaaagagttttatttaggactacaggatttgtctgcaataaatcaaatgcaaacttgaacacttgcaat

SEQ ID NO: 218401 - DNA, 1468 bp, Zea Mays
atggcgtgcggggatggggcagaagaaaaatttagggaaccgctgcggctagcgtcagataccactcctggcgccgctgacttcctcaaccctatgcggccgacgccggcgctcgtcgccggtggacgcatggtaacaagcttcttatccgccactgaatggatgcttccgtctccggccacgcaagtccacaccatctccgtacttccctcccgtcgcgacttcgccttctccaacctcacgatgttgctcaggaatagcggcggcaacgagggagagagtggcagtactaagttccacgtagtacgggacgacctcctccacccgctcgccaacggcaacaaggcgcgcaagctcgacgccctcctgcccatcctccgccgctgcggcgttactgacatcgttacatgtgggggttgccagagcgcccatgccgcagctatcgcggttcactgtgccgaatggggaatcaggccacatatactgctgagaggcgagcaactggatgttcccacagggtataatctcatctcattgatgtttggcaatgtgacatatgtctctcggtctttgtatgcccaaagagacgagatgctttatgagcatgccataaaggttgcaggatatagtggcacagtgatgtgggcagatgaagttataggaaagggtttgggtgtagatgaggacaccactgatggaaatggttcaagaagagtgatgattgttaaggaaggggcaggtgtcatgcggctactgaagtatctttctggtttgacattatttagaaaggatgagaaagttcatatcgtggtagattctggaacaggaacaactgctgtggggttagctcttggagcgactccagtggagggttactgctgttatgcttgctgacacacttgaaggatataaacagcgagagagatctcttttatctgattttgagaaggttttcccggaaatctaccatggaatggtggaagatgctactcatgacaatctagttcaatgggtggagcggttttcacctagaagatttggcaaggtgctggatggtgaaatcgcaatgtgccgccaggtagctcaacagaccggtatcctgctggatcctatgtataccttggctgcctgggagcaagctgttgatatatgctgtggagacagtgaagccaaagtcttgatgatccatacgggtggcacccttggcctttttggattggcacaaaggtattcatcacagttcaacacaggcgaacaaccttaggcatgtgcaatgatgatgttcaaatgttacggtttgtgggtatggactatggaatgtgatctttgactttgaataatcaaaagtagaaagaggtggggctttgttaaaggaattggtctttatattgatttggaagctaacatcacgatgtgcgttgaaaatggccttctttgctcgtacatttagaggttgtttgggtttggg

SEQ ID NO: 218402 - DNA, 1263 bp, Zea Mays
atggcgtgcggggatggggcagaagaaaaatttagggaaccgctgcggctagcgtcagataccactcctggcgccgctgacttcctcaaccctatgcggccgacgccggcgctcgtcgccggtggacgcatggaatagcggcggcaacgagggagagagtggcagtactaagttccacgtagtacgggacgacctcctccacccgctcgccaacggcaacaaggcgcgcaagctcgacgccctcctgcccatcctccgccgctgcggcgttactgacatcgttacatgtgggggttgccagagcgcccatgccgcagctatcgcggttcactgtgccgaatggggaatcaggccacatatactgctgagaggcgagcaactggatgttcccacagggatatagtggcacagtgatgtgggcagatgaagttataggaaagggtttgggtgtagatgaggacaccactgatggaaatggttcaagaagagtgatgattgttaaggaaggggcaggtagtgttcaagcactgcttggtgtcatgcggctactgaagtatctttctggtttgacattatttagaaaggatgagaaagttcatatcgtggtagattctggaacaggaacaactgctgtggggttagctcttggagcgactccagtggagggttactgctgttatgcttgctgacacacttgaaggatataaacagcgagagagatctcttttatctgattttgagaaggttttcccggaaatctaccatggaatggtggaagatgctactcatgacaatctagttcaatgggtggagcggttttcacctagaagatttggcaaggtgctggatggtgaaatcgcaatgtgccgccaggtagctcaacagaccggtatcctgctggatcctatgtataccttggctgcctgggagcaagctgttgatatatgctgtggagacagtgaagccaaagtcttgatgatccatacgggtggcacccttggcctttttggattggcacaaaggtattcatcacagttcaacacaggcgaacaaccttaggcatgtgcaatgatgatgttcaaatgttacggtttgtgggtatggactatggaatgtgatctttgactttgaataatcaaaagtagaaagaggtggggctttgttaaaggaattggtctttatattgatttggaagctaacatcacgatgtgcgttgaaaatggccttctttgctcgtacatttagaggttgtttgggtttggg

SEQ ID NO: 218403 - DNA, 1392 bp, Zea Mays
atggcgtgcggggatggggcagaagaaaaatttagggaaccgctgcggctagcgtcagataccactcctggcgccgctgacttcctcaaccctatgcggccgacgccggcgctcgtcgccggtggacgcatggtaacaagcttcttatccgccactgaatggatgcttccgtctccggccacgcaagtccacaccatctccgtacttccctcccgtcgcgacttcgccttctccaacctcacgatgttgctcaggaatagcggcggcaacgagggagagagtggcagtactaagttccacgtagtacgggacgacctcctccacccgctcgccaacggcaacaaggcgcgcaagctcgacgccctcctgcccatcctccgccgctgcggcgttactgacatcgttacatgtgggggttgccagagcgcccatgccgcagctatcgcggttcactgtgccgaatggggaatcaggccacatatactgctgagaggcgagcaactggatgttcccacagggttgcaggatatagtggcacagtgatgtgggcagatgaagttataggaaagggtttgggtgtagatgaggacaccactgatggaaatggttcaagaagagtgatgattgttaaggaaggggcaggtagtgttcaagcactgcttggtgtcatgcggctactgaagtatctttctggtttgacattatttagaaaggatgagaaagttcatatcgtggtagattctggaacaggaacaactgctgtggggttagctcttggagcgactccagtggagggttactgctgttatgcttgctgacacacttgaaggatataaacagcgagagagatctcttttatctgattttgagaaggttttcccggaaatctaccatggaatggtggaagatgctactcatgacaatctagttcaatgggtggagcggttttcacctagaagatttggcaaggtgctggatggtgaaatcgcaatgtgccgccaggtagctcaacagaccggtatcctgctggatcctatgtataccttggctgcctgggagcaagctgttgatatatgctgtggagacagtgaagccaaagtcttgatgatccatacgggtggcacccttggcctttttggattggcacaaaggtattcatcacagttcaacacaggcgaacaaccttaggcatgtgcaatgatgatgttcaaatgttacggtttgtgggtatggactatggaatgtgatctttgactttgaataatcaaaagtagaaagaggtggggctttgttaaaggaattggtctttatattgatttggaagctaacatcacgatgtgcgttgaaaatggccttctttgctcgtacatttagaggttgtttgggtttggg

SEQ ID NO: 218404 - DNA, 6743 bp, Zea Mays
cagagagtcgtcttgctctactctagtcgttcggtcttcactcgacaaaaggtgagggagtgcagtccggggacgggagggagaccaatcggagctgatggaggcagcggcggcgctgccgccggagagggatacgtcagcggactggggagatggcgtggtaccgctaggtttccgggtgaaggcatcctctcgcgagtcgccgtcacagaaggcggggaacgtgctggaggccgacctgcgctcccactgggccaccgccaccaacaccaaggaatggatcctccttgagctccaggaaccgtgcctcctctcccacatccgcatctacaacaaatccgtcctcgagtgggagctcactgccggactgcgatacaagcccgatgcattcgtcaagttgcgcccccgctgcgaggcccccaagcgcgacgtcgtctaccccgccaaccacaccccttgccgctaccttcgcatttcctgcctgcgcggcaaccccatcgccatcttcttcatccaactctttggcatccccgtgcctggcctcgaacctgagctccagccactgctcagctatttactcccgcaaatcacatcctccaaacaacccctttctcacaacatgcacctccagttgcttaaagatatctccaccaggctacctccatttcttccccaaattgaggctgaccttaatagtgtcgtggacaccccagaaagcagcgtgcggttcttggctctacttgctggtccattttatcctatccttcaccttataaatgaaagagatcctaccaaatctttgtttggttctgctgattcagatgccctcagaactagtccagcttctactccaacagtttcttcaaactttgaggcacaaccaaggagatcacggagtccatctgttcagcctgcttcatatttgctggcatttcgatctgaaacaactatgctcctcttaaggaaagcacataaagacaaaacccttggagttgtttgtgttcgagcatcgaaggtattgcaaaaactgttggagcctgagccatttttagacaaatcgatgtatactgatgtcatgctaccaaaccaagtctctgatgaaattcctaaaagcgatgctctcagcctagtacattctacagactactccagtatgtttggagaggaatttagcctgtcagagaatcagtttgatggttcattactgaatattttggatattgctgctgtggaagaaggcattcttcatgtactatatgcggctgcatcacagcctatgctatgtcgcaagcttgctgaaactacttcagacatttggtctgtcttaccacttgtccaagctctacttccaggaagctggccaatctcttgctcgttcacgtgcagcactgaagtatgttgtattggcaatttctgggcatatggatgatgtgctcacagaatataaagaagccatgcataagttacttttcgttctggagatgctagatccttttattgatccatctacaagtgccatggaagacacagtaatatttgatggtatctctgctatatatttggaaaagcaatcaagtgtatatgatattgccttaaatattatccatacagcagtaaagagagctgctgttctcccttctttagaacttgaatggcgacgaggagccattgccccaagtgtaattctctctatcttggatccgcacatgcctcttcctcctgacatagacctctgcaaaagttcagtgcatgagattgataaagtgcctttggctgttttggataatcatgcaccacagccatgcaacccagaaaatattgctgggcgagatgcatctgaaacaactattcgtcctgaaaattttgaacagtgcagctttctgtttgctcctgaagaattaaaccaatctgagttgactagtctttataccttgaaaggaaaaggccatgatgtaataactcaaacaagtctgaaccatgacattcctgaaggcagaagtaaagagaaactatcatctgaccctttcctgctagataatgttgttgcagctgattattttgattcacaggctgattatcaacagctggaaaactaccaggactgtgagttaagagctcaagaatttcatcgcatagcactcaacctatgcatgcaacaagaaccaacattagaagggcataatgctggaattgatgctttgctattagccgcagaatgttatgttaatccattttttctattgggattccagtctaatttagagcctctggacaagattgaacgtattcattcagagttgatgcaagggaatgcttcctctgtatcaaaaaatttgcacttgaaagatttcaacaaaaaaacaatctacaatttggagaacaagcgtgatagatctgttatagatttactcctacaagccgccagatttgactttgaatatcatggaaagatacctgaaggggaactatatccaaatattgctgaagatggcaagcgatctgtagaaatctcacctgaagctcttcagtttgctgatgctgtaactttggtccgaaagaaccaggctatgctgtgccactttattatgaagcaattccaaaggaaaggacacttgggtagtgaaattcttctccagagcttgttgttcctgttgcactcagcaactgatctattttgtccaccagagaatgtagttgatataattttgaagtctgctgaaagcctcaatgatcagcttacatgtctttacagtttttttagtgcagggaataagaaattggataggataaaaatacatggtctaagaagacgttggatgcttctccagaaactggttctggcttcatcaggcagtgatagtactagagaacttgccagaaataaaagagatggtttccattttagaagtttagtccctccatcaacatggatacaaaagatatctgatttctccatgttttctagcccactccctcgatttttcggatggatggcagtgtcttgctatgccaaggaatatttaaatgagaagctgtttcttgcttctgatttctcacagcttacatctttgctatcaatttacatggatgaactttgtttgatggatggagttgcaatcccgaaagtcaggtctgcaaaaggtgaacaatttagttgtacggacttgtttcttaaaaaggaaactactctgtcagaccaaccaagcatgaccgaacagtttaaaatcttacttccggagctacatttcttctttccaagcatgggtaaattgtttaatgcatttggggagagcatcttggaggctgttgggctacagttaaaatgtctgcccaatagtgcaataccagacgtcctttgttggttttctgagttgtgcttatggccttatctcgaacacattaaggagcatcttgtagttgcaaacggagttagttatataagaggaagtattgctgctaatgcaaaatcagttgtcttctacctacttgagtctattgttactgagcacttggaggctgttattcctgaaatgcccaggatagtgcacattcttgtgtctctctgtagagcttcttatactgatgtggccttcctaaaatctgtgctatgtctaatcaagccactcatctcctacttcttaaggaagggaactaatgaaacaaaagtactgggccatataaaggagggcagcaattttgagttgctttgttttgaagaattgtttgaaattgttcgctgtggtaaagattcggtggatacaactgaagataatattcaggcaccgttggtcatcttcattctgggatctatgtttcttgatttctcatttgagagaaggattgaaatgttaggctccttgttagtatggattgattgcatcagttccgatccaccatcgttattatgcaactatcttcaaggtttccagacacttctagatggttttgaagctgtgctaattcaaaatattgaactacttggtgtcggcatcctttctgcgacaaactcgtctatagaatcttctgattccttgggcattgatggcactatgctactagagaagaaggcacaagataatgaagaacaaacactaatgaaatccgtaacatactgtgagaacgatggaaatcataagggtcttcgtaatctgcatcctaatagtatcatagagttttgtggcaccctggagaagtttattttgcaccttacttcatatattgaggatagttggaaatggcaccatcagttggcctctaggatctctttgtctatggcaaagtgtttgttgtttgcaaaatttttgaagtccatagcgcaagaagacacaatatctagtagcagtgagcaagatgtcgctgtgaaaatttcctgtgagcttgcacaaaagcattggcaaagtgctcttgaaggtctaggagataccattttgataaatcaggaaacacagttctggcaggtggcatcagctatgcttgattatataatggggataccaaacgtccttgcttggggtaatgttcttaatactacatgctctgcggtcaagcacttctgctcccatgcacctaggctatcttggaggctgcagacagataagtggttgtcattattagtttcaggtggaattgagggcttcaaaaacagtgagatctgtttgattgatcttttctgtacaatgttgaatcattctgaaccagagcagcgttttgttgctgtacaacagcttgggaggattattaactcaacaagttctactgaagctgatttgaaatatccaaactatgaccaaaatttcctcatatctgtttcgacagtaacatcccttttggtaactcatacatgggacagagtagcagcattggctctccatgactcttctatgctattaaggaatcatgcaatggcattgcttactgaatatgtgccttttgttgataggaagcacctgcagtccttcctttcatccagtaacggtatcctgactggtttgggacaactttctggtgtaattgaagagggctattttacacgaatgtctttgctgttgttttctaaggcatgtctttattctaatcctgaagatatcgctttgatacctgaatgtgtttggcagaagttggaaaacatgcaaacatcaactggaggttttggatatatggagaaagatctctgcctagctctgtgccaactaaaaagtgaatcagatgctacaactgttgcaaaagttctttctggatgtaatagtcaaccagtcagccctgatttcaagagcatccgtgaatcaatccttcaggtgatgtcctctttgagttctattgaagcatactttgagttcttcgcagccagatctgcacaagaacatgaggaacttgaagaagctgagattgaattggagcttattgaaaaagagaagtcagttcctaactttgttgagcataccaatgatacgatggtgcttgccatgccatcatatgaccgtgatggtagtgaggttaataaacggctccagcaaatccgggaaaatattcggtccctggaaaggtctaggctgaaagaggaaattacagcgcgcagacaaaagaagctgcttctaagacatgcccgtgaaaagtacctagaagagacacgctccagggaaacggagcttatgcaagagctcgacagggaaagagctctcgagatggaacgtgaagtagaaaggcagcgtcaactggatattgagcgtgcaaagtctagggaactgcaattcaacattgatttggaaaaagagaaacaaactcagagagagcttcaacgcgaactggagcaagtcgagttggggcggtcatcaaggcgtgagttctctgccaatcccaacagggagaggtaccgcgaaagggatggtggaggcagagcacagcaggaggcggggagcctgaggtcttcgagcagccgaggccaggaggggggctctgcccaggcgcccgcaccggccgggccgggccctaccgtcatgctcgccgggtcaaggacgttctcgggggccaaccttccaacgattctgcagcctcgcgagcgcgctgccgacgaggacagcgcttgggccgaggacgctagcagcaacggagatcctgaactggacggcgtgaggccgcatgggccgcgaggcagcaggtcatcctcctctaggcaggttgcggagaggagggagcgggatggcactgctgccggcacgggcaggagagaagggaaatgggagaggaagcagcacccgtgactattccctgcttgtgttgtgcctaagcctaacggaggcttcctcaatcgcgttgtaattgtactcgtatgggcattggatcaggtggctgcttagtcaacggtaccgtgcattgataaaaaggttggatcatcgtatgggaacactaccaatcagctgcctgctcagtcaacagcaccattaccatcacactccgacttttgtcagatcccctaagggtgtgttcggttacaccaatccagaggggaggatttaaatccccttctagtcattttgactaagaggagatttaaacccctccaatgatgactagaggggatttaaacccttccaatctctctctggattggcctaaccgaacaagcccaaaaggcgctccatggcccacgctctcccttggctctgtcgactgccctcgtcctaagcactagcagcctgcttaggctttgttgggtttgacgtggattgagatggattaaagagatt

SEQ ID NO: 218405 - DNA, 5674 bp, Zea Mays
atgctgtatttgtatcctaccatacttctataggtcttgaacttttgctactatgccaaatgaagttatgctctaatttatttaccatttttgtgttaattctgttgaagggattaacctgtatttgggatgaaatgataagttattcacaactttgcaaaatatatcttattgcaatagtaccacctgacgaaaactgcaatttcttcctttgtgatatcctaaatcaacatcgacgatgtgtttactttttaagtaacttttaagattatttccactccatatttatattgcgaaccaattaaccaattaactttgttgtttatcgtgttggttaggaagctggccaatctcttgctcgttcacgtgcagcactgaagaagccatgcataagttacttttcgttctggagatgctagatccttttattgatccatctacaagtgccatggaagacacagtaatatttgatggtatctctgctatatatttggaaaagcaatcaagtgtatatgatattgccttaaatattatccatacagcagtaaagagagctgctgttctcccttctttagaacttgaatggcgacgaggagccattgccccaagtgtaattctctctatcttggatccgcacatgcctcttcctcctgacatagacctctgcaaaagttcagtgcatgagattgataaagtgcctttggctgttttggataatcatgcaccacagccatgcaacccagaaaatattgctgggcgagatgcatctgaaacaactattcgtcctgaaaattttgaacagtgcagctttctgtttgctcctgaagaattaaaccaatctgagttgactagtctttataccttgaaaggaaaaggccatgatgtaataactcaaacaagtctgaaccatgacattcctgaaggcagaagtaaagagaaactatcatctgaccctttcctgctagataatgttgttgcagctgattattttgattcacaggctgattatcaacagctggaaaactaccaggactgtgagttaagagctcaagaatttcatcgcatagcactcaacctatgcatgcaacaagaaccaacattagaagggcataatgctggaattgatgctttgctattagccgcagaatgttatgttaatccattttttctattgggattccagtctaatttagagcctctggacaagattgaacgtattcattcagagttgatgcaagggaatgcttcctctgtatcaaaaaatttgcacttgaaagatttcaacaaaaaaacaatctacaatttggagaacaagcgtgatagatctgttatagatttactcctacaagccgccagatttgactttgaatatcatggaaagatacctgaaggggaactatatccaaatattgctgaagatggcaagcgatctgtagaaatctcacctgaagctcttcagtttgctgatgctgtaactttggtccgaaagaaccaggctatgctgtgccactttattatgaagcaattccaaaggaaaggacacttgggtagtgaaattcttctccagagcttgttgttcctgttgcactcagcaactgatctattttgtccaccagagaatgtagttgatataattttgaagtctgctgaaagcctcaatgatcagcttacatgtctttacagtttttttagtgcagggaataagaaattggataggataaaaatacatggtctaagaagacgttggatgcttctccagaaactggttctggcttcatcaggcagtgatagtactagagaacttgccagaaataaaagagatggtttccattttagaagtttagtccctccatcaacatggatacaaaagatatctgatttctccatgttttctagcccactccctcgatttttcggatggatggcagtgtcttgctatgccaaggaatatttaaatgagaagctgtttcttgcttctgatttctcacagcttacatctttgctatcaatttacatggatgaactttgtttgatggatggagttgcaatcccgaaagtcaggtctgcaaaaggtgaacaatttagttgtacggacttgtttcttaaaaaggaaactactctgtcagaccaaccaagcatgaccgaacagtttaaaatcttacttccggagctacatttcttctttccaagcatgggtaaattgtttaatgcatttggggagagcatcttggaggctgttgggctacagttaaaatgtctgcccaatagtgcaataccagacgtcctttgttggttttctgagttgtgcttatggccttatctcgaacacattaaggagcatcttgtagttgcaaacggagttagttatataagaggaagtattgctgctaatgcaaaatcagttgtcttctacctacttgagtctattgttactgagcacttggaggctgttattcctgaaatgcccaggatagtgcacattcttgtgtctctctgtagagcttcttatactgatgtggccttcctaaaatctgtgctatgtctaatcaagccactcatctcctacttcttaaggaagggaactaatgaaacaaaagtactgggccatataaaggagggcagcaattttgagttgctttgttttgaagaattgtttgaaattgttcgctgtggtaaagattcggtggatacaactgaagataatattcaggcaccgttggtcatcttcattctgggatctatgtttcttgatttctcatttgagagaaggattgaaatgttaggctccttgttagtatggattgattgcatcagttccgatccaccatcgttattatgcaactatcttcaaggtttccagacacttctagatggttttgaagctgtgctaattcaaaatattgaactacttggtgtcggcatcctttctgcgacaaactcgtctatagaatcttctgattccttgggcattgatggcactatgctactagagaagaaggcacaagataatgaagaacaaacactaatgaaatccgtaacatactgtgagaacgatggaaatcataagggtcttcgtaatctgcatcctaatagtatcatagagttttgtggcaccctggagaagtttattttgcaccttacttcatatattgaggatagttggaaatggcaccatcagttggcctctaggatctctttgtctatggcaaagtgtttgttgtttgcaaaatttttgaagtccatagcgcaagaagacacaatatctagtagcagtgagcaagatgtcgctgtgaaaatttcctgtgagcttgcacaaaagcattggcaaagtgctcttgaaggtctaggagataccattttgataaatcaggaaacacagttctggcaggtggcatcagctatgcttgattatataatggggataccaaacgtccttgcttggggtaatgttcttaatactacatgctctgcggtcaagcacttctgctcccatgcacctaggctatcttggaggctgcagacagataagtggttgtcattattagtttcaggtggaattgagggcttcaaaaacagtgagatctgtttgattgatcttttctgtacaatgttgaatcattctgaaccagagcagcgttttgttgctgtacaacagcttgggaggattattaactcaacaagttctactgaagctgatttgaaatatccaaactatgaccaaaatttcctcatatctgtttcgacagtaacatcccttttggtaactcatacatgggacagagtagcagcattggctctccatgactcttctatgctattaaggaatcatgcaatggcattgcttactgaatatgtgccttttgttgataggaagcacctgcagtccttcctttcatccagtaacggtatcctgactggtttgggacaactttctggtgtaattgaagagggctattttacacgaatgtctttgctgttgttttctaaggcatgtctttattctaatcctgaagatatcgctttgatacctgaatgtgtttggcagaagttggaaaacatgcaaacatcaactggaggttttggatatatggagaaagatctctgcctagctctgtgccaactaaaaagtgaatcagatgctacaactgttgcaaaagttctttctggatgtaatagtcaaccagtcagccctgatttcaagagcatccgtgaatcaatccttcaggtgatgtcctctttgagttctattgaagcatactttgagttcttcgcagccagatctgcacaagaacatgaggaacttgaagaagctgagattgaattggagcttattgaaaaagagaagtcagttcctaactttgttgagcataccaatgatacgatggtgcttgccatgccatcatatgaccgtgatggtagtgaggttaataaacggctccagcaaatccgggaaaatattcggtccctggaaaggtctaggctgaaagaggaaattacagcgcgcagacaaaagaagctgcttctaagacatgcccgtgaaaagtacctagaagagacacgctccagggaaacggagcttatgcaagagctcgacagggaaagagctctcgagatggaacgtgaagtagaaaggcagcgtcaactggatattgagcgtgcaaagtctagggaactgcaattcaacattgatttggaaaaagagaaacaaactcagagagagcttcaacgcgaactggagcaagtcgagttggggcggtcatcaaggcgtgagttctctgccaatcccaacagggagaggtaccgcgaaagggatggtggaggcagagcacagcaggaggcggggagcctgaggtcttcgagcagccgaggccaggaggggggctctgcccaggcgcccgcaccggccgggccgggccctaccgtcatgctcgccgggtcaaggacgttctcgggggccaaccttccaacgattctgcagcctcgcgagcgcgctgccgacgaggacagcgcttgggccgaggacgctagcagcaacggagatcctgaactggacggcgtgaggccgcatgggccgcgaggcagcaggtcatcctcctctaggcaggttgcggagaggagggagcgggatggcactgctgccggcacgggcaggagagaagggaaatgggagaggaagcagcacccgtgactattccctgcttgtgttgtgcctaagcctaacggaggcttcctcaatcgcgttgtaattgtactcgtatgggcattggatcaggtggctgcttagtcaacggtaccgtgcattgataaaaaggttggatcatcgtatgggaacactaccaatcagctgcctgctcagtcaacagcaccattaccatcacactccgacttttgtcagatcccctaagggtgtgttcggttacaccaatccagaggggaggatttaaatccccttctagtcattttgactaagaggagatttaaacccctccaatgatgactagaggggatttaaacccttccaatctctctctggattggcctaaccgaacaagcccaaaaggcgctccatggcccacgctctcccttggctctgtcgactgccctcgtcctaagcactagcagcctgcttaggctttgttgggtttgacgtggattgagatggattaaagagatt

SEQ ID NO: 218406 - DNA, 2249 bp, Zea Mays
atgctgtatttgtatcctaccatacttctataggtcttgaacttttgctactatgccaaatgaagttatgctctaatttatttaccatttttgtgttaattctgttgaagggattaacctgtatttgggatgaaatgataagttattcacaactttgcaaaatatatcttattgcaatagtaccacctgacgaaaactgcaatttcttcctttgtgatatcctaaatcaacatcgacgatgtgtttactttttaagtaacttttaagattatttccactccatatttatattgcgaaccaattaaccaattaactttgttgtttatcgtgttggttaggaagctggccaatctcttgctcgttcacgtgcagcactgaagtatgttgtattggcaatttctgggcatatggatgatgtgctcacagaatataaagaagccatgcataagttacttttcgttctggagatgctagatccttttattgatccatctacaagtgccatggaagacacagtaatatttgatggtatctctgctatatatttggaaaagcaatcaagtgtatatgatattgccttaaatattatccatacagcagtaaagagagctgctgttctcccttctttagaacttgaatggcgacgaggagccattgccccaaggaggttttggatatatggagaaagatctctgcctagctctgtgccaactaaaaagtgaatcagatgctacaactgttgcaaaagttctttctggatgtaatagtcaaccagtcagccctgatttcaagagcatccgtgaatcaatccttcaggtgatgtcctctttgagttctattgaagcatactttgagttcttcgcagccagatctgcacaagaacatgaggaacttgaagaagctgagattgaattggagcttattgaaaaagagaagtcagttcctaactttgttgagcataccaatgatacgatggtgcttgccatgccatcatatgaccgtgatggtagtgaggttaataaacggctccagcaaatccgggaaaatattcggtccctggaaaggtctaggctgaaagaggaaattacagcgcgcagacaaaagaagctgcttctaagacatgcccgtgaaaagtacctagaagagacacgctccagggaaacggagcttatgcaagagctcgacagggaaagagctctcgagatggaacgtgaagtagaaaggcagcgtcaactggatattgagcgtgcaaagtctagggaactgcaattcaacattgatttggaaaaagagaaacaaactcagagagagcttcaacgcgaactggagcaagtcgagttggggcggtcatcaaggcccgctccagggagaggtaccgcgaaagggatggtggaggcagagcacagcaggaggcggggagcctgaggtcttcgagcagccgaggccaggaggggggctctgcccaggcgcccgcaccggccgggccgggccctaccgtcatgctcgccgggtcaaggacgttctcgggggccaaccttccaacgattctgcagcctcgcgagcgcgctgccgacgaggacagcgcttgggccgaggacgctagcagcaacggagatcctgaactggacggcgtgaggccgcatgggccgcgaggcagcaggtcatcctcctctaggcaggttgcggagaggagggagcgggatggcactgctgccggcacgggcaggagagaagggaaatgggagaggaagcagcacccgtgactattccctgcttgtgttgtgcctaagcctaacggaggcttcctcaatcgcgttgtaattgtactcgtatgggcattggatcaggtggctgcttagtcaacggtaccgtgcattgataaaaaggttggatcatcgtatgggaacactaccaatcagctgcctgctcagtcaacagcaccattaccatcacactccgacttttgtcagatcccctaagggtgtgttcggttacaccaatccagaggggaggatttaaatccccttctagtcattttgactaagaggagatttaaacccctccaatgatgactagaggggatttaaacccttccaatctctctctggattggcctaaccgaacaagcccaaaaggcgctccatggcccacgctctcccttggctctgtcgactgccctcgtcctaagcactagcagcctgcttaggctttgttgggtttgacgtggattgagatggattaaagagatt

SEQ ID NO: 218407 - DNA, 2477 bp, Zea Mays
atgctgtatttgtatcctaccatacttctataggtcttgaacttttgctactatgccaaatgaagttatgctctaatttatttaccatttttgtgttaattctgttgaagggattaacctgtatttgggatgaaatgataagttattcacaactttgcaaaatatatcttattgcaatagtaccacctgacgaaaactgcaatttcttcctttgtgatatcctaaatcaacatcgacgatgtgtttactttttaagtaacttttaagattatttccactccatatttatattgcgaaccaattaaccaattaactttgttgtttatcgtgttggttaggaagctggccaatctcttgctcgttcacgtgcagcactgaagtatgttgtattggcaatttctgggcatatggatgatgtgctcacagaatataaagaagccatgcataagttacttttcgttctggagatgctagatccttttattgatccatctacaagtgccatggaagacacagtaatatttgatggtatctctgctatatatttggaaaagcaatcaagtgtatatgatattgccttaaatattatccatacagcagtaaagagagctgctgttctcccttctttagaacttgaatggcgacgaggagccattgccccaaggaagcacctgcagtccttcctttcatccagtaacggtatcctgactggtttgggacaactttctggtgtaattgaagagggctattttacacgaatgtctttgctgttgttttctaaggcatgtctttattctaatcctgaagatatcgctttgatacctgaatgtgtttggcagaagttggaaaacatgcaaacatcaactggaggttttggatatatggagaaagatctctgcctagctctgtgccaactaaaaagtgaatcagatgctacaactgttgcaaaagttctttctggatgtaatagtcaaccagtcagccctgatttcaagagcatccgtgaatcaatccttcaggtgatgtcctctttgagttctattgaagcatactttgagttcttcgcagccagatctgcacaagaacatgaggaacttgaagaagctgagattgaattggagcttattgaaaaagagaagtcagttcctaactttgttgagcataccaatgatacgatggtgcttgccatgccatcatatgaccgtgatggtagtgaggttaataaacggctccagcaaatccgggaaaatattcggtccctggaaaggtctaggctgaaagaggaaattacagcgcgcagacaaaagaagctgcttctaagacatgcccgtgaaaagtacctagaagagacacgctccagggaaacggagcttatgcaagagctcgacagggaaagagctctcgagatggaacgtgaagtagaaaggcagcgtcaactggatattgagcgtgcaaagtctagggaactgcaattcaacattgatttggaaaaagagaaacaaactcagagagagcttcaacgcgaactggagcaagtcgagttggggcggtcatcaaggcgtgagttctctgccaatcccaacagccgctccagggagaggtaccgcgaaagggatggtggaggcagagcacagcaggaggcggggagcctgaggtcttcgagcagccgaggccaggaggggggctctgcccaggcgcccgcaccggccgggccgggccctaccgtcatgctcgccgggtcaaggacgttctcgggggccaaccttccaacgattctgcagcctcgcgagcgcgctgccgacgaggacagcgcttgggccgaggacgctagcagcaacggagatcctgaactggacggcgtgaggccgcatgggccgcgaggcagcaggtcatcctcctctaggcaggttgcggagaggagggagcgggatggcactgctgccggcacgggcaggagagaagggaaatgggagaggaagcagcacccgtgactattccctgcttgtgttgtgcctaagcctaacggaggcttcctcaatcgcgttgtaattgtactcgtatgggcattggatcaggtggctgcttagtcaacggtaccgtgcattgataaaaaggttggatcatcgtatgggaacactaccaatcagctgcctgctcagtcaacagcaccattaccatcacactccgacttttgtcagatcccctaagggtgtgttcggttacaccaatccagaggggaggatttaaatccccttctagtcattttgactaagaggagatttaaacccctccaatgatgactagaggggatttaaacccttccaatctctctctggattggcctaaccgaacaagcccaaaaggcgctccatggcccacgctctcccttggctctgtcgactgccctcgtcctaagcactagcagcctgcttaggctttgttgggtttgacgtggattgagatggattaaagagatt

SEQ ID NO: 218408 - DNA, 553 bp, Zea Mays
ctcccacctcgtgtgtctgtttctccggcctgggctctgggctcgggcgtagtccagttgccaccaaccgagccagagagagaacaaagaacgggtgaaagaaatctcggaaaggttccagatttcctcgaggtggaggcctccttttcctcggccgaatcgctcgttcgctttctctctctctttcctcccatcgagcatgcattcttttctgctgctgcgaccgtaggatcggcgtccagcagcctcgccgcgtcgggttctaacctggctggtacaggtactctaggataagatgttgtgtcgtctcagtgtgctttgtgaataccattattacatcaatatcaacgaagagtttgttgtcttcatccgtgctttccaggtcgatttgatctaatgtaacgtgaagtttcagaaatgctttacgatagcatcagctggactgtgtactgtatgttgtatcgaacccttctttcttcactaacatacagtaccagatattcatcccttcaagctaccatttaaaaagcaagcttcatctgttttgaccatt

SEQ ID NO: 218409 - DNA, 2130 bp, Zea Mays
cggcgcgtgcgccgccccaacatcatccgcttcttcgaggtcatggcccaccaggtccaagatctacttcgccatggagttcgtcccgcggcgggggagctcttcgcgtgcgtcgccaagggccgcctcaaggaggacaccgcgcgcaggtacttccagtagctcatctccgccatcggcttctgccacgcccacggcgtcttccactgcaacctcaagcccgagaatctcctcgttgacgagcgcggcgacctcaaggtctccgacttcggccctctcggcggcaaacaaatttactgaagctacactgcctgcagatgctgagaaaaagccacaggatgggaaaactctgccaaagtatggtgccatgatcatggaagctcttttggaattgaatgagccgaatggttcagatattgctgcaatcttcggcttcatagaggtctccgacttcggcctctcggcggtcgccgacaagttccaccccgacgccctcctccacaccttctgtggcacaccttcctatgtcgctccgaaggtatctagcaggtcacttaagaaggccattggattcaaaactcattcccgacggccggcctcctcctcggggcccaccaagcgtggaggcctcctgctggggcgctacgagctgggtcgcctgctcgcccacggcacctttgccaaggtgtaccacgcccgccacgacgacgacaccggcgagaccatcgccatcaaggtgctcgacaaggagaaggccctgtgcaacggcctcgtcctgcacatcaagcgcgagatcgccatcctccgccgcgtgcgccgccccaacatcatccgcctcttcgaggtcatggccaccaggtccaagatctacttcgccatggagttcgtccgcggcggggagctcttcgcgtgcgtcgccaagggccgcctcaaggaggacaccgcgcgcaggtatggtgccatgatcatggaagctcttttggaattgaatgagccgaatggttcagatattgctgcaatcttcggcttcatagaggtctccgacttcggcctctcggcggtcgccgacaagttccaccccgacgccctcctccacaccttctgtggcacaccttcctacgtcgctccgaaggtatctagcaggtcacttaagaaggccattggattcaaaactcatgctgccggcgtgaagcactggccaccaggtgctgcacgtcaacggccaacaggggcaccgtgcaggtgggcagaagcagccagcgacaacagtagggcacagcatgctgatattgtcaatcaaggaaaactggtgtctgatgagatcatcataaatctgctgtcaagacgcctagaagagggagaagaaaagggtagaaaatggctgatgccgaggatatccagcccctcgtctgcgacaacagaactggcatggtcaaggctgggttcgctggcgacgacgccccgagggccgtcttccccagcatcgtggggcgcccgcgccacactggtgtcatggtcgggatggggcagaaggacgcctacgtcggtgacgaggcgcagtccaagaggggtatcctaaccctcaagtaccccatcgagcacgggatcgtcagcaactgggacgacatggagaagatctggcatcacaccttctacaacgagctccgcgtggctcccgaggagcaccccatcctcctcaccgaggtgcccctgaaccccaaggctaacaaggagaagatgacccagatcatgttcgagaccttcaacacccccgctattggtcgtaccacaggtatcgtgctcgactcgggagatggtgtgagccacaccgtccccatctacgagggatacgccctcccccacgccatccttcgtcttgacctggccggtcgcgacctcaccgactgctcatctgcgctagactgtgtttgttcaaaagatattattcaaaatttaactgaaagattttattccttgcacaattattgtattgctttctttgttgaatattatttgcttggtgatgggctgctgttgctgctagcaggattgagaaccgatgggctgcaatctattgttggtgcctggtatcaaagagggagacaggggtgcacctgttcacaatcttga

SEQ ID NO: 218410 - DNA, 1098 bp, Zea Mays
atgttgacctcaccatcgccctccggtctcgcggcctggtgggcctcggcctctccgactctgggttcattcgcctgcactgcaacccatctcggaaccctccctcgcctccctcgcgttcagtttgatccaggacgaagggaacggtgagccgccatggtgaaggacagcgcgtactacgacgtcctggagatcagcactgacgcctccatggccgagatcaagaaggcctattacctcaaggccaagctggtgcacccggacaagaatccgagcaatcctgatgctgcgcgcaagtttcaggaactaggcgaagcctatcaggtcctaagtgatccactgaaaaaggagtcttacgataagtatggaaaggaaggacttccacaagataatatgattgatccaactgctgtctttggaatgctttttgggagcgactattttgaagattatgttggccaacttgcgctagcatctgttgcctctgtagagattgaggaagaatcaaacacacctgaggcaaggacaaggattcaagagaagataaaggacgtgcaaaccgaaagagagcaaatacttactcaaagtctaagggatcggctgcaaccatatgttgatgggaagcaagatgagtttggtgattgggcaagtgcagaagctcagcgtttgtctcaagctgcttttggtgaggctatgcttcacacgattggctacatctatgttcggcaagcagcacgagaacttggaaaaagcaaactgtatatgggtgtaccttttattgctgagtgggtaagggacaagggccaccacgtaaaatcacaggttaatgctgccgcaggtgcaatttctctgatacagctacaagaagggataaaaaagattgaagagggtgacaaggaagagcagcttattaagagtatcgaagagaaaaaagatgcaatgctgaattctttatggaaaattaatgtggtcgatattgagtcaacgctttcacgggtctgccaagcagttttaagagaaaatgatattcccagagacgtactcaagttgcgagcaagaggactgaaaaagctagggacgatatttcaagacgcggcg

SEQ ID NO: 218411 - DNA, 1482 bp, Zea Mays
atgttgacctcaccatcgccctccggtctcgcggcctggtgggcctcggcctctccgactctgggttcattcgcctgcactgcaacccatctcggaaccctccctcgcctccctcgcgttcagtttgatccaggacgaagggaacggtgagccgccatggtgaaggacagcgcgtactacgacgtcctggagatcagcactgacgcctccatggccgagatcaagaaggcctattacctcaaggccaagctggtgcacccggacaagaatccgagcaatcctgatgctgcgcgcaagtttcaggcgaagcctatcaggtcctaagtgatccactgaaaaaggagtcttacgataagtatggaaaggaaggacttccacaagataatatgattgatccaactgctgtctttggaatgctttttgggagcgactattttgaagattatgttggccaacttgcgctagcatctgttgcctctgtagagattgaggaagaatcaaacacacctgaggcaaggacaaggattcaagagaagataaaggacgtgcaaaccgaaagagagcaaatacttactcaaagtctaagggatcggctgcaaccatatgttgatgggaagcaagatgagtttggtgattgggcaagtgcagaagctcagcgtttgtctcaagctgcttttggtgaggctatgcttcacacgattggctacatctatgttcggcaagcagcacgagaacttggaaaaagcaaactgtatatgggtgtaccttttattgctgagtgggtaagggacaagggccaccacgtaaaatcacaggttaatgctgccgcaggtgcaatttctctgatacagctacaagaagggataaaaaagattgaagagggtgacaaggaagagcagcttattaagagtatcgaagagaaaaaagatgcaatgctgaattctttatggaaaattaatgtggtcgatattgagtcaacgctttcacgggtctgccaagcagttttaagagaaaatgatattcccagagacgtactcaagttgcgagcaagaggactgaaaaagctagggacgatatttcaaggcgcaaaatcaaactaccgtcgtgaaaacagcctgcgtgttgaagatgacgcggcagaagccacaccgtcgcactgaggatggtggacaaatctggatatgatgtcatatactgcgtcaccggctcaccgagactgagcccgaaagccgaccactgtggaaggagacaaacgatgctgtttttccaaagatttttgtacggtataagcgcaaggtattgctaccatgccatactttatcgctgtccgcactgcatatagttctgttggacgaaaaatgtaatatttgaagtcaaaatgtgatgcgtaatgatttaagcgcatgatcataggctttgaatgtcatttgcgatcggactcagatccttggtggatctttaaaaaaaacgagaataagttct

SEQ ID NO: 218412 - DNA, 3104 bp, Zea Mays
ccctcactcctaagcgccgtcgcgatctgctgcggtggccgctgccgtcgccgtccatccccaccgcctcgaccacgccaccgacgccgcctctcgctccccctcgccgcgccgcccgaacgccacgatgcgtcacctcctcctctcccgcttcctccgccgcggtggcggcagcggcatccccaacggccactaccaccacctccccctcctccgcgccctctcctcctccccctccccggtctcctcggacgcagagctccgcaagtacgcgggctacgcgctgcttcttctcggctgcggcgccgcgacctactactccttcccgttccccgccgacgcgctgcacaagaaggccgtgccattccggtacgcgccgctgccggaggacctccacgccgtctccaactggagcggcacgcacgaggtccacgcccgcgtcctgctccagccggactcgctcccggccctcgagggcgcgctcgccgccgcgcacaaggagcgccgcaagctcaggcccctcggctccggcctgtcccccaatgggatcgcgctctcccgcgctgggatggtcaacctcgcgctcatggacaaggtgctcgacgtcgacgccaagaagaagaccgtcacggtgcaggctgggatacgtgtcgcggagctcgtcgacgcgcttcgggaacatggcctcacgctgcagaactttgcgtccattcgggagcagcaggtcggagggttcactcaggttggtgcccatggcactggtgcaacattacctcctgttgatgagcaagtcattagcatgaaactggttacccctgccaaagggacaatagagctgtcgagggagaaggatcctgagttgttttatcttgctcgctgtggacttggtggcctaggtgttgttgcagaagttacccttcagtgcgtagaaagacaccagcttgtggaacacacatttgtttccaatgcagatgaagtcaagaaaaaccacaagaagtggctatccgaaaacaaacatattaagtacttgtggattccatatactgacacggttgttgttgtccaatgcaatcctccctcaaagtggataaccccaaagttggcatcaaaatatggaaaagatgaagctttacagcatgttcgggacctttatcgcgagtcactgaaaaaatatagaactgaaacagaaagtaaagacccagaaatagatacactttcatttactgagctgagggacaagctgcttgcccttgatcctctggataaagatcatgtggtgaaaatcaataaagcggaagctgagtattggaagaagtcagaagggtatcgcatgggctggagtgatgaaatactgggcttcgattgtggtgggcagcagtgggtttctgaaaactgcttccccactggaaccctagcaaagccaagtatgaaggatcttgattatatagataagctgctgcagttgattgaaaaggaggagatacccgcacctggacctatcgagcagcgttggactgcccgcagcaagagcccgatgagcccggcatcaagctctgaagaagatgatgtattttcatgggttggtattataatgtatctgccaacatctgatgctcgccaaaggaaggaaatcacagaggagttcttcagttacaggagcctggcgcgaagtctctgggatgattattccgcctatgaacactgggccaagatcgaggttccaaaagacaaggacgaacttgccgaactccaggcccggctgaggaagcgttttcctgtcgatgcatataacaaggcacgtatggagctggaccccaacaaggtgctctcaaacgccaagttggagaagatgttcccagtgttggagcctcctcaccagacaaagtaatacgtgttgaagagcgcagagcaagggcacgtgaaagttgtgttctgtccacctggacctgtcaaaatcgcagctatccggctgatatataccgaagtcaaagatgagaacttgtccagactgattctgatactgcagggcaaaataatgtctacaaccagagaatccatcaaggagatctttcgatttaaagttgacacattccagatcacggaattactggtgaacatcactaagcatgtcctcaagcccaagcatgaagtgttgactgcagaggggaaagctaagctcctgaaggagtacaatgtggtggattcacagttgcctcgcatgctggagaatgatgctgttgctcgctattatgggctaggcaagggaactgttgttaaggttatatacgacagcgagcttaccgggaaccacgtgacgtaccgatgcattacctgaggggcccatgtgtttcggtggatgaagtctcgtaagcacccaattgtgcaggatgaagcttgctgtaagctattggtaaaatcatcttgcgccattgccgtaccttaagtgcttggtgttaatcttggaaacagtgagacaactaatcctgtagtgagttatctcgatcactttcagatgtctctgatggccttcgaggctgttaccttagctgtcctcttgcaggctacagctgaagtgtgttgcaaaatcacttgattcgaaccaagctgtatccagttatggattctgttaggttttgcaaatcagtgacaaacatctgtcacaaacaatagtccagaggctaagtaaggtgtcctataatatgcagctaactgtgccttggtctgtttttctggggcagaatttcttcgttgccctctgccttccactttcgtctgctgctgctcttgctcgtggggttactgcaatacttgctgttgctgtcactctgctggtgatgtactgctgttcctggtggagtggtgggagtgctccctgcatctgcttttcagtatgtgaggcttgagcttgctcatgtctgatagccggcactggttttatgaagaactcgtcagctactttctccagacatctgatctaggagatgatccagtctgaaacaaaagtatcttttgattttatttgacttcgtcaataaaccgggacaaagcctgtttcatttcatggatacggcaatatgaatggaatttaatatctacgatatcaa

SEQ ID NO: 218413 - DNA, 1341 bp, Zea Mays
aacccaaatcaaatttccccaaacggaggaaagaaacggaagccgaaaagaaaagcgtgctcttttttcatccttcgtgcgtggtgcgcgagcgtgcgcctcccttaccatctcgcgatcccaattcgatccgctcgccagctctccccatcagacctgccctccccggccgggcgattcgccgccgctactcgaattcgcgtggacccgtcatccattctcgctccccggcgccccaaaccctagatccgctgctgttcttcccaccgccgccgccatgttctggcgcatgaccggcctctccgcggcctcgcccgtggatacaattcttgacaaagaaaattttacattggaagaacttcttgacgaggatgaaattattcaggagtgcaaagcacttaactcacgactcataaacttcttacgtgacaaggctcaggtggaacagttgcttcgttatgttgtggaagaagttccagatgatgctgaaaggaagcgatctttcaagttcccatttattgcttctgaaatatttacttgcgaaatcgatgtcattttgaggaccctagtagaggatgaagagctaatggatttgcttttctcatttgtgaaacctgatcatccgcatagtacattattgtctggttacttcagtaaggtggtaatatgtttggtgctgcggaagactgctccacttatgagttatgttcaggggcatccagagatagttgtccagcttgttgacctgattggcatcacatcgataatggaggtgctgatacgactgattggtgctgatgagaccatatattcaaactatggtgatacgttgcagtggttagaaaatacaaatgtacttgaaatgattgcagataagtttaactcgtcggattctcctgaagtgcatgccaatgctgcggaaattctatgtgcagttactcggtgtgcgcctccatctcttgctgcaaagatatgcagtccaagttttgttcggaggttgttccatcacgctcttgaagaatcaagacccaaatctgttctgcttcattcactgtcagtgtgcatatctttgctggatccaaaaagactagcatcagcttcgtatcaagcattcaaaagcaacttaagtcatggggcattggtcatggccagtccagagacagttgatggtatgcttgagagtctaggcaacttgctgaatttattggacacatcggctgctgaaagtgtgttgccaacaacttatggatgtttgcgcccacctcttggaaaacatcgtctgaagaaaaggagctagtaagacagtcagcaataaagcgatcgattgatttgttctttgag

SEQ ID NO: 218414 - DNA, 2802 bp, Zea Mays
tatgttcggtaatatctttagttgcaacgaggcaacatcttccaacggaaagttttccagacagaaccgatgtacaatgtttgcacaggtggcaaaaggttctaaaccctgaattggtcaaagggccatggtccaaagaagaagacgaaatcatagttcagatggtaaacaaatacgggccaaagaaatggtcggccatcgctcaagctttgcctggacgcataggaaagcaatgccgggagcggtggcacaatcatcttaacccagccataaacaaggaggcatggacgcaagaagaggagattactcttattcatgctcataggatgtatggaaataaatgggccgaacttacgaaatttttacctggaaggacggacaatgcaattaaaaatcactggaacagttcagtgaagaaaaaggtcgattcgtacatatcttctggtttactttcacaagtcccatgcctctctctgattgaatgtcctgcacaatgtgactctttatcggctatggaccaacaaaacaacggaggtactgattgcaatgaccagaacactagcgtggtcttaagctctgatttacaagtaaatgtggatgccaacaagaaagaagcacatgactctcactcgtccttgtgtcaaggggtatgctatccttccacagagactgtaggatctgttttgcctgatgacctggagatggatatggatgaaggatcaggaaactctatttttgcagacgatcaaactctttgtagcacatcaaatcaagaacaatctatggtgccatttgttgttgcacaggaaatgcctgtctctgtgctatcaagtgtttctagcgctgagcagaaacggcacttaatctctgatgccaaaagcttgaaatccgaactttggaaagatgtttgtttgcaaactcttattacaggagatacagatgaccctgatgcttcttcaagattaaataacccagattcttctaaaatggacaccaattttttgaaagaggcctacccattacacacaccaaatccatccagtgtgattgaaactgtatatgaaccgatggcgttggtgacaatctctcccccttttatatgttcagatggtttgtctttcgcacccgaaaatagatctaagccaggagaaatgtcagactgtgaagcagagatggtcacatgctcaaacaatttttttggtaatgccgagcaatctgctaaacttgccagcagtgatgacaggccagaggctttcacaatgactgagagcactacaaactgtgggggtgaacaattgacagatgccaaagaacctgtggccagtacagcaaaagaacggttatcgaaagacatcgagactatgccagataaaaagaagggtgagggggctctattctatgaacctcctcgattccctggtttggatgtcccgtttatcagttgcgatcttgtaacttctgctgatctgcaagaatttagtccccttggaattaggcagtggatgcggtcgaccatgaatgtcccaactcctttaagattatggggctctccaacacatgatgaaagcccagatgcactaaaaactgctgctgaaagcttcccatgcacaagttcaataatgaaaaaaagacagagaagtctattgtcccctactccagatgaaagaattgagaagaaatctgggattgcaaagggggtgacggacatctcctatatgataacggccacatgttccatgaatgcaaccaatgatgaagacattgttactgaatcagctgtgtgtgctaagcaaccttctttgaaacatctagacaagaagcttgagttctctgacattaacaaggaaaactctgatggagcatctgaacaggccaaagatgcacaaaacacacaactcgtggatgagcaacattcctcaccaaatgttgtgaatcctaacactgatctacaagacaatatacaacctgtacagattcttgtagagcaaagcagcaataaccttatttcctctgatcatggtgcaaagccatcctgtaaggaagtgattagttcaaaatcaaagcctacaaaactacttgttgaaaaatcatcaccatgtatcaacgtggattacgaatatgtgaatttattggctgataccccaggtatcaaaagaggactcgaatctccatctgcatggaagtctccttggtatatcgatatgcacatgcactttcagggttttgtcagcccagcagacagaacttatgacgcgttaggattagtgaatcgtttaagcaagcacagtgctgctgctgcagtggaggcctgtgagatgctagcaagtggcaacacgacttctgataaggaaaacaaggataatacggatggcaaggaactagtgacaagaaaatcacagattaagatcatggccgaggcgcgagtcctggatttcgacgaatctcccgcacctgcaagaacagcagataagaaacttggcagctgtcaccggagatctgttagctcacccattcttccttcccccaaccttagaagtttccgataggtacaccatatatggcatcatcgtacattacccacctgcatgtattggtgaactctattgttattatgtctccttagagcgcgttgttgaaactattggagcgtttcctttctttcgttactctattgttattactattattatgtctctcagcccggaaacaggcatcagtaccagtgaactgttgaaactaccctaatcattcaaattaaattattatattgcccgatgcatgtagcttcttgtgacaacaacg

SEQ ID NO: 218415 - DNA, 2766 bp, Zea Mays
gaggaccactggtccgacccggcgttcaaccaaaggaaattggacacccgaagaggatgctatattgtcccgtgcggttcagacataccaagggaaaaactggaaaaagatagcggaaagttttccagacagaaccgatgtacaatgtttgcacaggtggcaaaaggttctaaaccctgaattggtcaaagggccatggtccaaagaagtggcacaatcatcttaacccagccataaacaaggaggcatggacgcaagaagaggagattactcttattcatgctcataggatgtatggaaataaatgggccgaacttacgaaatttttacctggaaggacggacaatgcaattaaaaatcactggaacagttcagtgaagaaaaaggtcgattcgtacatatcttctggtttactttcacaagtcccatgcctctctctgattgaatgtcctgcacaatgtgactctttatcggctatggaccaacaaaacaacggaggtactgattgcaatgaccagaacactagcgtggtcttaagctctgatttacaagtaaatgtggatgccaacaagaaagaagcacatgactctcactcgtccttgtgtcaaggggtatgctatccttccacagagactgtaggatctgttttgcctgatgacctggagatggatatggatgaaggatcaggaaactctatttttgcagacgatcaaactctttgtagcacatcaaatcaagaacaatctatggtgccatttgttgttgcacaggaaatgcctgtctctgtgctatcaagtgtttctagcgctgagcagaaacggcacttaatctctgatgccaaaagcttgaaatccgaactttggaaagatgtttgtttgcaaactcttattacaggagatacagatgaccctgatgcttcttcaagattaaataacccagattcttctaaaatggacaccaattttttgaaagaggcctacccattacacacaccaaatccatccagtgtgattgaaactgtatatgaaccgatggcgttggtgacaatctctcccccttttatatgttcagatggtttgtctttcgcacccgaaaatagatctaagccaggagaaatgtcagactgtgaagcagagatggtcacatgctcaaacaatttttttggtaatgccgagcaatctgctaaacttgccagcagtgatgacaggccagaggctttcacaatgactgagagcactacaaactgtgggggtgaacaattgacagatgccaaagaacctgtggccagtacagcaaaagaacggttatcgaaagacatcgagactatgccagataaaaagaagggtgagggggctctattctatgaacctcctcgattccctggtttggatgtcccgtttatcagttgcgatcttgtaacttctgctgatctgcaagaatttagtccccttggaattaggcagtggatgcggtcgaccatgaatgtcccaactcctttaagattatggggctctccaacacatgatgaaagcccagatgcactaaaaactgctgctgaaagcttcccatgcacaagttcaataatgaaaaaaagacagagaagtctattgtcccctactccagatgaaagaattgagaagaaatctgggattgcaaagggggtgacggacatctcctatatgataacggccacatgttccatgaatgcaaccaatgatgaagacattgttactgaatcagctgtgtgtgctaagcaaccttctttgaaacatctagacaagaagcttgagttctctgacattaacaaggaaaactctgatggagcatctgaacaggccaaagatgcacaaaacacacaactcgtggatgagcaacattcctcaccaaatgttgtgaatcctaacactgatctacaagacaatatacaacctgtacagattcttgtagagcaaagcagcaataaccttatttcctctgatcatggtgcaaagccatcctgtaaggaagtgattagttcaaaatcaaagcctacaaaactacttgttgaaaaatcatcaccatgtatcaacgtggattacgaatatgtgaatttattggctgataccccaggtatcaaaagaggactcgaatctccatctgcatggaagtctccttggtatatcgatatgcacatgcactttcagggttttgtcagcccagcagacagaacttatgacgcgttaggattagtgaatcgtttaagcaagcacagtgctgctgctgcagtggaggcctgtgagatgctagcaagtggcaacacgacttctgataaggaaaacaaggataatacggatggcaaggaactagtgacaagaaaatcacagattaagatcatggccgaggcgcgagtcctggatttcgacgaatctcccgcacctgcaagaacagcagataagaaacttggcagctgtcaccggagatctgttagctcacccattcttccttcccccaaccttagaagtttccgataggtacaccatatatggcatcatcgtacattacccacctgcatgtattggtgaactctattgttattatgtctccttagagcgcgttgttgaaactattggagcgtttcctttctttcgttactctattgttattactattattatgtctctcagcccggaaacaggcatcagtaccagtgaactgttgaaactaccctaatcattcaaattaaattattatattgcccgatgcatgtagcttcttgtgacaacaacg

SEQ ID NO: 218416 - DNA, 2641 bp, Zea Mays
atgccgagtgataaagcaaaagctccaaagaagaagggcgaagaggatcctggaatcccgccagctccctgtgaaggagaaattagccatgagccacatagacaacggtcactcaatgggtggcaaaaggttctaaaccctgaattggtcaaagggccatggtccaaagaagaagacgaaatcatagttcagatggtaaacaaatacgggccaaagaaatggtcggccatcgctcaagctttgcctggacgcataggaaagcaatgccgggagcggtggcacaatcatcttaacccagccataaacaaggaggcatggacgcaagaagaggagattactcttattcatgctcataggatgtatggaaataaatgggccgaacttacgaaatttttacctggaaggacggacaatgcaattaaaaatcactggaacagttcagtgaagaaaaaggtcgattcgtacatatcttctggtttactttcacaagtcccatgcctctctctgattgaatgtcctgcacaatgtgactctttatcggctatggaccaacaaaacaacggaggtactgattgcaatgaccagaacactagcgtggtcttaagctctgatttacaagtaaatgtggatgccaacaagaaagaagcacatgactctcactcgtccttgtgtcaaggggtatgctatccttccacagagactgtaggatctgttttgcctgatgacctggagatggatatggatgaaggatcaggaaactctatttttgcagacgatcaaactctttgtagcacatcaaatcaagaacaatctatggtgccatttgttgttgcacaggaaatgcctgtctctgtgctatcaagtgtttctagcgctgagcagaaacggcacttaatctctgatgccaaaagcttgaaatccgaactttggaaagatgtttgtttgcaaactcttattacaggagatacagatgaccctgatgcttcttcaagattaaataacccagattcttctaaaatggacaccaattttttgaaagaggcctacccattacacacaccaaatccatccagtgtgattgaaactgtatatgaaccgatggcgttggtgacaatctctcccccttttatatgttcagatggtttgtctttcgcacccgaaaatagatctaagccaggagaaatgtcagactgtgaagcagagatggtcacatgctcaaacaatttttttggtaatgccgagcaatctgctaaacttgccagcagtgatgacaggccagaggctttcacaatgactgagagcactacaaactgtgggggtgaacaattgacagatgccaaagaacctgtggccagtacagcaaaagaacggttatcgaaagacatcgagactatgccagataaaaagaagggtgagggggctctattctatgaacctcctcgattccctggtttggatgtcccgtttatcagttgcgatcttgtaacttctgctgatctgcaagaatttagtccccttggaattaggcagtggatgcggtcgaccatgaatgtcccaactcctttaagattatggggctctccaacacatgatgaaagcccagatgcactaaaaactgctgctgaaagcttcccatgcacaagttcaataatgaaaaaaagacagagaagtctattgtcccctactccagatgaaagaattgagaagaaatctgggattgcaaagggggtgacggacatctcctatatgataacggccacatgttccatgaatgcaaccaatgatgaagacattgttactgaatcagctgtgtgtgctaagcaaccttctttgaaacatctagacaagaagcttgagttctctgacattaacaaggaaaactctgatggagcatctgaacaggccaaagatgcacaaaacacacaactcgtggatgagcaacattcctcaccaaatgttgtgaatcctaacactgatctacaagacaatatacaacctgtacagattcttgtagagcaaagcagcaataaccttatttcctctgatcatggtgcaaagccatcctgtaaggaagtgattagttcaaaatcaaagcctacaaaactacttgttgaaaaatcatcaccatgtatcaacgtggattacgaatatgtgaatttattggctgataccccaggtatcaaaagaggactcgaatctccatctgcatggaagtctccttggtatatcgatatgcacatgcactttcaggccgaggcgcgagtcctggatttcgacgaatctcccgcacctgcaagaacagcagataagaaacttggcagctgtcaccggagatctgttagctcacccattcttccttcccccaaccttagaagtttccgataggtacaccatatatggcatcatcgtacattacccacctgcatgtattggtgaactctattgttattatgtctccttagagcgcgttgttgaaactattggagcgtttcctttctttcgttactctattgttattactattattatgtctctcagcccggaaacaggcatcagtaccagtgaactgttgaaactaccctaatcattcaaattaaattattatattgcccgatgcatgtagcttcttgtgacaacaacg

SEQ ID NO: 218417 - DNA, 3274 bp, Zea Mays
caggcaatagcaaagcaagcggaagcatccattccatcccctctcaatcgcctccgcggctccgcctccccctcccccaaatttgaaacctccgaggcggacgcgaggcgaagccgtgcgtcggtcatcgagacggccggctgggcgaccgcgccgccgcctctctcctctcgttgcgtgccgcgggggttgcccgcacttgggcgcgcgctcgggcgcggggttggatgcagctccgccgacgtaggtgctcgtcgatcgcgtcggccacaccgggacgtaatcatgccgagtgataaagcaaaagctccaaagaagaagggcgaagaggatcctggaatcccgccagctccctgtgaaggagaaattagccatgagccacatagacaacggtcactcaatgggaggaccactggtccgacccggcgttcaaccaaaggaaattggacacccgaagaggatgctatattgtcccgtgcggttcagacataccaagggaaaaactggaaaaagatagcggaaagttttccagacagaaccgatgtacaatgtttgcacaggtggcaaaaggttctaaaccctgaattggtcaaagggccatggtccaaagaagaagacgaaatcatagttcagatggtaaacaaatacgggccaaagaaatggtcggccatcgctcaagctttgcctggacgcataggaaagcaatgccgggagcggtggcacaatcatcttaacccagccataaacaaggaggcatggacgcaagaagaggagattactcttattcatgctcataggatgtatggaaataaatgggccgaacttacgaaatttttacctggaaggacggacaatgcaattaaaaatcactggaacagttcagtgaagaaaaaggtcgattcgtacatatcttctggtttactttcacaagtcccatgcctctctctgattgaatgtcctgcacaatgtgactctttatcggctatggaccaacaaaacaacggaggtactgattgcaatgaccagaacactagcgtggtcttaagctctgatttacaagtaaatgtggatgccaacaagaaagaagcacatgactctcactcgtccttgtgtcaaggggtatgctatccttccacagagactgtaggatctgttttgcctgatgacctggagatggatatggatgaaggatcaggaaactctatttttgcagacgatcaaactctttgtagcacatcaaatcaagaacaatctatggtgccatttgttgttgcacaggaaatgcctgtctctgtgctatcaagtgtttctagcgctgagcagaaacggcacttaatctctgatgccaaaagcttgaaatccgaactttggaaagatgtttgtttgcaaactcttattacaggagatacagatgaccctgatgcttcttcaagattaaataacccagattcttctaaaatggacaccaattttttgaaagaggcctacccattacacacaccaaatccatccagtgtgattgaaactgtatatgaaccgatggcgttggtgacaatctctcccccttttatatgttcagatggtttgtctttcgcacccgaaaatagatctaagccaggagaaatgtcagactgtgaagcagagatggtcacatgctcaaacaatttttttggtaatgccgagcaatctgctaaacttgccagcagtgatgacaggccagaggctttcacaatgactgagagcactacaaactgtgggggtgaacaattgacagatgccaaagaacctgtggccagtacagcaaaagaacggttatcgaaagacatcgagactatgccagataaaaagaagggtgagggggctctattctatgaacctcctcgattccctggtttggatgtcccgtttatcagttgcgatcttgtaacttctgctgatctgcaagaatttagtccccttggaattaggcagtggatgcggtcgaccatgaatgtcccaactcctttaagattatggggctctccaacacatgatgaaagcccagatgcactaaaaactgctgctgaaagcttcccatgcacaagttcaataatgaaaaaaagacagagaagtctattgtcccctactccagatgaaagaattgagaagaaatctgggattgcaaagggggtgacggacatctcctatatgataacggccacatgttccatgaatgcaaccaatgatgaagacattgttactgaatcagctgtgtgtgctaagcaaccttctttgaaacatctagacaagaagcttgagttctctgacattaacaaggaaaactctgatggagcatctgaacaggccaaagatgcacaaaacacacaactcgtggatgagcaacattcctcaccaaatgttgtgaatcctaacactgatctacaagacaatatacaacctgtacagattcttgtagagcaaagcagcaataaccttatttcctctgatcatggtgcaaagccatcctgtaaggaagtgattagttcaaaatcaaagcctacaaaactacttgttgaaaaatcatcaccatgtatcaacgtggattacgaatatgtgaatttattggctgataccccaggtatcaaaagaggactcgaatctccatctgcatggaagtctccttggtatatcgatatgcacatgcactttcagggttttgtcagcccagcagacagaacttatgacgcgttaggattagtgaatcgtttaagcaagcacagtgctgctgctgcagtggaggcctgtgagatgctagcaagtggcaacacgacttctgataaggaaaacaaggataatacggatggcaaggaactagtgacaagaaaatcacagattaagatcatggccgaggcgcgagtcctggatttcgacgaatctcccgcacctgcaagaacagcagataagaaacttggcagctgtcaccggagatctgttagctcacccattcttccttcccccaaccttagaagtttccgataggtacaccatatatggcatcatcgtacattacccacctgcatgtattggtgaactctattgttattatgtctccttagagcgcgttgttgaaactattggagcgtttcctttctttcgttactctattgttattactattattatgtctctcagcccggaaacaggcatcagtaccagtgaactgttgaaactaccctaatcattcaaattaaattattatattgcccgatgcatgtagcttcttgtgacaacaacg

SEQ ID NO: 218418 - DNA, 3278 bp, Zea Mays
caggcaatagcaaagcaagcggaagcatccattccatcccctctcaatcgcctccgcggctccgcctccccctcccccaaatttgaaacctccgaggcggacgcgaggcgaagccgtgcgtcggtcatcgagacggccggctgggcgaccgcgccgccgcctctctcctctcgttgcgtgccgcgggggttgcccgcacttgggcgcgcgctcgggcgcggggttggatgcagctccgccgacgtaggtgctcgtcgatcgcgtcggccacaccgggacggtggtaatcatgccgagtgataaagcaaaagctccaaagaagaagggcgaagaggatcctggaatcccgccagctccctgtgaaggagaaattagccatgagccacatagacaacggtcactcaatgggaggaccactggtccgacccggcgttcaaccaaaggaaattggacacccgaagaggatgctatattgtcccgtgcggttcagacataccaagggaaaaactggaaaaagatagcggaaagttttccagacagaaccgatgtacaatgtttgcacaggtggcaaaaggttctaaaccctgaattggtcaaagggccatggtccaaagaagaagacgaaatcatagttcagatggtaaacaaatacgggccaaagaaatggtcggccatcgctcaagctttgcctggacgcataggaaagcaatgccgggagcggtggcacaatcatcttaacccagccataaacaaggaggcatggacgcaagaagaggagattactcttattcatgctcataggatgtatggaaataaatgggccgaacttacgaaatttttacctggaaggacggacaatgcaattaaaaatcactggaacagttcagtgaagaaaaaggtcgattcgtacatatcttctggtttactttcacaagtcccatgcctctctctgattgaatgtcctgcacaatgtgactctttatcggctatggaccaacaaaacaacggaggtactgattgcaatgaccagaacactagcgtggtcttaagctctgatttacaagtaaatgtggatgccaacaagaaagaagcacatgactctcactcgtccttgtgtcaaggggtatgctatccttccacagagactgtaggatctgttttgcctgatgacctggagatggatatggatgaaggatcaggaaactctatttttgcagacgatcaaactctttgtagcacatcaaatcaagaacaatctatggtgccatttgttgttgcacaggaaatgcctgtctctgtgctatcaagtgtttctagcgctgagcagaaacggcacttaatctctgatgccaaaagcttgaaatccgaactttggaaagatgtttgtttgcaaactcttattacaggagatacagatgaccctgatgcttcttcaagattaaataacccagattcttctaaaatggacaccaattttttgaaagaggcctacccattacacacaccaaatccatccagtgtgattgaaactgtatatgaaccgatggcgttggtgacaatctctcccccttttatatgttcagatggtttgtctttcgcacccgaaaatagatctaagccaggagaaatgtcagactgtgaagcagagatggtcacatgctcaaacaatttttttggtaatgccgagcaatctgctaaacttgccagcagtgatgacaggccagaggctttcacaatgactgagagcactacaaactgtgggggtgaacaattgacagatgccaaagaacctgtggccagtacagcaaaagaacggttatcgaaagacatcgagactatgccagataaaaagaagggtgagggggctctattctatgaacctcctcgattccctggtttggatgtcccgtttatcagttgcgatcttgtaacttctgctgatctgcaagaatttagtccccttggaattaggcagtggatgcggtcgaccatgaatgtcccaactcctttaagattatggggctctccaacacatgatgaaagcccagatgcactaaaaactgctgctgaaagcttcccatgcacaagttcaataatgaaaaaaagacagagaagtctattgtcccctactccagatgaaagaattgagaagaaatctgggattgcaaagggggtgacggacatctcctatatgataacggccacatgttccatgaatgcaaccaatgatgaagacattgttactgaatcagctgtgtgtgctaagcaaccttctttgaaacatctagacaagaagcttgagttctctgacattaacaaggaaaactctgatggagcatctgaacaggccaaagatgcacaaaacacacaactcgtggatgagcaacattcctcaccaaatgttgtgaatcctaacactgatctacaagacaatatacaacctgtacagattcttgtagagcaaagcagcaataaccttatttcctctgatcatggtgcaaagccatcctgtaaggaagtgattagttcaaaatcaaagcctacaaaactacttgttgaaaaatcatcaccatgtatcaacgtggattacgaatatgtgaatttattggctgataccccaggtatcaaaagaggactcgaatctccatctgcatggaagtctccttggtatatcgatatgcacatgcactttcagggttttgtcagcccagcagacagaacttatgacgcgttaggattagtgaatcgtttaagcaagcacagtgctgctgctgcagtggaggcctgtgagatgctagcaagtggcaacacgacttctgataaggaaaacaaggataatacggatggcaaggaactagtgacaagaaaatcacagattaagatcatggccgaggcgcgagtcctggatttcgacgaatctcccgcacctgcaagaacagcagataagaaacttggcagctgtcaccggagatctgttagctcacccattcttccttcccccaaccttagaagtttccgataggtacaccatatatggcatcatcgtacattacccacctgcatgtattggtgaactctattgttattatgtctccttagagcgcgttgttgaaactattggagcgtttcctttctttcgttactctattgttattactattattatgtctctcagcccggaaacaggcatcagtaccagtgaactgttgaaactaccctaatcattcaaattaaattattatattgcccgatgcatgtagcttcttgtgacaacaacg

SEQ ID NO: 218419 - DNA, 3086 bp, Zea Mays
caggcaatagcaaagcaagcggaagcatccattccatcccctctcaatcgcctccgcggctccgcctccccctcccccaaatttgaaacctccgaggcggacgcgaggcgaagccgtgcgtcggtcatcgagacggccggctgggcgaccgcgccgccgcctctctcctctcgttgcgtgccgcgggggttgcccgcacttgggcgcgcgctcgggcgcggggttggatgcagctccgccgacgtaggtgctcgtcgatcgcgtcggccacaccgggacggtggtaatcatgccgagtgataaagcaaaagctccaaagaagaagggcgaagaggatcctggaatcccgccagctccctgtgaaggagaaattagccatgagccacatagacaacggtcactcaatgggaggaccactggtccgacccggcgttcaaccaaaggaaattggacacccgaagaggatgctatattgtcccgtgcggttcagacataccaagggaaaaactggaaaaagatagcggaaagttttccagacagaaccgatgtacaatgtttgcacaggtggcaaaaggttctaaaccctgaattggtcaaagggccatggtccaaagaagaagacgaaatcatagttcagatggtaaacaaatacgggccaaagaaatggtcggccatcgctcaagctttgcctggacgcataggaaagcaatgccgggagcggtggcacaatcatcttaacccagccataaacaaggaggcatggacgcaagaagaggagattactcttattcatgctcataggatgtatggaaataaatgggccgaacttacgaaatttttacctggaaggacggacaatgcaattaaaaatcactggaacagttcagtgaagaaaaaggtcgattcgtacatatcttctggtttactttcacaagtcccatgcctctctctgattgaatgtcctgcacaatgtgactctttatcggctatggaccaacaaaacaacggaggtactgattgcaatgaccagaacactagcgtggtcttaagctctgatttacaagtaaatgtggatgccaacaagaaagaagcacatgactctcactcgtccttgtgtcaaggggtatgctatccttccacagagactgtaggatctgttttgcctgatgacctggagatggatatggatgaaggatcaggaaactctatttttgcagacgatcaaactctttgtagcacatcaaatcaagaacaatctatggtgccatttgttgttgcacaggaaatgcctgtctctgtgctatcaagtgtttctagcgctgagcagaaacggcacttaatctctgatgccaaaagcttgaaatccgaactttggaaagatgtttgtttgcaaactcttattacaggagatacagatgaccctgatgcttcttcaagattaaataacccagattcttctaaaatggacaccaattttttgaaagaggcctacccattacacacaccaaatccatccagtgtgattgaaactgtatatgaaccgatggcgttggtgacaatctctcccccttttatatgttcagatggtttgtctttcgcacccgaaaatagatctaagccaggagaaatgtcagactgtgaagcagagatggtcacatgctcaaacaatttttttggtaatgccgagcaatctgctaaacttgccagcagtgatgacaggccagaggctttcacaatgactgagagcactacaaactgtgggggtgaacaattgacagatgccaaagaacctgtggccagtacagcaaaagaacggttatcgaaagacatcgagactatgccagataaaaagaagggtgagggggctctattctatgaacctcctcgattccctggtttggatgtcccgtttatcagttgcgatcttgtaacttctgctgatctgcaagaatttagtccccttggaattaggcagtggatgcggtcgaccatgaatgtcccaactcctttaagattatggggctctccaacacatgatgaaagcccagatgcactaaaaactgctgctgaaagcttcccatgcacaagttcaataatgaaaaaaagacagagaagtctattgtcccctactccagatgaaagaattgagaagaaatctgggattgcaaagggggtgacggacatctcctatatgataacggccacatgttccatgaatgcaaccaatgatgaagacattgttactgaatcagctgtgtgtgctaagcaaccttctttgaaacatctagacaagaagcttgagttctctgacattaacaaggaaaactctgatggagcatctgaacaggccaaagatgcacaaaacacacaactcgtggatgagcaacattcctcaccaaatgttgtgaatcctaacactgatctacaagacaatatacaacctgtacagattcttgtagagcaaagcagcaataaccttatttcctctgatcatggtgcaaagccatcctgtaaggaagtgattagttcaaaatcaaagcctacaaaactacttgttgaaaaatcatcaccatgtatcaacgtggattacgaatatgtgaatttattggctgataccccaggtatcaaaagaggactcgaatctccatctgcatggaagtctccttggtatatcgatatgcacatgcactttcaggccgaggcgcgagtcctggatttcgacgaatctcccgcacctgcaagaacagcagataagaaacttggcagctgtcaccggagatctgttagctcacccattcttccttcccccaaccttagaagtttccgataggtacaccatatatggcatcatcgtacattacccacctgcatgtattggtgaactctattgttattatgtctccttagagcgcgttgttgaaactattggagcgtttcctttctttcgttactctattgttattactattattatgtctctcagcccggaaacaggcatcagtaccagtgaactgttgaaactaccctaatcattcaaattaaattattatattgcccgatgcatgtagcttcttgtgacaacaacg

SEQ ID NO: 218420 - DNA, 3181 bp, Zea Mays
gttcaaaccattccgaaatccgaaacctcccgcggtctcgcccccacccctcacaccaccgcaccaccggccaccccctgccccgatgcagcccgacggcggcggcgcgattcgcgtgctgaacgtggcggagaagccgtcggtggcgaaggcagtggctgagatcctgtcgcgccgctcggcgcagtcgcgtgcgggccggtcccagtacaaccgcattttcgagttcaactacgccatcaatggccgcgcctgccacatgctcgtcacctccgtcacgggccacctcatggaactcgaattcgatgaccgcttccgccgctggcactcctgcgaccccgccgaacttttccacgccccagtccgcaagtccgtgccccaggacaagcaggccataaaacaaactttggaagaagaagctaggagatgccagtggctggtgctatggcttgattgtgatagagagggtgagaacatagcatatgaagtgatcgatgtttgtacacgtgccaacagtcatcttaacatttggagggctcgcttctcagctttgattgatagggagatacatgaatctgtgcaacatcttggcaggcccaacaagctctttgcagatgctgtggatgcaagacaggtttcaaaccatgctgttaaaggatgcatttgtaattgatgtgactggggatgagagaagtttggttctgagctatggtccttgtcagtttccaaccctaggattcattgttgagcgtttctgggagattcaagctcatgaacctgaagagttctggacaataaattgtactcatacttcagatgaaggcactgcatcttttggttggatacgtggtcatttgtttgattattcatgtgctattagtatctatgaaatgtgtgtttcagaaccaatggcaacagtacaaaatgttaggaatcaagagaagctaaaataccccccatatccactaagtacagtggagcttcagaaacgtgcttctaggtactttagaatgagttcagagcacacaatgaaggtctaagaatatcttgtcttatagttttaatttcccttccagttccactatctaataatggacatacctcagtagcttcgttgtttgcttgttttttctttggtggtctcttccctttcaacaccaggtggctgaagaactttatcaagctggattcattagttatccgaggacagaaactgataacttctccccaaacactgacctgcatgcaatcgtacgtgaacaagtgaatcatccagtttggggagcatatgctcagcgacttctaaatcctgaagcaagactttggaggaatcccagtaatggtggtcatgatgacaaggcacatcctcctattcatccaaccaaattttcagaagagattgtatgagtttgttgtccgacatttccttgcatgttgctctcaaccggccgttggagctgaaacaactgtggaaattgacatagctggtgaacagtttaatgcatcagggcgtgtcatacttgctaaaaattatctggatgtttaccgctttgactcatggggtggaacgttacttccaacatacaacattgggcagcagtttgttccgacaactttaacacttgattctggagtgactcggccaccgcctcttctggctgaagccgaccttcttagctgtatggataaagcaggaattggcactgatgcaaccatgcatgatcacataaaaaagttgcttgaccgttgttatgcaaccaaagatgaaaacacacgtttctccccgacaaatcttggtgaggcattggtgatgggttatgatgaaatggggtatgagctttggaagccttatttaagatcaatgatggaagctgatatgaaatcagttagcgtgggtactaagagtaaatcagaagtacttgagagttgtttgcagcagatgaaggcctgttttcttgacgcaagggtgaagaaagcaaaactccttgatgcaatggggacattctttgcaaggtctaataggcctataaatgaaactcaaaatccagtagaggttgtgaggccttgtggtgcatgcaatggatctgaaatgttgcttaagcgaagggcgagtggtgaatttatggttgggtgccgaagttatccacaatgtagaaacgtggtatggctcccaggatctctttcagaagcggctgtaactaatcaagtttgtcctatctgcgcaccaggccctgtttataagattcaattcaagttccgtcggagggatattccaccaaatttcgatgttgatcacctaggttgtgttggtggttgtgatgatatcctcaaagaccttatggagataagtaggtttggaagtcgcagccaggctgcaacaccagcaagaggaccaacaccaaatggtgtgggtcaggggactccaagacaggatttacatactatttttcgtccggcaagccagcttaataatgataacccatcggttatgcattctcaaggtttccgttcaacccatacccaaaatccaagtaatgcatcagatgcaggtcaagtgctgtgcacctcatgtggagcgctttgcatatcacgaattgctaatacagaggctaacagggggaggaggttctacaaatgtcaagatcctggctgtggcttcttcaaatgggaagacgaagtggacaatggtacggggagaggccgccgtgggcgcggcagcagcaggcaggcgtctgcgtctgcatctgcaggacggagaggcggaggccggagaggcagaggccgtaacgctgacggcgggatgttcgtttcagcgacgggcgacaccgtgctcggctgctgctttaactgcggcgatccttcccacttcgcaaacgcctgcccgaaccggagatagttatcagggagctgctcgctatgcgtgtacagagactggcagcgtccgccaaacgatgaagccttcggatggttttcgtgtactgaggtgcatataagtgcacctgacaagctcattttctagacaattactaatatttttaaacaaaatgcagctattaggctgatgctagttcagcaaatctgacggcacttatttacaaaagttagggcgcgaaaaactgacaaaggaagagatgcaaacacgagctgatctactaaggtttcgataacaagtttctactca

SEQ ID NO: 218421 - DNA, 3050 bp, Zea Mays
gtctcgcccccacccctcacaccaccgcaccaccggccaccccctgccccgatgcagcccgacggcggcggcgcgattcgcgtgctgaacgtggcggagaagccgtcggtggcgaaggcagtggctgagatcctgtcgcgccgctcggcgcagtcgcgtgcgggccggtcccagtacaaccgcattttcgagttcaactacgccatcaatggccgcgcctgccacatgctcgtcacctccgtcacgggccacctcatggaactcgaattcgatgaccgcttccgccgctggcactcctgcgaccccgccgaacttttccacgccccagtccgcaagtccgtgccccaggacaagcaggccataaaacaaactttggaagaagaagctaggagatgccagtggctggtgctatggcttgattgtgatagagagggtgagaacatagcatatgaagtgatcgatgtttgtacacgtgccaacagtcatcttaacatttggagggctcgcttctcagctttgattgatagggagatacatgaatctgtgcaacatcttggcaggcccaacaagctctttgcagatgctgtggatgcaagacaggaaattgaccttcgcattggtgcctccttcacaaggtttcaaaccatgctgttaaaggatgcatttgtaattgatgtgactggggatgagagaagtttggttctgagctatggtccttgtcagtttccaaccctaggattcattgttgagcgtttctgggagattcaagctcatgaacctgaagagttctggacaataaattgtactcatacttcagatgaaggcactgcatcttttggttggatacgtggtcatttgtttgattattcatgtgctattagtatctatgaaatgtgtgtttcagaaccaatggcaacagtacaaaatgttaggaatcaagagaagctaaaataccccccatatccactaagtacagtggagcttcagaaacgtgcttctaggtggctgaagaactttatcaagctggattcattagttatccgaggacagaaactgataacttctccccaaacactgacctgcatgcaatcgtacgtgaacaagtgaatcatccagtttggggagcatatgctcagcgacttctaaatcctgaagcaagactttggaggaatcccagtaatggtggtcatgatgacaaggcacatcctcctattcatccaaccaaattttcagaaggtgaaagaaactggagtccagaccacactagattgtatgagtttgttgtccgacatttccttgcatgttgctctcaaccggccgttggagctgaaacaactgtggaaattgacatagctggtgaacagtttaatgcatcagggcgtgtcatacttgctaaaaattatctggatgtttaccgctttgactcatggggtggaacgttacttccaacatacaacattgggcagcagtttgttccgacaactttaacacttgattctggagtgactcggccaccgcctcttctggctgaagccgaccttcttagctgtatggataaagcaggaattggcactgatgcaaccatgcatgatcacataaaaaagttgcttgaccgttgttatgcaaccaaagatgaaaacacacgtttctccccgacaaatcttggtgaggcattggtgatgggttatgatgaaatggggtatgagctttggaagccttatttaagatcaatgatggaagctgatatgaaatcagttagcgtgggtactaagagtaaatcagaagtacttgagagttgtttgcagcagatgaaggcctgttttcttgacgcaagggtgaagaaagcaaaactccttgatgcaatggggacattctttgcaaggtctaataggcctataaatgaaactcaaaatccagtagaggttgtgaggccttgtggtgcatgcaatggatctgaaatgttgcttaagcgaagggcgagtggtgaatttatggttgggtgccgaagttatccacaatgtagaaacgtggtatggctcccaggatctctttcagaagcggctgtaactaatcaagtttgtcctatctgcgcaccaggccctgtttataagattcaattcaagttccgtcggagggatattccaccaaatttcgatgttgatcacctaggttgtgttggtggttgtgatgatatcctcaaagaccttatggagataagtaggtttggaagtcgcagccaggctgcaacaccagcaagaggaccaacaccaaatggtgtgggtcaggggactccaagacaggatttacatactatttttcgtccggcaagccagcttaataatgataacccatcggttatgcattctcaaggtttccgttcaacccatacccaaaatccaagtaatgcatcagatgcaggtcaagtgctgtgcacctcatgtggagcgctttgcatatcacgaattgctaatacagaggctaacagggggaggaggttctacaaatgtcaagatcctggctgtggcttcttcaaatgggaagacgaagtggacaatggtacggggagaggccgccgtgggcgcggcagcagcaggcaggcgtctgcgtctgcatctgcaggacggagaggcggaggccggagaggcagaggccgtaacgctgacggcgggatgttcgtttcagcgacgggcgacaccgtgctcggctgctgctttaactgcggcgatccttcccacttcgcaaacgcctgcccgaaccggagatagttatcagggagctgctcgctatgcgtgtacagagactggcagcgtccgccaaacgatgaagccttcggatggttttcgtgtactgaggtgcatataagtgcacctgacaagctcattttctagacaattactaatatttttaaacaaaatgcagctattaggctgatgctagttcagcaaatctgacggcacttatttacaaaagttagggcgcgaaaaactgacaaaggaagagatgcaaacacgagctgatctactaaggtttcgataacaagtttctactca

SEQ ID NO: 218422 - DNA, 3252 bp, Zea Mays
gtctcgcccccacccctcacaccaccgcaccaccggccaccccctgccccgatgcagcccgacggcggcggcgcgattcgcgtgctgaacgtggcggagaagccgtcggtggcgaaggcagtggctgagatcctgtcgcgccgctcggcgcagtcgcgtgcgggccggtcccagtacaaccgcattttcgagttcaactacgccatcaatggccgcgcctgccacatgctcgtcacctccgtcacgggccacctcatggaactcgaattcgatgaccgcttccgccgctggcactcctgcgaccccgccgaacttttccacgccccagtccgcaagtccgtgccccaggacaagcaggccataaaacaaactttggaagaagaagctaggagatgccagtggctggtgctatggcttgattgtgatagagagggtgagaacatagcatatgaagtgatcgatgtttgtacacgtgccaacagtcatcttaacatttggagggctcgcttctcagctttgattgatagggagatacatgaatctgtgcaacatcttggcaggcccaacaagctctttgcagatgctgtggatgcaagacaggaaattgaccttcgcattggtgcctccttcacaaggtttcaaaccatgctgttaaaggatgcatttgtaattgatgtgactggggatgagagaagtttggttctgagctatggtccttgtcagtttccaaccctaggattcattgttgagcgtttctgggagattcaagctcatgaacctgaagagttctggacaataaattgtactcatacttcagatgaaggcactgcatcttttggttggatacgtggtcatttgtttgattattcatgtgctattagtatctatgaaatgtgtgtttcagaaccaatggcaacagtacaaaatgttaggaatcaagagaagctaaaataccccccatatccactaagtacagtggagcttcagaaacgtgcttctaggtactttagaatgagttcagagcacacaatgaaggtggctgaagaactttatcaagctggattcattagttatccgaggacagaaactgataacttctccccaaacactgacctgcatgcaatcgtacgtgaacaagtgaatcatccagtttggggagcatatgctcagcgacttctaaatcctgaagcaagactttggaggaatcccagtaatggtggtcatgatgacaaggcacatcctcctattcatccaaccaaattttcagaaggtgaaagaaactggagtccagaccacactagattgtatgagtttgttgtccgacatttccttgcatgttgctctcaaccggccgttggagctgaaacaactgtggaaattgacatagctggtgaacagtttaatgcatcagggcgtgtcatacttgctaaaaattatctggatgtttaccgctttgactcatggggtggaacgttacttccaacatacaacattgggcagcagtttgttccgacaactttaacacttgattctggagtgactcggccaccgcctcttctggctgaagccgaccttcttagctgtatggataaagcaggaattggcactgatgcaaccatgcatgatcacataaaaaagttgcttgaccgttgttatgcaaccaaagatgaaaacacacgtttctccccgacaaatcttggtgaggcattggtgatgggttatgatgaaatggggtatgagctttggaagccttatttaagatcaatgatggaagctgatatgaaatcagttagcgtgggtactaagagtaaatcagaagtacttgagagttgtttgcagcagatgaaggcctgttttcttgacgcaagggtgaagaaagcaaaactccttgatgcaatggggacattctttgcaaggcctataaatgaaactcaaaatccagtagaggttgtgaggccttgtggtgcatgcaatggatctgaaatgttgcttaagcgaagggcgagtggtgaatttatggttgggtgccgaagttatccacaatgtagaaacgtggtatggctcccaggatctctttcagaagcggctgtaactaatcaagtttgtcctatctgcgcaccaggccctgtttataagattcaattcaagttccgtcggagggatattccaccaaatttcgatgttgatcacctaggttgtgttggtggttgtgatgatatcctcaaagaccttatggagataagtaggtttggaagtcgcagccaggctgcaacaccaggtttttgaatctctgatctctgattgatatatgggctcatcttttttattgctctaaatgcgatgcacttgtttctgttgaacctacccccatctatctccagtattcaggttctactaaaacaaccagtgtaattttcattctaaaatatttaattacttctgtgaccatattacttcacagcaagaggaccaacaccaaatggtgtgggtcaggggactccaagacaggatttacatactatttttcgtccggcaagccagcttaataatgataacccatcggttatgcattctcaaggtttccgttcaacccatacccaaaatccaagtaatgcatcaggtcaagtgctgtgcacctcatgtggagcgctttgcatatcacgaattgctaatacagaggctaacagggggaggaggttctacaaatgtcaagatcctggctgtggcttcttcaaatgggaagacgaagtggacaatggtacggggagaggccgccgtgggcgcggcagcagcaggcaggcgtctgcgtctgcatctgcaggacggagaggcggaggccggagaggcagaggccgtaacgctgacggcgggatgttcgtttcagcgacgggcgacaccgtgctcggctgctgctttaactgcggcgatccttcccacttcgcaaacgcctgcccgaaccggagatagttatcagggagctgctcgctatgcgtgtacagagactggcagcgtccgccaaacgatgaagccttcggatggttttcgtgtactgaggtgcatataagtgcacctgacaagctcattttctagacaattactaatatttttaaacaaaatgcagctattaggctgatgctagttcagcaaatctgacggcacttatttacaaaagttagggcgcgaaaaactgacaaaggaagagatgcaaacacgagctgatctactaaggtttcgataacaagtttctactca

SEQ ID NO: 218423 - DNA, 1999 bp, Zea Mays
ctggcgctctcgcctcctcgttctccacaagaaacggcaggaaatctctctgcagtgtctgcactgcacccatccgcttctcctctcccgccggctatccagagccccaaaccctacccttcttgttcgcgccgctccctccgccgccgcctgcggggtgcccacttcttcctcccccagccccgatcgtcatacagctccagccccaccccagcttgctcgcggaggtggatcatcgccgcagcagttctctcgtgcagttcttgaaggatgagggggccgttttgtcgccggaggatgaaaataagagggagaaggtgatccgagagctcaagaagatagtgatgcattgggccaacgcggtggcttatgagcagagtgtgccccaggggctggccacagctaccgtcctgacatacggttcttacacattaggggctcatggacctgaatctgacattgatttactttgtcttggaccttgtattgcaacactgcagtaccatttctttgttgttttgagacaaattcttcagggcagaccagaagtatcagaagtacacactgttgagaaggctaaggttcccttgatgcgatttagattcactgggattgcagttgatttgacatatgcccaactccctgttattgatgcattaaaggctataaatacgtttagccctcaactactacagaaaatagacacacggagctggaggagtttatctggagttcgtgtcaatgaacaaattgttcagctagtaccaaatgcggagaagtttcaaactctgttgcgatgcatcaaactatgggctaggaaaagaggacttcattgccattatcttggcttctttgctgggattcatttagcaatccttgcggcatatgtctgtcggaaatttccagatgccagtgtcagtggtttgttcgcagtgttctttcagacgtttgctcactggccttggcaagttccagtaagtctgcatgatgagctaactacatgcttgcattcggagggacgtctcatgcctatagtgatgccttgtaccccgccagagttttgtgcgtccactgtgacaaaaggcagcttaaaaaaaataagagaggaacttacacgtggttatgttttgacaagggatccattgaggcatgatttccagtggagctggctttttgaacccttcccatatgatcagaaatatcagcagtttctccgcattgctttacgtgcgccaactattgctgaactaggagactgggctggatgggtgaaatctcgattccgtttcctgattctgaagctggaaagggctgggattgagtgtgatccatgcccctcggaggaagttgatcatacagacaatgaccccaacgtggtcttctactggggccttatccctaaaagaatcattcaggtcgacactagctccctgaaaggagatttcatggaagacctcaccaatgatgtgtacggcacggtgaagtgcacgcattcagatgtgacaatatctgtggttgggctgccacagctgcctaagagcatgtgcagccgggtctatccaccggcagtacatgcagcactgtatgatgggctacgagggcacagatgaaggccagatcgagcgcagggattcaaggtactggaccgggtattcttttgagctgggaggagtgcttgtgtgcgcaagaatatgggaggactactgaccggtagaagagcaaagaaaatgtgtatagcagaggcatgtaaaaacttaggccctgtcggcataggcagtgtacacttcttttgtgttctaagtgctgctggatcctgattcattcaaattttgcaatgaacaagatggcaagatgtgtatatagttggttctattggctgggtggatgttgattttgagtacaatgccttgtttatgactgacagagttaggcaatacccgatttagttattcagtagggcgatggggtgacgactgaataaccgaatggtgtattggct

SEQ ID NO: 218424 - DNA, 774 bp, Zea Mays
cctacatgcgccgattcgctgaggtctacaccaccatgggggagtatgacaagggcgtcgtcgagcgttgtgccaggaagcagctcctcaccaccggcttccaccggcagctcctcaccaccgggaggaagcagctcgtggagatgctcaagcggtcaccctaattcctctccacccgcgtccacctctaggtccgcgcgggcgagcgatccaacgaggcaccgttctccccatcaagggtttcataacaaatgctgtgaaaagacatatgagacttcaatatcttcttctgagctaagctgtcttggagatagatactttgctacagattctcaaggagacaacaacacagaatcatataaaacatagtaccaaacatgaatggcttcaaggctagcaaatgttcgaggacacttgatctgcaccaatgaggtactacctcgtaacaagattactactccctctggtgtcctattatttgtcgttttggacgagtcaggaaaccttccattacgaccttatttctgcagaagtatgacatcaactttcatctattctctaccaccaaagagatggaaaagcaggttgcccccacccccataacaggtttacctatgttatataaagacgccgtagcaacgcacgtgtaaagatacaaatggatacaccatctggtgtgaagggttccattctttcctgcatcaagttttctgtgcaggttccagataaaataccatacaatggttaaagggccatacttcatagctattttcc

SEQ ID NO: 218425 - DNA, 2869 bp, Zea Mays
taggtccttttgctccctatactactctatcacttttcttattaagaaaatgacttccatggttaaccttccgcacatgaaaccaaattggttcaaagagatcattgttatttctctctgacgatgctcgaaaactctcttgcatagcttcatagtatagctcatcaacttaattcctcggaaattagaacaattatgaatatctcccttattcttgtagatcggtgccagtgtattcttgtaaaatccatttaaaaagagtgattttgttgtaactcaatagcccaacctagtgattgaacgacattaactaaaacttgaatagtaattaaccaaacaaaggcaagcactaaatatgagtgcacataaattcccagtgtacaacaaaggcaaacgataaagaaaccttaggtacaaaagatgagagaaacaaaagagtttatcggactaatgtgtgcctcacctatgtgtgataggccaatcataaaatcgaatatctttattgttgttgctatcttcataccgtcgccctgcagagaagcagcaggcatcgggatccgagccgctgtaggttgtcgcgtttctaaacactccgacgtctaggcgatggggcctctgaggactagggttttggggcgaggtactagcgttagtttttcctgcgaccccttagtcctatatatagcgtcgtgtgtctgggggctccaaccgaggttagtgtgggccctcccgatcaagggcccgattaaaggaacgatagttgggttaagcccaatccagtctctattgaccggctgtagaggacacacccaacactcggctctttcttgtcttattgcccctggcaccaggcgagtactacgccccgcggcttccgatgacgccgccgccgaacctttcgccggcgccggccatcacgggcggcacgttcgcgtacgacgacctagcggcggcgacgggcaggttctcggacgcgaacctactcgggcagggcgggttcgggcacgtgtaccgcggcacggtgggcgggcgggaggtggccatcaagaagctgcaggccggcggcgggcagggcgaccgcgagttccgcgccgaggtggagatcatcagccgcgtgcaccacaagaacctcgtctccctcgtcggctactgcctctacggcgagcagcggctgctcgtgtacgaggacagggagtggcaggccgacgctggactggccgaggcggtggaggatcgcggttggctccgcgaagggcctcgcgtacctgcacgaagactgttatccaaagatcatccatcgtgacatcaaagcggcgaacatccttctggattaccattacgagccaaaggttgcagatttcgggttggccaaataccaagcagctgaagtcacccctgtttctacgcgtgtgataggaaccttcggatatctggctccagagtacgctgccacaggcaaaattagcgaccggtccgacgtcttctccttcggtgtgatgctgctggagctcatcaccgggaggaaaccaatcatggcatcttcagagtttcagtctgtggcattggtttcttgggctaggccattgctgacaagagctgtggaggaggaaaactacgacgacctcatcgatccgaggctggagaccgactacgacgcgcacgacatggcgcggctggtcgcgtgcgccgcggccgccgtgcgccagaccgcgcggtgtcgcccgcggatgagccagatcgtccggtacctggagggcgagctgtcggtggaggacctgaacgccggcgtggtgccggggcagagcgcggtgcagcggtcgggcggcggcaccacggaccggatcagccggctcgggcgcgtgagggagcaccgtgaccgggacgaccatcacggagtgcacgagcagcgatcccaccagcgaggacgcgggcgacacgggcgaggtggcgggcgcgcaggggcagcagtgctccggcaggcgcgcggccgtctacaccgagaggatgagccggcgcaccaccgccagacgcaccctgaattcgttgttcgttcgcgtacatcagcatactgaactttgcttcaacttttctaaattatataagttactctattctttttaacaacttagatctcaaagtttttggttgtgcgacatagggatgaaaaacgaacggatatatacagaaaacctctctggttttgtttccgtatccgaattttatcatcggaaactacatttatcatgctcttcatgcaaaatacaactgcaatttggagctccactaatgtaaaacgatctccactgatgctaaataaaactttccataacatacacaacagcaatcaacactttgaatgcaaaatagaactatcagatcaggcagcagcagcagcagcaccagaaaacacgtccgccgccgcacgacaccagcttaccgtaagatcagcagatgaccgtgttgcagctgttggtgttgacgccggtctcggttcctccgacgaaggggtcgatcttgacccagagcagggagaagacggaggcgaggaggacggaccagagcaccacgatggtgggcgtgcggttctggcggcccatgaggcccttgaggaacgggtagaggtgcatgatcacccacatggcgaagaacaccttgccgaagagcgggccccaggactcgtagccgctgttcagcgcggccgagaaccccgccaccacgcccaccaggttcagcaccaggatgctggtgggcgggatcagcaccgtcgtccacttgaacacgtacagctccccgaactccgtgtcgtccgtggccttcgccgtcaccgtgaagttggtgtccagcccggcgatcatcttgaggatgccct

SEQ ID NO: 218426 - DNA, 1814 bp, Zea Mays
tggcttttctcagtttctgtctgcttcgctcgtgatgtccgtccttctcgccatatatgccctactactataccgacatgccgtaacagattcatggtgaccatcgccacatctctccgacggttaaatatccctcccagaacgcccatcatctgcggcgtcatccaacatgcaagggaaaacctcgatgatgggctcgaacgcgcgcccccacgcggtgctcatcccgtacccggcgcagggccacgtcacgccgctgctgcagctggccaaggtgctgcactcgaggggcttcttcgtcacctacgtcaactccgagtacaaccaccgccgcctgctccggtcccgcggcgcggactcgctggcgggcctcgacgacttccggttcgagaccatccccgacggcctgcctccgtccggcagcgacgacgacgtcacgcaggacatccccgcgctctgcgagtcgctctcccggagcggcgccgcgccgttccgtgacctcctggcgaggctcaacggcatgccgggccgtcctcctgtcacctgcgtcgtactggacaacttcatgagcttcgcgcagagggtggccagcgagatgggcatcctggcagtcgtgttctgcaccatgagcgcgtgtggcttcatggggtacctccacttcaaggagctcatggacagaggctacgtgccactgaaagatgagagctacctgaccaacgggtacctggacacggtgctcgactgggtgcccgggatgcggggcatccgtctgcgagacatgcccagcttcatccgcacgacggacccggacgagttcatggtccacttcgacagcggggaggcccagaacgcgcgccgcgcgcaggggatcatcgtcaacacgttcgacgcgctggagcaggacgtcgtgggcgcgctgcgcggcgtcttccctcgcgtctacaccatcggcccgcttctcacgttcgccagagacatggtccgtcccgacgcgtccgcgatctgcgggaacctctggaaggaggacccgagctgcctcgggtggctggatgcccaggggcccggctcggtcgtgtacgtcaacttcggcagcatcacggtcatgacgccggctcagctcgccgagttcgcgtgggggctggcgaactgcggcaggccgttcctgtgggtcatcaggccggacctcgtcacgggcgagaaggctatgctgccggaggagttctacgcggagacgagagagagagggctcttcctcagctggtgcccgcaggaacaggtcctgtcgcatccgtccaccgggctgttcctgacgcactctgggtggaactctacgctggagagcatacgcgccggcgtgccgatgatctgctggccgttcttcgcagagcagacgaccaactgccgatatgcctgcgcgaactggggcattggactggagatcgacaacaatgtcacgagggacgaggtggcacggctcatagaagaagccatggacggcgagaaaggcaaagacatgaaggcgaaggcaacagtgtggaaggagaaggccgtggcagcaacagaaagcggcgggacctcgagcgtcagcattgatcgtttggtcgagttcctgcttgaaggaaacgttcctacagctgcaggctaataatatgaacacttcacagtagaaaatatggtgtcgcatgaacatgacaatttcagaattcagagtgaagatgcaagcttgctgtcagtattttcaggtaggcctgtcagctgtggcttcacctgccatgctacagagcgaactgcgaaccattttatgattctgtgag

SEQ ID NO: 218427 - DNA, 4189 bp, Zea Mays
ggtaaacacgtaccgaattcaaacggccgcgggcaatcccccaatttccaattccagggagggtcgcgaaccctccattggccattgctcgatctctgtccctctcgtcgcaccttcgcagccgtcgttcaccgaggccgcggatggcgaggacttcgggcccgccgggtcccccggagcccggccgccacgacgcgccgatgctgctgcgcgtgcacgtgatcgaggcgcggggcctgccagccatctacctcaacggctccagcgacccctacgtgcgactgcagttggggcggcgccgcccgcgggagaccacggtggtgaagcggagcctcagccccgtgtgggacgaggagttcgggttcctcgtcggcgacgtcgccgaggacctcgtcgtgtgtgtgctcaacgaggaccgcttcttgggcgccgagttcctagggcgggtgcgggtgcccctcaccgcgatcatggagacggacgacctttcgctcggtaccaggtggtaccagctccagcccaggagcggcgtcaagttcaggaagaaaaggcgcggcgaaatttgcctgagagtatacttatcggttagggccaccctttgtgatgacgcacatcaagctccaccgcaacttatcgatgatatatcgtgcagctcacacaggtcaatcgaaactaatgaatcaccattatcagctactgttaacagtctggatatgtcagcctgtgccagcatggatcggacatccctcaaaagttcggatggcttcaaccaaagcatgacggaggtccgaggtcctagaagcacagggccactatcttgtgtcagcatagagcaatcaattcttctggagcctgaagaagatgatggcagtgccatcgttgatacatcctcagtagtggaggtcatgtctcggtacttccggaaaactgctgatgctacacattctgtagcatcagatcctgtgtccctagaccagtttcgaagcacacaaatgaattctgaatgtcgtgaaaatgaagagggttgcacactgcctgaggtcagccttgatgaactgctgaaaaatatggagtccaaagaccaagcttgtgaactgccaggaaacttgcctggtggtgtactaatggaccaatcttacattattgcaccagctgaactaaattctttgctgttttctggaacttcagatttctggccagaagtttctgaacttcaaggaacaagtggattcaacattgagccctggaagcatgacaataatgagaactgtttaaaaagaacaataacttatacaaaagctgctagcaaattagttaaatctgttaaagccactgaagagcagaaatacttgaaggcaacaggaagttcttttgcagttttgtctagtgttagcactcctgatgttccctgtggtaattgtttcaaggtggagatattgtaccgtataatatctggttcccagttgccattagaacagaccacacaaattactgtaagttggcgtctgaactttgttcagagtacgatgctgaaaggaatgatagagaatggagcgaaacaaggccttgcagagggttattcacatttctctgaagtactgtcccggaaagttaaagtagctgaacttgccgatgctaatacgaaagataagattttagcatcactgcagacacagaaagaatcgaactggaaactggttgctcgcttccttggaagctttgcattcatatgctctctcagtacagcactgtatatcactactcatcttcatctagccaagcctaatgtggtgcttggcggtcttgaatattttggcattgaccttccagattccattggagagattgtgttttgtattattttgatcatccaagggcataatatcatgaaagtagggcgacgttttttgcaagcctggaaacaacgtggtagtgatcatggggtcaaagctcatggagacggttggttgttgactattgcacttattgagggaagcggtgtagtaagtgcagtttttacatgcaatggaaagaggaaaaccagctccgtcaaataccagacttctgaacctaaatggaatgaaatatttgaatttgatgcgatggacgacccgccagcaagattggacgtggttgtgcatgattcagatataccaaacaatgaaactcctatcggtcaaacagaagtgaactttgtgaaaaacaatttgtcagatttgggtgacatgtgggttcctcttgatggaaggtttccccaagggcaccagcccaaattgcatctgcggatctttttgaacaattcgcgggggactgaagttgttatgaattatctggaaaaaatggggaaagaagttggcaagaagatgcacttgcgctcatctcagacaaattctgcattccgtaagctcttcagccttccccccgaagaatttctcatcgacgatttcacctgccatctaaaacggaaaatgccacttcaggggcgcctctttctttccccaagaataactggattctattccaatatatttggtcgaaaaaccaagtttttcttcctttgggaagatatcgaaaacatccaggttgttccaccaaaactagcaacagttggcagtccatcattgatgatcatcctttgcaaggatagaggtcttgaagctaggcatggcgccaaagcactggatcctcaagggagactaaagttccattttcagacatttgtttcattcaatgatgctcacagaattattatggcaatttggaaattgcggtcatcaggtctggaacaaaaaggtgaggtgattgataaagaacctgaactgaaagagaacccttatgaagaaggttctctattggccaacgaagatgtaaaaatgtcagaagtctactcggccgttctttctgtcgacgtcagtgcgttaatggagatgttctctggaggtccactggaacacaaagtgatggagagagccggttgcgtcgactacttagctacagaatgggagctgctaaaccgtaatgtataccaacgtcatataaactttcggtttgacaaaagcttgtcaagatatggaggggaagcaacgaccactcagcaaaagtataacttaccgaaccaaaatgactggattgtcgaggaggtgatgaccctccaaggtgtccagcatgaagattactccagtatccaattgaagtaccacatgaccagcacgcccttgagaccaaacagctgcaggatcaaggttttgttagggattgcctggttgaagggcactaagcatcagaagaaggctgcaaagaatgtcatgatgaactccgccaacaggctgagggagatcttttcagaagtcgagaaggaggtcacatcaaggaaagttccagcttcaggctaactggcgtaaagtgaacatggattgattcaggtagattaaaagatgatgatagcaattgtcagctggggacatgctcaacaatagtccattagcgtcacagtttgtttctgttagttcttggaaccctaggataggatctcactgagttcctctgtgaccgtccaattacatagaaatagatgtattctacctgatctagtaacgcaaagagaggataaggagagtagaacttcataccttagggccaaggtgaggggcggcactagtcatcctggtcgagtgagagaacgggatcactggtgtctaacactcctccctgcgtattaggaagctgaggtggcgcatcagtggcaggtgcagtgagggcactgcgctctaccgacgccttggaagggcggatccggtctctagggcacaggtcttttttttggaggtgtggcggctagagtcagttagaggtagggtcggacgaaatgcttgtgtctggttggctcgctcggttcatggtcagctcgtttaaattttttcacgagcagagctgatattttagctcggttcgttaatgagccagctcacgagctaaacgaactaccacattctagcaaaacgaaattatatgcatatcatttatggaataattgatgaacatgttatatatatgtgaggtgtctatgacctaatgattaatgaactatgtctatgtgttaaattggtctatgcaaatataattatggattaaactaatgaacatgtatgtgaattgtgaattgatgagtgatgaattgtgctaatttggt

SEQ ID NO: 218428 - DNA, 4093 bp, Zea Mays
aaacacgtaccgaattcaaacggccgcgggcaatcccccaatttccaattccagggagggtcgcgaaccctccattggccattgctcgatctctgtccctctcgtcgcaccttcgcagccgtcgttcaccgaggccgcggatggcgaggacttcgggcccgccgggtcccccggagcccggccgccacgacgcgccgatgctgctgcgcgtgcacgtgatcgaggcgcggggcctgccagccatctacctcaacggctccagcgacccctacgtgcgactgcagttggggcggcgccgcccgcgggagaccacggtggtgaagcggagcctcagccccgtgtgggacgaggagttcgggttcctcgtcggcgacgtcgccgaggacctcgtcgtgtgtgtgctcaacgaggaccgcttcttgggcgccgagttcctagggcgggtgcgggtgcccctcaccgcgatcatggagacggacgacctttcgctcggtaccaggtggtaccagctccagcccaggagcggcgtcaagttcaggaagaaaaggcgcggcgaaatttgcctgagagtatacttatcggttagggccaccctttgtgatgacgcacatcaagctccaccgcaacttatcgatgatatatcgtgcagctcacacaggtcaatcgaaactaatgaatcaccattatcagctactgttaacagtctggatatgtcagcctgtgccagcatggatcggacatccctcaaaagttcggatggcttcaaccaaagcatgacggaggtccgaggtcctagaagcacagggccactatcttgtgtcagcatagagcaatcaattcttctggagcctgaagaagatgatggcagtgccatcgttgatacatcctcagtagtggaggtcatgtctcggtacttccggaaaactgctgatgctacacattctgtagcatcagatcctgtgtccctagaccagtttcgaagcacacaaatgaattctgaatgtcgtgaaaatgaagagggttgcacactgcctgaggtcagccttgatgaactgctgaaaaatatggagtccaaagaccaagcttgtgaactgccaggaaacttgcctggtggtgtactaatggaccaatcttacattattgcaccagctgaactaaattctttgctgttttctggaacttcagatttctggccagaagtttctgaacttcaaggaacaagtggattcaacattgagccctggaagcatgacaataatgagaactgtttaaaaagaacaataacttatacaaaagctgctagcaaattagttaaatctgttaaagccactgaagagcagaaatacttgaaggcaacaggaagttcttttgcagttttgtctagtgttagcactcctgatgttccctgtggtaattgtttcaaggtggagatattgtaccgtataatatctggttcccagttgccattagaacagaccacacaaattactgtaagttggcgtctgaactttgttcagagtacgatgctgaaaggaatgatagagaatggagcgaaacaaggccttgcagagggttattcacatttctctgaagtactgtcccggaaagttaaagtagctgaacttgccgatgctaatacgaaagataagattttagcatcactgcagacacagaaagaatcgaactggaaactggttgctcgcttccttggaagctttgcattcatatgctctctcagtacagcactgtatatcactactcatcttcatctagccaagcctaatgtggtgcttggcggtcttgaatattttggcattgaccttccagattccattggagagattgtgttttgtattattttgatcatccaagggcataatatcatgaaagtagggcgacgttttttgcaagcctggaaacaacgtggtagtgatcatggggtcaaagctcatggagacggttggttgttgactattgcacttattgagggaagcggtgtagtaagtgcaggtacacctggggttcctgatccttacgtagtttttacatgcaatggaaagaggaaaaccagctccgtcaaataccagacttctgaacctaaatggaatgaaatatttgaatttgatgcgatggacgacccgccagcaagattggacgtggttgtgcatgattcagatataccaaacaatgaaactcctatcggtcaaacagaagtgaactttgtgaaaaacaatttgtcagatttgggtgacatgtgggttcctcttgatggaaggtttccccaagggcaccagcccaaattgcatctgcggatctttttgaacaattcgcgggggactgaagttgttatgaattatctggaaaaaatggggaaagaagttggcaagaagacaaattctgcattccgtaagctcttcagccttccccccgaagaatttctcatcgacgatttcacctgccatctaaaacggaaaatgccacttcaggttgttccaccaaaactagcaacagttggcagtccatcattgatgatcatcctttgcaaggatagaggtcttgaagctaggcatggcgccaaagcactggatcctcaagggagactaaagttccattttcagacatttgtttcattcaatgatgctcacagaattattatggcaatttggaaattgcggtcatcaggtctggaacaaaaaggtgaggtgattgataaagaacctgaactgaaagagaacccttatgaagaaggttctctattggccaacgaagatgtaaaaatgtcagaagtctactcggccgttctttctgtcgacgtcagtgcgttaatggagatgttctctggaggtccactggaacacaaagtgatggagagagccggttgcgtcgactacttagctacagaatgggagctgctaaaccgtaatgtataccaacgtcatataaactttcggtttgacaaaagcttgtcaagatatggaggggaagcaacgaccactcagcaaaagtataacttaccgaaccaaaatgactggattgtcgaggaggtgatgaccctccaaggtgtccagcatgaagattactccagtatccaattgaagtaccacatgaccagcacgcccttgagaccaaacagctgcaggatcaaggttttgttagggattgcctggttgaagggcactaagcatcagaagaaggctgcaaagaatgtcatgatgaactccgccaacaggctgagggagatcttttcagaagtcgagaaggaggtcacatcaaggaaagttccagcttcaggctaactggcgtaaagtgaacatggattgattcaggtagattaaaagatgatgatagcaattgtcagctggggacatgctcaacaatagtccattagcgtcacagtttgtttctgttagttcttggaaccctaggataggatctcactgagttcctctgtgaccgtccaattacatagaaatagatgtattctacctgatctagtaacgcaaagagaggataaggagagtagaacttcataccttagggccaaggtgaggggcggcactagtcatcctggtcgagtgagagaacgggatcactggtgtctaacactcctccctgcgtattaggaagctgaggtggcgcatcagtggcaggtgcagtgagggcactgcgctctaccgacgccttggaagggcggatccggtctctagggcacaggtcttttttttggaggtgtggcggctagagtcagttagaggtagggtcggacgaaatgcttgtgtctggttggctcgctcggttcatggtcagctcgtttaaattttttcacgagcagagctgatattttagctcggttcgttaatgagccagctcacgagctaaacgaactaccacattctagcaaaacgaaattatatgcatatcatttatggaataattgatgaacatgttatatatatgtgaggtgtctatgacctaatgattaatgaactatgtctatgtgttaaattggtctatgcaaatataattatggattaaactaatgaacatgtatgtgaattgtgaattgatgagtgatgaattgtgctaatttggt

SEQ ID NO: 218429 - DNA, 2665 bp, Zea Mays
catcaagtcagtttctaggggcgaccggaatgacgcgacttttgtgccttactgccctgacgatcttccccattatcctttgcctcacaacatccgccgccgtcaccgcgtctgacacactggacagcggcagcaacatcaccgacggtgcaacgctggtctcggccggcgggtccttcacccttggtttcttctccccgaccggggtgccaaccaagagatacctcggcatctggttcacagcatcgccggaggccatctgttgggtggccaaccgtgaaacgttcctcagcaacacctcaggaggtgtactggtcatcggcagcaccgggagcctccgccttctcgacggctctggccgcaccgcgtggtcttccgtcgactcgacgagttcttctgctccgcctgtcgtggcgcaggcgcagctgctcgagtccggcaacctagtggtgcgcgaccagagcggccgcgacgtgctttggcagtcattcgaccacccgtcgaacaccttgctcgccggcatgagattcggtaaggacccgcggactggcgccgagtggttcctcacgtcgtggcgtgcgtcgaacgacccgacgccggggggctaccgtcgtgtgctggacaccaggggcggcctcctggactccgtctcgtggaagggcagcgtcaagaagtaccgaacggggccctggaacgggctgtggttcagtggcatccccgagacggcgtcgtacaaggacatgtactccacccagctcgtcgtccgccccgatgagatcgcgtacgtcttcaacaccgcggccggcgcgcccttctgccgcctcgtgctgaacgaggtcggcatggtgcagcagctggggtgggacccggttagccgggtgtggaacgtcttcacgcaggcgccgagggacgtctgcgacaactacgccaagtgcggcgcgttcggcctgtgcgacgtgaagtcggggtccacgctgttctgcagctgcgccgtggggttcagccccgtgaacccctcgcagtggtccatgagggagacccgtggcgggtgccggaggaacgtgccgctggagtgcggcaacgggacgacgacggacgggttcaagatggtgcgggcagtgaagctccccgacacggacaacgcgacggtggacatgggcgcgacgctggagcagtgcagggcgaggtgccttgccaactgctcgtgcgtggcctacgccgccgctgacatccgaggaggaggcggtggccatggctgcgtcatgtggacggacgcaatcgtggatgttcgttacgtaggcaaaggccaggatatctacctgaggttggcaaagtctgaattagttgagaagaagaggaatgtggtaataataatcttgccactagttacggcatgtctgcttgcgctcatggggatgctccttgtttggatatggcgcaagcacaagcttagaggcaaacgtcgaagcatggatgatatccagcacaagaccatagtaagacacttggacgagacaaatacccttggcgacgaaaatctcgacctgccgtttttcagctttggagatattggtattctgggcgaagatagagtggttgcaatcaaaaggctcagccagggctctggacaaggcatagacgaattcagaaatgaagtagttctgattgcgaaattgcagcacaggaaccttgtcaggctccttggttgctgcatccatggagatgagaagctgctcgtttacgaatatttaccaaacaaaagcttggattccttcatcttcgatgctgcgaggaagaacgcccttgattggccgacaaggttcaggataatcaaagggatatcaaggggagtcctttacctgcaccaggattcgagactgacaatcgtgcaccgagatctcaagacaagcaacatattgttggacgcggatatgaacccaaagatatcagattttggtatcgcgagaatcttcggagggaaccaacaggaagcaaacactacccgagttgttgggacgtatggttacatgtctcctgaatacgcaatggatggagctttttcagtcatgtctgatacatacagcctcggtgtcatactgttggagatcgtaagtggtctgaagatcacttccacccactccacgagcttccctagcctattagcctatgcatggagcctatggaatggtggcagagcaatggatttggtggactcatccctgcttgaaagttgttcggcaagtgaagctatgaggtgcatacacataggactcttgtgtgtgcaagacaatccaaacagtaggccactcatgtcaaccgttgtgttcatgctggagaacgaaaccacgttgctttcgatcccaaagcagcccctgtgcttctcgcagtggtatttagaagcccaagcgacaggagaaaacacaaacagctccatgaatagcacgagcgtctcagtgctggagggacggtaacggtaagtgatttttgtttgttagggcaccccgcactctcaatagtttgacaacttcttcaagggtactatcatttggagctgcccttggtatattgagacaagagttggagtacaactaggagtaggctatatttttagaaatgtgattacatagttactgggacactggcctccttattaattgtatggaaa

SEQ ID NO: 218430 - DNA, 2518 bp, Zea Mays
tttgtttatttatgtctcagttgagtaaactcagagtgtatatatcaccttttattcatggcacaaggtacagttcctttggtagacattttacaaaggtggagaaacttgttgagattgttgatagacttcactggtatgtggaaactggtgacatgatagtagatttctgctgtggggcaaatgattttagccgtcttatgaaagaaaaactcgacaaagttcagaagaagtgccatttcaagaattatgatcttatccaaccacagattatgggtcttaatcctccttttggagtcaaagcaagtcttgcgaacaaatttattgacaaagcattgacattcaagcctaagctcattgtactaattgtccctaaagaaactaaaaggttagatcagaggagaacaccttatgatttgatttgggaggacagtgagtgtctttctggcaagtccttctatttgcctggttctgtggatcttaatgataaaatagttgaagggtggaatgcatctgcgccacccctctatttgtggagtcatcctggttggacaaagaagcacatgcaagtggctgaagagcatggtcatacttgtatggggaagatagcttgccatgttgaagagagtaatctatcagatgacctgtccgtgaggaaacaatctgatgctacaaacaaactgaactcgagatcagggaaagagactccattcaatgacagaatgtccaatctacttgatgatggttctgctaggaagcaagcaagatctgaagaagagaagagaactctagggaagatagaacaccatgtgaaaaaggctaatataccagataacctcccagtgaagaaagaacctgaagcttccagcaaagtcatgtcgcattctggaaaagatagaaagattggcagatacaacaggaggagacatgacaacaggagcagcaaggggacacctgatcacacagagagcctcccccctgaaaagcaagtggaagttgcatatgaggaaacaagagttattcctagcaaaaagattgctcataatgaaaaaaagagcgcgcagtacaactacgagcaaactgcagcagggatgccaaacatgaggtctagaggaggggattctgacatgagtatctcacccccagtcagttgcaatgctcgaagcaaacccatgagctattccctgacgagaccaattgaacacttggatacgaatgctcaccttttggcagaagaacctagtgactctgtgctcaatagggttccaaatcatgacagttatttggcaatcaaagaggaatactgtgatggatttaagaggaaaaatgatcctatcttcagtcacattgatgatagctcaaggatgaggggctccagcatcgaagaagtgaccaagccgtatattactgctccaaacagtgatccgtggtctaaaggagatggcagcttttacaggcatccgagctcagaagatttaaacgctaatgctgatgtgcttatgccaggatacagtgcaagatatggacaaattggtggtgacagtaacccacaagctagtatggtcccactagcaacagattcaagactgcatggtggaacggttgctgataattacctctcggcaagatactcccttggatcttcaggtgctcgcgttagccaaccagctccaactgttcccccttttgggctctcaggtgcaagttcacaacgaggctcagtaatggacaggtattcgtatgggctttcgggtccgactggaacacagcgctcagttattgacaggtatgcgccgtccctcgatggaacgaacacaacaagatcgaggagctccttgcctgagcagtacccgttcggacaacctggctcttccggtggcgggtggcctcatcactgatcgctggaacttggtcctcagatttgaccagcaaaagtgcaaccgatttcttgagtccggtggagcctacaacctatctacggcctaactttttggatcctactagtcgtttcttcctggcgccttcgacgaagacatcacctgtgtctaccaatacagaagtgtagacttcaattcctacaaatacagaagtgtaggcttcaatcctattgtttgctctggatttctgtttatgagcgtatttacaagagtatgtttggtctatgttagtatattaggaatacaattccaaaaccgttgtaccgtgccaaagtttaatactatacgtttgggtctgtcgatgagaaaaaaggacgagtgggtgagaagatgctgccctccgcagaactcgatcaggccggttcctctgcgcgtcctgctatgagaggctaacctgagcccgacagaaccggcttggtcgatttgggacctggtaggccggtatttttttattgaagtgtaactttctaaattaggtcttgttggtttgcgttggattgcgtccggaatcgtttcaagtttatataaattagagaagcaatccggttagaaatcgtttcgatccactaatcctaaacaac

SEQ ID NO: 218431 - DNA, 993 bp, Zea Mays
ctacagaccacaagttagccgaccccgactgtcattcgcgagcaccgccgccgctcgccagaatgacacttcgggtgatcctctcccgcctgcgcctcacccctctcatccacgacggccaccacctgcgacgctctctatccgccgccgctgccaaactacctgacgagttgcctcctggcgcgccggcgccaacctccgactccaggctcttcgtcgcagggctgtcgtggtccgtggacgagcgctccctcacggacgccttctcctccttcggcaccgtcaccgaagttagaataatgtatgacaaaaactctggaaggtcaagaggctttggatttgttcatttctcaaatgataatgaagctaagtgtgccaaggatgctatggatgggaagcatggaccggtattaattctacaggtaatgctagggcggccattgcgaataagttttgcccttggaagagttcgtggcgcatcagttattgttcctcgactttctacggtgaaatgagcagaagcattggtcgtggcatactggcatggaccgatggacatatcaggagggttgcgaagtacccatataggctagtgtttttaatcttgcaaggtagggatcttagtcgaaggcgcctggcaatggcgtgaagggcagcgtggcaaagaagatgatggctatgtttgtcgccccaatttgctcgatgttgaagcatttcacgaggtgcattgtagctttgcagccacctcgtgtgaggccgccttttcgaatgtctcgtttgatgtgtgtgagtgagagagagagactcttcttgaattgattcatgtcaaatgtatccagtaggggcttttcgccccctcctgtttcataaaaaaaaatcatgtaaactgtaaatttgtggtggcaaccgtcactacgcactagtacaacgcagttaaactgtcttcgattcttcatgtcgaagtgaagcatagctacatccgatttttaggat

SEQ ID NO: 218432 - DNA, 778 bp, Zea Mays
ctacagaccacaagttagccgaccccgactgtcattcgcgagcaccgccgccgctcgccagaatgacacttcgggtgatcctctcccgcctgcgcctcacccctctcatccacgacggccaccacctgcgacgctctctatccgccgccgctgccaaactacctgacgagttgcctcctggcgcgccggcgccaacctccgactccaggctcttcgtcgcagggctgtcgtggtccgtggacgagcgctccctcacggacgccttctcctccttcggcaccgtcaccgaaggtgaaatgagcagaagcattggtcgtggcatactggcatggaccgatggacatatcaggagggttgcgaagtacccatataggctagtgtttttaatcttgcaaggtagggatcttagtcgaaggcgcctggcaatggcgtgaagggcagcgtggcaaagaagatgatggctatgtttgtcgccccaatttgctcgatgttgaagcatttcacgaggtgcattgtagctttgcagccacctcgtgtgaggccgccttttcgaatgtctcgtttgatgtgtgtgagtgagagagagagactcttcttgaattgattcatgtcaaatgtatccagtaggggcttttcgccccctcctgtttcataaaaaaaaatcatgtaaactgtaaatttgtggtggcaaccgtcactacgcactagtacaacgcagttaaactgtcttcgattcttcatgtcgaagtgaagcatagctacatccgatttttaggat

SEQ ID NO: 218433 - DNA, 951 bp, Zea Mays
cagaccacaagttagccgaccccgactgtcattcgcgagcaccgccgccgctcgccagaatgacacttcgggtgatcctctcccgcctgcgcctcacccctctcatccacgacggccaccacctgcgacgctctctatccgccgccgctgccaaactacctgacgagttgcctcctggcgcgccggcgccaacctccgactccaggctcttcgtcgcagggctgtcgtggtccgtggacgagcgctccctcacggacgccttctcctccttcggcaccgtcaccgaaggtcttcggctaaatgccgtggaggccgtgagccactccatcgcccccaggcctgcagcctgttcgacgaaattcctgttagggacgtggtcacctgctcagctgcaatttaccgacatgcgaggagcgggctgttccatgagtcagctgagctgtttgttggcatgatgagggcaggtgaaatgagcagaagcattggtcgtggcatactggcatggaccgatggacatatcaggagggttgcgaagtacccatataggctagtgtttttaatcttgcaaggtagggatcttagtcgaaggcgcctggcaatggcgtgaagggcagcgtggcaaagaagatgatggctatgtttgtcgccccaatttgctcgatgttgaagcatttcacgaggtgcattgtagctttgcagccacctcgtgtgaggccgccttttcgaatgtctcgtttgatgtgtgtgagtgagagagagagactcttcttgaattgattcatgtcaaatgtatccagtaggggcttttcgccccctcctgtttcataaaaaaaaatcatgtaaactgtaaatttgtggtggcaaccgtcactacgcactagtacaacgcagttaaactgtcttcgattcttcatgtcgaagtgaagcatagctacatccgatttttaggat

SEQ ID NO: 218434 - DNA, 1138 bp, Zea Mays
gttagccgaccccgactgtcattcgcgagcaccgccgccgctcgccagaatgacacttcgggtgatcctctcccgcctgcgcctcacccctctcatccacgacggccaccacctgcgacgctctctatccgccgccgctgccaaactacctgacgagttgcctcctggcgcgccggcgccaacctccgactccaggctcttcgtcgcagggctgtcgtggtccgtggacgagcgctccctcacggacgccttctcctccttcggcaccgtcaccgaagatggtgcacagtgtaggtcttcggctaaatgccgtggaggccgtgagccactccatcgcccccaggcctgcagcctgttcgacgaaattcctgttagggacgtggtcacctgctcagctgcaatttaccgacatgcgaggagcgggctgttccatgagtcagctgagctgtttgttggcatgatgagggcagttagaataatgtatgacaaaaactctggaaggtcaagaggctttggatttgttcatttctcaaatgataatgaagctaagtgtgccaaggatgctatggatgggaagggcggccattgcgaataagttttgcccttggaagagttcgtggcgcatcagttattgttcctcgactttctacggtgaaatgagcagaagcattggtcgtggcatactggcatggaccgatggacatatcaggagggttgcgaagtacccatataggctagtgtttttaatcttgcaaggtagggatcttagtcgaaggcgcctggcaatggcgtgaagggcagcgtggcaaagaagatgatggctatgtttgtcgccccaatttgctcgatgttgaagcatttcacgaggtgcattgtagctttgcagccacctcgtgtgaggccgccttttcgaatgtctcgtttgatgtgtgtgagtgagagagagagactcttcttgaattgattcatgtcaaatgtatccagtaggggcttttcgccccctcctgtttcataaaaaaaaatcatgtaaactgtaaatttgtggtggcaaccgtcactacgcactagtacaacgcagttaaactgtcttcgattcttcatgtcgaagtgaagcatagctacatccgatttttaggat

SEQ ID NO: 218435 - DNA, 2401 bp, Zea Mays
ctggcggtggtggtgtggtgctgtcccccctgctcctgctcctgcctccggggcgcggcgccttcccgtctcccttcctcctcctctcccaccgctcggcctcctccaccacacgcgctcggcggtgccctccccggcgcggcgccgaaatgcaggtggggcctcgtcggcttcccgcggctgcgacgggccggagcagctaacgccgcggcctggggctgtgatctggggccgcgccgcattgccgactgcctgccgccgggctcgcgcgcgcagttcctgcctgccggtggcgaggggaggcaagatgcggcatctcgctctcctcgcgcttcttctcgctcccgttctcggatccacaggcaccactctgtccccttctccggccgccactgattctcctgcaaaccaaggacaggcttctagtcctcctcaatctgcatttgctcttggtccagtagctgttccaactgcgccgaccactccatcggcgagtccttccccggagaaagccgcggctgtaagtcctgctgctcccacggagccacgaattgccccggctccagtggctcctcctaaagagtatagtgcacctcctccagttgaggttgcacccactgatcccaccgatgaggttcctccaccagtagctccaccacaagctgcagttggaaatcccactccaattcttcctgggacacctgcattgctaccttatgttcaggctcctgctccatctgtcgttctcaagcctaatccaccagtcgtggtgtcacctccacctgcgaataatcaaccaagtaggccggttgggtctgtccctccttatccaccccctgcatcgccccctccggcaaatggcattccaccatacccaccttcaggaaggtttcctgctattcctcctgccacttcagtcccacctccagccacatcacctgttattgcacaagcaccacagcgacgagcagatcctccaagtagagattataagaacggaaacgcagtgccgccagcaaatacttaccctcctacaaatctcaagaagcatcatgttccacatgcatcccctccaaagggatccactggtcaaactgtcccaggtcacaaatcaccagttacaggatctgcgcctgcaacaagtcctttgccccagaacacaaacatgccttcaatcccgaagaatgcttcatcagtgccacatgcccatccctcaccaccaagtatagctccagaattggcacccactggtagatctcatgctcagggatggaaatccagtaatcccaataacaaaacaaatagattacatgccccatcttatccaccgcctcgtgctcaagggcccgaggtctcacgaaccccaagacagactgggactaaaaactatactcaccatgcgcctccaccattccctcaaggacaccctagctttcctgtacactccccatccccttcaccagcctcatcgaggggtcctgcgaacgcgaagaaaagaaatcatatttctcctactcttccttcaatccctcccctaccagagccaaaagcaccgtcagcgcatcctatttggacattacctccaccaccacctaattcagattgcaattccttatcatgcccagagcctctaacagatccacctgcgggagcaccatgtgcatgtgtgctaccaatcagagttggaattcgtctaagcgttgacctttactcattttttccattggtctctgattttgctgaagaggtagcttcaggggtaaacatggcacagaggcaggtccgtgtaatgggtgcgaacgttgcaggtgatcaacctgacaaaacaatggttcttgttgatctagttccagtgcaagtgaagttcgacaatgctacagcattttcagcatttgaaagcttgtggagcaaaaaagtttctttaaaaccatcagtctttgggaactatgagattctctatgttgtatatccagggcttcctccttcaccaccttcagggcaaggtgttggggatggggcgtttggcaacaacagaaatgcaagggccgtgaagccccttggggtcgatctctttgattcgtagcagaataacagtaacttttctccaatgaagtagtgccactgttgaaattcatcatgaacttgtagtctataagcaagttttttttatttggtatcctttccaaggaaaattccattgcttatttgaaatgccagccaacagtgcttgcaatgacttttcagttaaaaggctttcgtttcagtttctgcatcgtgttatgtgcccttgctagaataatatgcacagtttaggcagtactagttttcgttctgaccagtgttttaaaggtgtcgcctaggcgtccaggcgtctcagtcgcctagctaaatcagcaagagg

SEQ ID NO: 218436 - DNA, 2628 bp, Zea Mays
gtgctgtcccccctgctcctgctcctgcctccggggcgcggcgccttcccgtctcccttcctcctcctctcccaccgctcggcctcctccaccacacgcgctcggcggtgccctccccggcgcggcgccgaaatgcaggtggggcctcgtcggcttcccgcggctgcgacgggccggagcagctaacgccgcggcctggggctgtgatctggggccgcgccgcattgccgactgcctgccgccgggctcgcgcgcgcagttcctgcctgccggtggcgaggggaggcaagatgcggcatctcgctctcctcgcgcttcttctcgctcccgttctcggatccacaggcaccactctgtccccttctccggccgccactgattctcctgcaaaccaaggacaggcttctagtcctcctcaatctgcatttgctcttggtccagtagctgttccaactgcgccgaccactccatcggcgagtccttccccggagaaagccgcggctgtaagtcctgctgctcccacggagccacgaattgccccggctccagtggctcctcctaaagagtatagtgcacctcctccagttgaggttgcacccactgatcccaccgatgaggttcctccaccagtagctccaccacaagctgcagttggaaatcccactccaattcttcctgggacacctgcattgctaccttatgttcaggctcctgctccatctgtcgttctcaagcctaatccaccagtcgtggtgtcacctccacctgcgaataatcaaccaagtaggccggttgggtctgtccctccttatccaccccctgcatcgccccctccggcaaatggcattccaccatacccaccttcaggaaggtttcctgctattcctcctgccacttcagtcccacctccagccacatcacctgttattgcacaagcaccacagcgacgagcagatcctccaagtagagattataagaacggaaacgcagtgccgccagcaaatacttaccctcctacaaatctcaagaagcatcatgttccacatgcatcccctccaaagggatccactggtcaaactgtcccaggtcacaaatcaccagttacaggatctgcgcctgcaacaagtcctttgccccagaacacaaacatgccttcaatcccgaagaatgcttcatcagtgccacatgcccatccctcaccaccaagtatagctccagaattggcacccactggtagatctcatgctcagggatggaaatccagtaatcccaataacaaaacaaatagattacatgccccatcttatccaccgcctcgtgctcaagggcccgaggtctcacgaaccccaagacagactgggactaaaaactatactcaccatgcgcctccaccattccctcaaggacaccctagctttcctgtacactccccatccccttcaccagcctcatcgaggggtcctgcgaacgcgaagaaaagaaatcatatttctcctactcttccttcaatccctcccctaccagagccaaaagcaccgtcagcgcatcctatttggacattacctccaccaccacctaattcagattgcaattccttatcatgcccagagcctctaacagatccacctgcgggagcaccatgtgcatgtgtgctaccaatcagagttggaattcgtctaagcgttgacctttactcattttttccattggtctctgattttgctgaagaggtagcttcaggggtaaacatggcacagaggcaggtccgtgtaatgggtgcgaacgttgcaggtgatcaacctgacaaaacaatggttcttgttgatctagttccagtgcaagtgaagttcgacaatgctacagcattttcagcatttgaaagcttgtggagcaaaaaagtttctttaaaaccatcagtctttgggaactatgagattctctatgttgtatatccagggcttcctccttcaccaccttcagggcaaggtgttggggatggggcgtttggcaacaacagaaatgcaagggccgtgaagccccttggggtcgatgtaagaagtcccaagagaaaagtgaatggcagcctcattgctattgttgttttgtctactgttatagcattgattatttgctgtctggctgcatggtcgctaatcctcagattcaggggtccgagccacacagctcggggatttccacatactgcacttccaaaattttctaggtcatctggtacgtgtaactaacctgctaattttctgataattgcaccttgatgtgatgtaattggactagctctttgattcgtagcagaataacagtaacttttctccaatgaagtagtgccactgttgaaattcatcatgaacttgtagtctataagcaagttttttttatttggtatcctttccaaggaaaattccattgcttatttgaaatgccagccaacagtgcttgcaatgacttttcagttaaaaggctttcgtttcagtttctgcatcgtgttatgtgcccttgctagaataatatgcacagtttaggcagtactagttttcgttctgaccagtgttttaaaggtgtcgcctaggcgtccaggcgtctcagtcgcctagctaaatcagcaagagg

SEQ ID NO: 218437 - DNA, 2547 bp, Zea Mays
gtgctgtcccccctgctcctgctcctgcctccggggcgcggcgccttcccgtctcccttcctcctcctctcccaccgctcggcctcctccaccacacgcgctcggcggtgccctccccggcgcggcgccgaaatgcaggtggggcctcgtcggcttcccgcggctgcgacgggccggagcagctaacgccgcggcctggggctgtgatctggggccgcgccgcattgccgactgcctgccgccgggctcgcgcgcgcagttcctgcctgccggtggcgaggggaggcaagatgcggcatctcgctctcctcgcgcttcttctcgctcccgttctcggatccacaggcaccactctgtccccttctccggccgccactgattctcctgcaaaccaaggacaggcttctagtcctcctcaatctgcatttgctcttggtccagtagctgttccaactgcgccgaccactccatcggcgagtccttccccggagaaagccgcggctgtaagtcctgctgctcccacggagccacgaattgccccggctccagtggctcctcctaaagagtatagtgcacctcctccagttgaggttgcacccactgatcccaccgatgaggttcctccaccagtagctccaccacaagctgcagttggaaatcccactccaattcttcctgggacacctgcattgctaccttatgttcaggctcctgctccatctgtcgttctcaagcctaatccaccagtcgtggtgtcacctccacctgcgaataatcaaccaagtaggccggttgggtctgtccctccttatccaccccctgcatcgccccctccggcaaatggcattccaccatacccaccttcaggaaggtttcctgctattcctcctgccacttcaggaaacgcagtgccgccagcaaatacttaccctcctacaaatctcaagaagcatcatgttccacatgcatcccctccaaagggatccactggtcaaactgtcccaggtcacaaatcaccagttacaggatctgcgcctgcaacaagtcctttgccccagaacacaaacatgccttcaatcccgaagaatgcttcatcagtgccacatgcccatccctcaccaccaagtatagctccagaattggcacccactggtagatctcatgctcagggatggaaatccagtaatcccaataacaaaacaaatagattacatgccccatcttatccaccgcctcgtgctcaagggcccgaggtctcacgaaccccaagacagactgggactaaaaactatactcaccatgcgcctccaccattccctcaaggacaccctagctttcctgtacactccccatccccttcaccagcctcatcgaggggtcctgcgaacgcgaagaaaagaaatcatatttctcctactcttccttcaatccctcccctaccagagccaaaagcaccgtcagcgcatcctatttggacattacctccaccaccacctaattcagattgcaattccttatcatgcccagagcctctaacagatccacctgcgggagcaccatgtgcatgtgtgctaccaatcagagttggaattcgtctaagcgttgacctttactcattttttccattggtctctgattttgctgaagaggtagcttcaggggtaaacatggcacagaggcaggtccgtgtaatgggtgcgaacgttgcaggtgatcaacctgacaaaacaatggttcttgttgatctagttccagtgcaagtgaagttcgacaatgctacagcattttcagcatttgaaagcttgtggagcaaaaaagtttctttaaaaccatcagtctttgggaactatgagattctctatgttgtatatccagggcttcctccttcaccaccttcagggcaaggtgttggggatggggcgtttggcaacaacagaaatgcaagggccgtgaagccccttggggtcgatgtaagaagtcccaagagaaaagtgaatggcagcctcattgctattgttgttttgtctactgttatagcattgattatttgctgtctggctgcatggtcgctaatcctcagattcaggggtccgagccacacagctcggggatttccacatactgcacttccaaaattttctaggtcatctggtacgtgtaactaacctgctaattttctgataattgcaccttgatgtgatgtaattggactagctctttgattcgtagcagaataacagtaacttttctccaatgaagtagtgccactgttgaaattcatcatgaacttgtagtctataagcaagttttttttatttggtatcctttccaaggaaaattccattgcttatttgaaatgccagccaacagtgcttgcaatgacttttcagttaaaaggctttcgtttcagtttctgcatcgtgttatgtgcccttgctagaataatatgcacagtttaggcagtactagttttcgttctgaccagtgttttaaaggtgtcgcctaggcgtccaggcgtctcagtcgcctagctaaatcagcaagagg

SEQ ID NO: 218438 - DNA, 650 bp, Zea Mays
cgtgtgcccccgcattctcttcggccggctatgtatagatgagcgaccccctgctacccaattccaacactcaggcaacccagctttggctgcccttgcttgctgctcagttctttgccccctgttcctcctcctcctcttttcgcacctcggcgcctgcttcggcatcaactgcgaccgagatggaggcgcaagacgactgcaagtggcgccaagtcccggcgttcggcgactggaacctgtgggacgacatgcccgtcacccagtactttcaggcagggaccttcttcttcgccgcgccgacgacagagaaggacgacgacgaggatctcttcaaggtgccccagttccctgccacgccctacagctacaagaagtgcgttgttcgagtgaagggggagaaaggaactgctgtgcctccggcggcgaggaagggaggaaggaggcgccgcgtgaacgagcaacagaagtggaagcccaagggagctgtggacgaggacctctacaagatatccccgcagcttctctgcaagaagaagctcctgaggaatctgctgggagggtgcctgggcctgagctgcatcgcatgaccgagagacgcatcgcttaataagtttctggggagtttgttcggtaaaaaaaaaacaaaa

SEQ ID NO: 218439 - DNA, 569 bp, Zea Mays
agatgagcgaccccctgctacccaattccaacactcaggcaacccagctttggctgcccttgcttgctgctcagttctttgccccctgttcctcctcctcctcttttcgcacctcggcgcctgcttcggcatcaactgcgaccgagatggaggcgcaagacgactgcaagtggcgccaagtcccggcgttcggcgactggaacctgtgggacgacatgcccgtcacccagtactttcaggcagggaccttcttcttcgccgcgccgacgacagagaaggacgacgacgaggatctcttcaaggtgccccagttccctgccacgccctacagctacaagaaggtgaaacaaaacacaacgctgcatttaatttctttcaccaatcaccctcgaaaaaaagttttcttcttccaccagctctaaagatatcagcactgtttcatgcagtactttcatttcaaatctccacttccatatagtagtacatatatacatatacccagtctgcactagcgatgagaaagatactgaccaattctgtggtcgatgcttgcatgtgcagtgcgttgt

SEQ ID NO: 218440 - DNA, 4160 bp, Zea Mays
gaagctacaaaatcgaagcagtaatctttgaaacgaagcccttccatggccttaattggagttcaacgcgcgagataaggagagcttttctaaacgggagttttgggcaatgtctcgtactctcgttcctgtacggtcgaagcccacggcattgtttccaaacaagcgaaaccgagcgtgtcgatgcagcctccccgtttcgccgtcgccctgccgccgctcgtctcccgcctcccctctgcgcctctccaaccttctcctcgccgtcgcgtccgttccggtgccgccgagcacgcggacgcgtcttcgcgcgcctcccggagcccgccgcccgcgaccagaagcaagggcaaatgggcgccacaccggtgcggtggccgcgggtgctgaccccggcgcagctagccggagccatacgccagcagaaggacccgctcgaagccgcccacctgtactgggacgcacctcgccgctacccacactcctaccgccacaacgacgacgtccgcttcaccctccttggcaccgccgccggctcccccgtcctcccgtccctcctccgccgggttctcccatcctccccatccgccgactccctccttgccgcttcgatacccaaactctctcctccagacgccgtgtccatcttccgctcgtcgctcccctcctccccgtccccgtcttggtccctctccttcaccgccctcctccggcacctcgtctcccaagcactactccccgaggctgcccgcctcttcgctgacttcgccaggcggccggaagtgtcaatagcatccgcggatctgactcttctcataattggtctctgccgcgtgcgccgccctgaccttgcgctgcaggtgctcgacgaaatgcccaacctatgcctcgctccggaaagggacgcgtaccgcgcgattgtgcctgctctctgtgatgctggcatgcttgatgaggccacacacgtcgtctattccatgatgtggcgggtgtcgcagaggggctgtgatgcagatgttatggtgtaccggacattgctggccgcactctgtgcggctggccggggtgaacaggctgagctggttctggataaggtgctcaggaagggtctgagatcaccaagtagtcgtcggtctcttcgtgtgccaatgcttgctgtgcttagtgtcgaggatgctcgggaagccattgaccaggcgttggctgttcgaactggacgtactgtatgcagctttgagtccatgatttttgagctctatgaagagggtcggtttgatcaggctgacagattgttccaggacatggccaagaaggggttcaggccaaccatctgcatgtatgaggcaaagatcggtgctttatgcagggaacggaatgtggatgatgctgtggaagtgctggaagaggagctgccaaagaatgaccttgttccaacagtgacaacatataacttgctcatgaagggtctatgtgacacgatgcaatcaatgagggcactagaatacctcaaaaagatggataagcagctcggttgtgttgctcaaaaggacactttctcaatcttggttcacggtttgtgctcagaaacgaagtttgttgatgcatcaaagttaatggagagaatggtgaagggacatcatcggcctgacaaaagtgcattcaacagagttatcgaaggtttatgttctgctggcagaatatatgatgcattgctatggctagaggagatgatcaaccatggagaaacaccaaacgccggtgtttggtcatccttagtctcagcagtatgtttgccccagtttgaagctttaggagctggactgctggagacagcataggttgtaactgcagaagaagactcgttcgacctaggaaactcttgaaaccacaatacaccaataatgagtgcccaagatacaatgatacctcaaatccatttacctttctgcctgatccaaatgacctagagaaccatggcacacttggtcatgatgacgacaaattttcagagaaaaatatgggctgaaatgaattcagaatgggagcaggagcagcactacagcaggtgatgctgatatagcttcatatgcagagttttgctttctacacgtgccctgttcacattttttatattcttatagcattaaaacgttatatggctcgtctatcacactggctgaatcattgaacttgccctaacaagtcttgctgaagacattagttaaccaaggtcaaatttgtgactgtgctaagataataaagctaaaaaattatgcattttccaaacagccttactcgtactctcgatcggggtagtttccggaatccgaaattttaacgctattagataagatagtactgtaaattccatttttgttttttttttaccgctctctgccctaaccgctttaatgtactgctagtaacaaagtgagtcaccaaaacaacaccaagagagatggaatgcgagctagtgtttacattcaaaagagtgcaaaagcagcagtaagtttccattgattccatattagcgtagacactatacaactctccagagcacccaccgaacaacaaactccccagaaacttattaagcgatgcgtctctcggtcatgcgatgcagctcaggcccaggcaccctcccagcagattcctcaggagcttcttctgcaacacaaacaaaagagcatgagaacaaaactctcacctaaaatctttctggagtttacagtccagctttattgctcatgatctttggcaaagctccacttgctgtgaaaaatgaagtgcttaagcttttgaagaaaggtcacagcatatattggcaaagtatagctgttctatctagtgttgttatcctaacaaaagctacttgcaaagggtcagcttaggctagataaaggcttatgccaatcacatgacgagaactagataagaagtagacccacttaggtacacgtggggtgcaaattaggattacaggatccttgccttcttcaccttgcagagaagctgcggggatatcttgtagaggtcctcgtccacagctcccttgggcttccacttctgttgctcgttcacgcggcgcctccttcctcccttcctcgccgccggaggcacagcagttcctttctcccccttcactcgaacaacgcactgcacatgcaagcatcgaccacagaattgctgtagggcgtggcagggaactggggcaccttgaagagatcctcgtcgtcgtccttctctgtcgtcggcgcggcgaagaagaaggtccctgcctgaaagtactgggtgacgggcatgtcgtcccacaggttccagtcgccgaacgccgggacttggcgccacttgcagtcgtcttgcgcctatcagaaaaaacgaaacggaacaaagcttactcctctggactctggtgaaagcttggaagccagtcttggaagcaagaaagacagtgtgtgaatgtatgacacatacgtgcttgtttgaaaagaaaataaacactgttaagagcatagtatgtctcttagattaacagtagataactactactatctctattcttttttgtttgtcacgttttagtttaaaattaaactagcggcgacaaatatttaagaacagaggtagtagagcatgtcccaactgccatggtatatttctctgttagcaaggacatgctgcatagtttagtttccttattgcatgaggatgcagatccccatataccatgcatgaagaggctggtattcatctgccgaaaaaaaaaaacaagagaagaaaacaaacaaagacagacgcattcttggctcacctccatctcggtcgcagttgatgccgaagcaggcgccgaggtgcgaaaagaggaggaggaggaacagggggcaaagaactgagcagcaagcaagggcagccaaagctgggttgcctgagtgttggaattgggtagcagggggtcgctcatctatacatagccggccgaagagaatgcgggggcacacgtacccaaactgttcagagaaaagcggtcgaggaaaagcgagcgcccaaagcagcggctagcgttcagctgttactgatgagccgaggcccgccccggcaggcaggcaatgagtactagcaccccacagtcactgagagtcactcatgccgcaggagtgcag

SEQ ID NO: 218441 - DNA, 1765 bp, Zea Mays
gatagatgtgtgtatatatgcacatacatgcatggttaattaagttgcaacgacgacgacgaccatggagactgtgttcaagtggagagcaagaacaggaggcggagtctcgctgatccatctcctcgtccggtgttttgcagtgtcagctgccatcttgctgctggcagatgggaggcatgctgatgccgtagatcccgccgcacccgtggagatacagcagacaggcagcagcagcgaggtggccgacgagcagcagtggcggatggtgaggaccagggggaaccagttcgtcgtcggcgacgacgacgaccacaggccgttttacgtgaacggcttcaacacgtactggctgatgatcctcgccgtcgacccgtccaccaggggcaaggtcacggaggtgttccagcaggcggcggcggccggcctcacggtgtgccgcacctgggccttcaacgacggcggctggagggcgcttcagaagtcgccgtctgtctacgaccaggatgtcttcaagctaggcgctggatttcgtggtgagcgaggcgaggaagtacaggatcaggcttatactgtcactgatcaacaactgggacagctacggcggcaaggcgcagtacgtcaaatgggccggggacgacgccgccgccgacggcggccgcctcaacatcaccgcctccgttgacgatgacttcttttccgaccaaaccgtgaaggtctacttcaagaaccacgtcaagaacatgctgacgagggtgaacacgtacaccagtgtgatgtacaaggacgacccgaccatcttcgcgtgggagctcatgaatgagccgcgctgcacgtcggatccagccgggaacaagctgcaggagtggatccaagagatggcgttccatgtgaagtccatcgacccggaccacctgctggaagttggcggcttggcgcagagggcttctacgggccctcgtcgccgtcacggcttccggccaacccgaacgcctatgctggccaggtcggcaccgacttcatccgcaaccaccgcgtcctgggcgtcgacttcgcctccgtccacatctacccagacacctggatgccgggcgcgactctggaggcacggctctggttcgtggactcgtggatggaggcgcacatcgccgacgccgacggcacgctgggcatgccggtggtgttcacggagttcggggcgtccaccaccaaggcccggagcggctgcttcaacgcgaccacgagagaccagttcatccaggcggtgtacgcgcggctcctcaactccacgcggcgtggcggcgccggagcgggggctttgctctggcagatgctcccgctggggaccgactacatggacgatggctacggcgtcgtgcttcccagggcggcggccactgcccggatcatctcggcgcactccagggacctggccattttcaactcgaggtgcgcctggagctgccgctgggggtgcaggaggcgggggcacaagtcggaggatcctgatgttgatgatgacctgccgctcgtcgaggataaacaacgagaagcatagaattaatactactaatgagagataaatggccgtgcgttgctacggagcaaaaatatttaaaaatgttgatagaaaaggcatatagataactctatttcatcatacaattgatacaaaagtagcagttaaattgccaatgacatgtgatgctaagcatcaccactctaggagaccactctaggagatgtccaaatctcagaattacct

SEQ ID NO: 218442 - DNA, 930 bp, Zea Mays
atggtatggaagggtaaaaaattgcatctgagaatggattcgaacatttacgacaaaaaaaagtgtgaagtccaccattgagaggtacaagaaggccaacagtgacacctccaactctggcacagttgcagaagtcaatgctcagcactaccagcaggagtcctccaagctgcgccaggcgatcgatagcttgcaaaacgcaaacaggaccatagtgggagattcaatccacaccatgggcctcagggagcttaagcagatggagggcaagctggagaaggccataaacaagattagagctagaaaggagatggatctgcagactgacaacatgtacctgaggagcaagatcgccgagaataataatgaaacggggcagccagcgatgaacatgattggagtgccgtcgacgagcgagtacgatcacatggcctcttttgttgactcgagaaactttcttcaggtgaacatgcagcagcagcagcctcagcactactcccatcagctgcaaccaacgaccctccaactcggatgatgaaattaagaatcttcggccaacaatccatgcacgcaagcacgcagtaaatcatgtgtgtccaactcagataaaaaaatctactctagcgtttgtataattattaataatcgtgactagtaaactgttatatatatatgtatagccatgtgtgtggtggcgcctacatatatgtcatgtggctgtacggcgagtttttttttcacaagcgtttgcagcagcatttggtgttgctcatcgatcaattaatcgcaagaaattaaacttgtcaccactgtgggtgtacgtgttaatgcagttgttgtatctgttaattgtaccctccatcagataaacgcgggtgcgcgtatgcatacttatttatgtgtatgattatttgtgtggtttatatcgcc

SEQ ID NO: 218443 - DNA, 432 bp, Zea Mays
atggtatggaagggtaaaaaattgcatctgagaatggattcgaacatttacgacaaaaaaaagtgggcatcattattatattgcagtgtgaagtccaccattgagaggtacaagaaggccaacagtgacacctccaactctggcacagttgcagaagtcaatgctcagcactaccagcaggagtcctccaagctgcgccaggcgatcgatagcttgcaaaacgcaaacaggaccatagtgggagattcaatccacaccatgggcctcagggagcttaagcagatggagggcaagctggagaaggccataaacaagattagagctagaaagaatgagctcttgtatgctgaagttgaatatatgcaaagaagggagatggatctgcagactgacaacatgtacctgaggagcaaggatttttcacatggatgc

SEQ ID NO: 218444 - DNA, 3603 bp, Zea Mays
ggaagatggcttaccattggtcacttatcaaacagacctgtttttagataaaaacatagattatgctgtaaatgaacatcaagttttgttaaatgcctcaaaatgttcatttgtgtcaagtctttttccaccgtgtgaagaatcaacaaaatccacaaaatttacttcaatcggctcaagtttcaagcaacaattgcagagtctgctagaaactctgagtgcaacagaaccacactatatccggtgcataaaaccaaataatgttctcaagccagcaatatttgagaacagtaatgttctccagcagcttcgttgtgggggagttttggaggcaataaggataagctgtctgggataccctactaggaggacattttatgaatttgttaatcgatttggtattctacaacccaaagtccttggtcgaagccatgatgaagttactgctgcaaaaatgcttcttgacaaagccaatcttgcaggctatcagattggaaagacgaaagtatttcttcgtgctggtcaaatggcagagttagatgctctaaggacagaagttttgggactttctgctaaaaaaatacaaagcaaacttcggtcatttctggctcgcaaaaaatatatcgagctgcaacaatgtgctacacaaatccaggcaatatgcaggggaacaactgcaagaaggcgttatgaaaaccttcgtagggatgtagcttcattgaaaatgcagacctgctaccgtatgcactatgcaaggaaaaactatgtagaaatctgttctgcgtcaactaatatccagtctggtttacgtggtatgggtgctcgcatcaaactccgcttgaagcggcaaacaaaagctgcagtgattattcagagtcgatgccgctgttatttagtacgttcacgatatgttaggctggtgaaggccacaattacggctcagtgcggttggagaagaagagtggccagaaaggaacttcgaaacctcaaaatggctgcaaaagagactggtgctctacaggctgccaaaagcaaactggagaaggaagttgaggagcttacatggcggctacagctggagaaacgtattagggctgatttggaagaagctaagtcacaagaaaataagaagctccaattacaattgcaggaattgcaattgcaactcaaagacacaaaggacctattgaaaagggaacatgaagctgccaaagaagcatcagagaaggctgctgcagtaccagagattcttgctgatacagctcaagtcaatgagcttactgctgaaaatgagaagctcaagtcattggtggcctcttttgaggaaaaacttcagaatgcagaacagaagttcgaagaaacagagaaagctagggaagaattagtcaagaaagcaacagatgcagagtcaaagataaatgaactgaagaacacaatgcaaagccttcaagaaaagttgactagcacggaggcagaaaaccatgttctcaggcagcaatctatgaaagcaagacctgataatatgcctttgcttaacatgcatcggaaatcaaatttggctaatggaagcctacattctgacgaacagacgcctcacggcactcctatggagtttggaaggagatccatcattgagagacataatgagagtgttgatgcattgataaattgtgttgttgaaaatgttggattcagtgaagggaagccggttgctgcaataaccatatacaaatgccttcttcattggagaatttttgagacggacaaaacaaatgtttttgatcgattgattcagatttttggttctgcaatgcagaaacaagataacaatgctgatcttgcatactggttatcaaattcatcatctctactgattatactacaaaagagcctcaaacctcctggttcatctgtaacaactccaatgaaaagaccacagactcagacatcattccttggaaggatgggatttcgtgcttcaagtattactgttgatatggatcttgtccgccaagttgaggccaagtatcctgctctcctttttaagcagcaacttacagcttttgtggaaggcttatatggaatgatccgagacaatgtgaagaaagaaatatcttcagtaatttcactagtcattcaggttaccccatctatcgaaagtcatcctcaggcaccaagaaatgcaaaagctggtttgatcacagatcaaggtagctattggcagacaatagtcaaacatttgaatgacctcttagaaattttgcaagaaaattgtgtaccgacagtttttgctcggaagatctttacacagattttctcattcatcaatgctcaactcttaaatagtcttctcgtgcgtcgggagtgctgttcctttagcaatggggaatatgtgaaacaagggttggacgaacttgagacttggtgcacagtggccaagccagagtacgcaggatcagcatgggatgaacttaagcacatatgccaggctgttggtttcctggtcattttcaaaaagttcaggatctcgtatgatgaaatcatcagtgatttgtgcccagtattgagtgtccagcaaatttacaaaatctgcactcagtactgggatgataaatataataccgagagtgtatctgaagaggtccttgatgagatgaaaaaagtggtgaacgagggatctggccaaggcacttcatcagacaatacatttttgctaaatgaggagataagcttgcctctatctctggaggagattgccaactctatggatgccaaggaatttcagaatgtgagtccaccgcaggaactccttgacaacgctgcattccagttcttgagaagctgaggatgagaaagacagggaggcaggcatagatagaagatacagatagatagaaatgcccggtgtcccccttagctaggtgctgtaaattcagatagttcggtcggtccatgtagccttttgaaatgaaattcttggccattctcgcttcacgtatgggccttgtaaatttagatagtgtgcgctgagcggaggagccagttcaccgacgtcgccaagccgtcgcggatccacccgtcgttgaccccatggacgctaaccccacgcccccatgggggaggaggaggaggccacatcgtacaagcagcagccggagaagatgtgtggcggccagaggaagaaggctgagtcagtgatcgcaacggagaagttatgtggagttctggcgttgtgtggcattgggctggggaattaaggagctcaacctgttggttagcgggttaggataggggatgtccatgtcaggtaaccgtttgaaaatttcctccttttcttctggtttatgctggtggtttgatttcgttggacctacatataggtggtgattttaattagttgatgttgttggatacatgtttactgtacttttgaagctttatcagtgggatttgcattgatgccctggtaaattgcagctgctcttaacgggaatgctgagagattttcgattgacaattccctaggcctcgtttggattcttagaattgaattccattgtaataattataatttagatatagatcaatcaaactaatatgatt

SEQ ID NO: 218445 - DNA, 5991 bp, Zea Mays
atgctcccaaataattcttaccaagcaagcaccaccctccaggcgtccctccctcttcactgcttctagcatcgctgctaaaaatagtagtgaagggacacccaaacaaacgcaaccagcagcgttcacgacgacgatgcagggatatgccgagaccggggattctaccaatttgatcccctccgtctcgcgaccgccgtcctgcggtggtgctgccgctgcgtcgcgggtttgatgtcgccgctgtcaatctgattcttccgtcgcaatggcgtccaaaagccgctttgttgtgggctctcatgtctgggttgaggacccagatgaggcctggatggatggcttggtggaacagatcaatggggacgaacttgtcgtcaactgcacctctggaaagaaggtaactgctaatgtgtcaagtgcctaccccaaggataccgagtctccacgtggtggtgtggaggatatgacaaggctagcatatttacatgaaccaggagtgcttcaaaacctaaagtctagatttatgctaaatgaaatatatacttatactgggaatatcttgatagctgttaatccatttcaaagacttcctcacctatataacaacgatatgatgggcatttacaaaggagcagaatttggtgagctgagtccccatccattcgccatcgctgaccgttcgtatagacttatgatcaatgatcatataagccaagcaatattggtgagtggagagagtggagcagggaagaccgaaagcactaaaagtcttatgcaataccttgctttcatgggtggtaagcctcaagctgaaggaaggtcagtgcaacaacagatcctggagtccaacccggttcttgaggcatttggcaacgcaaaaaccgtcaggaacaataattcaagtcgttttggaaagtttgttgagattcagtttgatgcgaatgggaagatatcaggagctgctataaggacctatcttctagaaagatcacgtgtgtgccaaatatctgatccagaaagaaactaccactgcttttacatgctatgttctgcaccaccagaagattgcaaaaaatataaattgggagatcccagatcatttcactatctcaaccagtccaactgtattgcgcttgatgggctggatgactccaaagaatacacggaaaccagaagagctatgggtattgtgggtatgagtactgacgaacaggatgcaatatttagagttgtggctgctattcttcatctgggtaacatagaatttgcagaaggaagcgaagacgattcttcagtacccaaagacgagaaatcccaatttcatcttaagacagcagctgagcttttcatgtgtgatgaaaaaggtctcgaggaatctttgtgcaagcgtgtaatggcaacacgtggggagagtattacaaaaaatttagatccacgagctgcagctctgagtagagatgcattgtctaggattgtttattcacgtttgtttgattggattgtaaataaaatcaatagttcaattggtcaagatcctgattcaaagattttgattggtgtccttgacatttatggtttcgagagtttcttgacaaacagctttgagcaattttgtatcaatctaacgaacgagaagctccaacaacactttaatcagcatgtctttaagatggagcaggaagaatacaccaaagaagaaattgactggagttatatccagtttgtggacaaccaagaaattctggatctaattgagaagaaacctgggggaataattgctcttttggatgagacatgcatgttgcgaaattcaacgcatgagacatttgctgagaagttatatcaaaagtttaaagacaaccctcacttcagtaaacccaaattttcacggtctggcttcactgttcatcactatgctggcaatgtcacttatcaaacagacctgtttttagataaaaacatagattatgctgtaaatgaacatcaagttttgttaaatgcctcaaaatgttcatttgtgtcaagtctttttccaccgtgtgaagaatcaacaaaatccacaaaatttacttcaatcggctcaagtttcaagcaacaattgcagagtctgctagaaactctgagtgcaacagaaccacactatatccggtgcataaaaccaaataatgttctcaagccagcaatatttgagaacagtaatgttctccagcagcttcgttgtgggggagttttggaggcaataaggataagctgtctgggataccctactaggaggacattttatgaatttgttaatcgatttggtattctacaacccaaagtccttggtcgaagccatgatgaagttactgctgcaaaaatgcttcttgacaaagccaatcttgcaggctatcagattggaaagacgaaagtatttcttcgtgctggtcaaatggcagagttagatgctctaaggacagaagttttgggactttctgctaaaaaaatacaaagcaaacttcggtcatttctggctcgcaaaaaatatatcgagctgcaacaatgtgctacacaaatccaggcaatatgcaggggaacaactgcaagaaggcgttatgaaaaccttcgtagggatgtagcttcattgaaaatgcagacctgctaccgtatgcactatgcaaggaaaaactatgtagaaatctgttctgcgtcaactaatatccagtctggtttacgtggtatgggtgctcgcatcaaactccgcttgaagcggcaaacaaaagctgcagtgattattcagagtcgatgccgctgttatttagtacgttcacgatatgttaggctggtgaaggccacaattacggctcagtgcggttggagaagaagagtggccagaaaggaacttcgaaacctcaaaatggctgcaaaagagactggtgctctacaggctgccaaaagcaaactggagaaggaagttgaggagcttacatggcggctacagctggagaaacgtattagggctgatttggaagaagctaagtcacaagaaaataagaagctccaattacaattgcaggaattgcaattgcaactcaaagacacaaaggacctattgaaaagggaacatgaagctgccaaagaagcatcagagaaggctgctgcagtaccagagattcttgctgatacagctcaagtcaatgagcttactgctgaaaatgagaagctcaagtcattggtggcctcttttgaggaaaaacttcagaatgcagaacagaagttcgaagaaacagagaaagctagggaagaattagtcaagaaagcaacagatgcagagtcaaagataaatgaactgaagaacacaatgcaaagccttcaagaaaagttgactagcacggaggcagaaaaccatgttctcaggcagcaatctatgaaagcaagacctgataatatgcctttgcttaacatgcatcggaaatcaaatttggctaatggaagcctacattctgacgaacagacgcctcacggcactcctatggagtttggaaggagatccatcattgagagacataatgagagtgttgatgcattgataaattgtgttgttgaaaatgttggattcagtgaagggaagccggttgctgcaataaccatatacaaatgccttcttcattggagaatttttgagacggacaaaacaaatgtttttgatcgattgattcagatttttggttctgcaatgcagaaacaagataacaatgctgatcttgcatactggttatcaaattcatcatctctactgattatactacaaaagagcctcaaacctcctggttcatctgtaacaactccaatgaaaagaccacagactcagacatcattccttggaaggatgggatttcgtgcttcaagtattactgttgatatggatcttgtccgccaagttgaggccaagtatcctgctctcctttttaagcagcaacttacagcttttgtggaaggcttatatggaatgatccgagacaatgtgaagaaagaaatatcttcagtaatttcactagtcattcaggttaccccatctatcgaaagtcatcctcaggcaccaagaaatgcaaaagctggtttgatcacagatcaaggtagctattggcagacaatagtcaaacatttgaatgacctcttagaaattttgcaagaaaattgtgtaccgacagtttttgctcggaagatctttacacagattttctcattcatcaatgctcaactcttaaatagtcttctcgtgcgtcgggagtgctgttcctttagcaatggggaatatgtgaaacaagggttggacgaacttgagacttggtgcacagtggccaagccagaggtaaataaatggaaaaatgattacatcaccgatgtgacatttatacttcatccgttcaagtattataccttgaaattccaaacatggagcaaatagcccctgtatagtcttttttttctccctgtcatgtacactggaaatgcagtgctacctaaataactacaaacccttctcgtgcaaaatgatgctgtatgaccatcttgcatggccccttatttaccattgcgtctcttctataaagtaaaacaaaacaaaagttttgtgtttggtttctgtttgatcttcttttgtaaggttggccatggttgcctggtaaacccaggtttatttcgtagtagtattggtttttccgtaataaatccaggatggtgtttccctaaaaaggtaaaacagaagaaaggtatcaattaaaatggcagtacagttccagcattggtatccttcattcatttcccttttactaactgtcaaatactacagtacgcaggatcagcatgggatgaacttaagcacatatgccaggctgttggtttcctggtcattttcaaaaagttcaggatctcgtatgatgaaatcatcagtgatttgtgcccagtattgagtgtccagcaaatttacaaaatctgcactcagtactgggatgataaatataataccgagagtgtatctgaagaggtccttgatgagatgaaaaaagtggtgaacgagggatctggccaaggcacttcatcagacaatacatttttgctaaatgaggagataagcttgcctctatctctggaggagattgccaactctatggatgccaaggaatttcagaatgtgagtccaccgcaggaactccttgacaacgctgcattccagttcttgagaagctgaggatgagaaagacagggaggcaggcatagatagaagatacagatagatagaaatgcccggtgtcccccttagctaggtgctgtaaattcagatagttcggtcggtccatgtagccttttgaaatgaaattcttggccattctcgcttcacgtatgggccttgtaaatttagatagtgtgcgctgagcggaggagccagttcaccgacgtcgccaagccgtcgcggatccacccgtcgttgaccccatggacgctaaccccacgcccccatgggggaggaggaggaggccacatcgtacaagcagcagccggagaagatgtgtggcggccagaggaagaaggctgagtcagtgatcgcaacggagaagttatgtggagttctggcgttgtgtggcattgggctggggaattaaggagctcaacctgttggttagcgggttaggataggggatgtccatgtcaggtaaccgtttgaaaatttcctccttttcttctggtttatgctggtggtttgatttcgttggacctacatataggtggtgattttaattagttgatgttgttggatacatgtttactgtacttttgaagctttatcagtgggatttgcattgatgccctggtaaattgcagctgctcttaacgggaatgctgagagattttcgattgacaattccctaggcctcgtttggattcttagaattgaattccattgtaataattataatttagatatagatcaatcaaactaatatgatt

SEQ ID NO: 218446 - DNA, 2384 bp, Zea Mays
ccccacccccgactcgagtctagttccgttcgaaaaaattcaaatccccctccccccctgccaacgtctcgttctccccaagcggcctccgcagccagccattgagccatgtccctcttgtcgcggcacgcgcgtcaccccactacgccgccgcccgcctctttctccggcggcgttgagaccccacctcgtcgccgcgtccccaaagagaacgttgacccctcctccccggcgcgcaaccaccactctgccctcgaccacggcgcctcccccttccgctccccgtcctccgcggccaagccgctctccgcccgcaaccgcttgccaccgcgtccgccgtcctctaatccactaaagaggaagctcgaagtctcccctgcagcggccgcggtgggctccgcgcacgatgccgcacccgggctcgactccggcgtccaggtggtggtgaggatacggccgtcgtgctgggtcgatgaagaggaggcaggcgaggatgggaggggaccggaggcctgcgtgcgcaagacggcggccaactcggttgcgatccaggggcaggacttcacgtttgatgctgtcgctgactcggtctccacgcaggaggatatcttcacccttgttgggctgccacttgttgaaaattgcttatcaggtttcaacagctccatatttgcctatggacagactggcagtgggaaaacctacactatgtgggggcctctatctgcattgtcagaagattcattgagcagcgagaggggcttaacacctcgtgtatttgagcagttgttctcccgcattaacgaagaacaagttaaacatgctgacaaagagcttacttacaattgtatctgctcgtttctcgagatctacaatgaacagataactgatttgctagatccctcgcagaagaatcttcaggttagagaggatgtcagaactgcctgtgtttatgttgaatcattgacaaaggagttggttttcaccttgaaggatgtaactcagttgttggttaagggcctggcaaaccggaggactggggcaacgagcgcaaatgctgatagctcacgctcgcattgtgtttttacgtgtgtcattaagatggattctaagaatccagaggatggctcaagcatcacaagatcaagtaggataaacttggtagaccttgctggatcagagcgacaaaaactaacacatgcagctggggatcgactgaaagaagctggaaacataaaccgttcactttcacagctcggaaacttgattaatatacttgcagaaatatcgcagtctggaaaacaaaggcaccatgttccatatcgtgattccaagcttacatttctattacaagaatcccttggaggcaatgccaaactggcaatgatttgtgctgtttcaccgtcccaaagctgtaagagtgaaacgttaagcacacttaggtttgctcaacgtgcgaaagctataaaaaacaatgccgtagttaatgaagagaaaattgaagatgtaaatgcgttgcgtgagcaaatcaggcaattgaaggatgaacttcaccgaatgaaatctaatggaggcatagaagggaacagcggcagctttgccactggatggaaccctaggcgcagtttgcatctgttgaaaatgagtttgggtcatcctacaacattccaatgtataaaagaagatagtgacgaggaaatggaaattgatgagaatgatgttgagaagccctacaatcatgaaaatatggcaatgtcttctattaatgttaaagaatccaaacgtttccaagcttcaatgaatgtaagtgctggaacttcacaggttgaagatcttgacagggataagattttgatatccataaaaaggtcctgctgtagtgctaataaatttaatactggtactgatgttggagatggaaaatgcaaattaaacattgccgccagtatacagaggggacttcaagtcattgaaagtcaccaaaataatagtgcatggaagagagcatcggttggattaaatgctagaatcatggatattcaaccttgcaaggttgatgttgcaattcagactgatcctgaagaatacgaaactagagataaccctctagctctggttcctagttgtctgcttgaagcttctgcaaatgagagtagggatcccagtacttgcagggacctacaactagtaccagttgatgtgacagtaccatctgatgaccaaaagcagcgacattttctgaaagctgtggagaaggtcttggctggagctatcaggcgagagatggctcgtgatgaacagtgtgcaaagcaagctgcagaaattcaacaactgaatcgtctggtgcaacagtacaagcatgaacgcgaatgtaatgctgtaat

SEQ ID NO: 218447 - DNA, 2375 bp, Zea Mays
ccccacccccgactcgagtctagttccgttcgaaaaaattcaaatccccctccccccctgccaacgtctcgttctccccaagcggcctccgcagccagccattgagccatgtccctcttgtcgcggcacgcgcgtcaccccactacgccgccgcccgcctctttctccggcggcgttgagaccccacctcgtcgccgcgtccccaaagagaacgttgacccctcctccccggcgcgcaaccaccactctgccctcgaccacggcgcctcccccttccgctccccgtcctccgcggccaagccgctctccgcccgcaaccgcttgccaccgcgtccgccgtcctctaatccactaaagaggaagctcgaagtctcccctgcagcggccgcggtgggctccgcgcacgatgccgcacccgggctcgactccggcgtccaggtggtggtgaggatacggccgtcgtgctgggtcgatgaagaggaggcaggcgaggatgggaggggaccggaggcctgcgtgcgcaagacggcggccaactcggttgcgatccaggggcaggacttcacgtttgatgctgtcgctgactcggtctccacgcaggaggatatcttcacccttgttgggctgccacttgttgaaaattgcttatcaggtttcaacagctccatatttgcctatggacagactggcagtgggaaaacctacactatgtgggggcctctatctgcattgtcagaagattcattgagcagcgagaggggcttaacacctcgtgtatttgagcagttgttctcccgcattaacgaagaacaagttaaacatgctgacaaagagcttacttacaattgtatctgctcgtttctcgagatctacaatgaacagataactgatttgctagatccctcgcagaagaatcttcaggttagagaggatgtcagaactgcctgtgtttatgttgaatcattgacaaaggagttggttttcaccttgaaggatgtaactcagttgttggttaagggcctggcaaaccggaggactggggcaacgagcgcaaatgctgatagctcacgctcgcattgtgtttttacgtgtgtcattaagatggattctaagaatccagaggatggctcaagcatcacaagatcaagtaggataaacttggtagaccttgctggatcagagcgacaaaaactaacacatgcagctggggatcgactgaaagaagctggaaacataaaccgttcactttcacagctcggaaacttgattaatatacttgcagaaatatcgcagtctggaaaacaaaggcaccatgttccatatcgtgattccaagcttacatttctattacaagaatcccttggaggcaatgccaaactggcaatgatttgtgctgtttcaccgtcccaaagctgtaagagtgaaacgttaagcacacttaggtttgctcaacgtgcgaaagctataaaaaacaatgccgtagttaatgaagagaaaattgaagatgtaaatgcgttgcgtgagcaaatcaggcaattgaaggatgaacttcaccgaatgaaatctaatggaggcatagaagggaacagcggcagctttgccactggatggaaccctaggcgcagtttgcatctgttgaaaatgagtttgggtcatcctacaacattccaatgtataaaagaagatagtgacgaggaaatggaaattgatgagaatgatgttgagaagccctacaatcatgaaaatatggcaatgtcttctattaatgttaaagaatccaaacgtttccaagcttcaatgaatgtaagtgctggaacttcacaggttgaagatcttgacagggataagattttgatatccataaaaaggtcctgctgtagtgctaataaatttaatactggtactgatgttggagatggaaaatgcaaattaaacattgccgccagtatacagaggggacttcaagtcattgaaagtcaccaaaataatagtgcatggaagagagcatcggttggattaaatgctagaatcatggatattcaaccttgcaaggttgatgttgcaattcagactgatcctgaagaatacgaaactagagataaccctctagctctggttcctagttgtctgcttgaagcttctgcaaatgagagtagggatcccagtacttgcagggacctacaactagtaccagttgatgtgacagtaccatctgatgaccaaaagcagcgacattttctgaaagctgtggagaaggtcttggctggagctatcaggcgagagatggctcgtgatgaacagtgtgcaaagcaagctgcagaaattcaacaactgaatcgtctgtacaagcatgaacgcgaatgtaatgctgtaat

SEQ ID NO: 218448 - DNA, 850 bp, Zea Mays
gtacgtcgtcacgaatgattcatctgccaagagcacgcctctgaagaacgctctgctctcggacgtgtgcattggcacgtccgccgcgccgacctacctcccggcgcactacttccagactgaagacgccaacggcaaggagcgcgaatacaacctcatcgacggcggtgtggcggccaacaacccgacgatggttgcgatgacgcagatcaccaaaaagatgcttgccagcaaggacaaggccgaggagctgtacccagtgaagccgtcgaactgccgcaggttcctggtgctgtccatcgggacggggtcgacgtccgagcagggcctctacacggcgcggcagtgctcccggtggggtatctgccggtggctccgcaacaacggcatggcccccatcatcgacatcttcatggcggccagctcggacctggtggacatccacgtcgccgcgatgttccagtcgctccacagcgacggcgactacctgcgcatccaggacaactcgctccgtggcgccgcggccaccgtggacgcggcgacgccggagaacatgcggacgctcgtcgggatcggggagcggatgctggcacagagggtgtccagggtcaacgtggagacagggaggtacgaaccggtgactggcgaaggaagcaatgccgatgccctcggtgggctcgctaggcagctctccgaggagaggagaacaaggctcgcgcgccgcgtctctgccatcaacccaagaggctctagatgtgcgtcgtacgatatctaagacaagtggctttactgtcagtcacatgcttgtaaataagtagactttattttaataaaacataaaaatatatat

SEQ ID NO: 218449 - DNA, 2014 bp, Zea Mays
acacgaacacaacagcacagcctctctctcctctactagacttgttttttccgttcatccatccatacgtttcgtttgttccacctgcgcaactgcgacggggataagtacgtcttccagatgacgacggcggcatggccgcggccacgcttcctcgtcctcccccagcctggattcctccgctcggtctgccacggcctctgcgcccgctgtctcttctgcttcctgctgctcctcgccttcgcctgcagctccagctccggacgggtggtggtcaccagcttgcctggcttcgacggcgacctccccttccacctcgaaacagggtacgtggaggtggaggaggacgccggcgtggagctcttctactacttcgtccaggccgagtccggcgccgccgccgccgccgatgacacccctttcctcttctggctcaccggcggcgaccgctgctccgtcttcagcggcctcgcctacgagatcggtcccatcagattcgtcctggaaccctacaacggcaccctgccgcgcctgcgatacaaccacaactcgtggtcaaaggtgtcacatatcctcttcgtcgattcaccggttggagctggattttccttctcgagagatcccaaaggctacgatgtcggagacatctcggcctcactgcagctacaggaattcctcatcaagtggttcagtgatcatcccgagtacctcgcgaatcctttctacattggcggggactcctatgtcggaaaaatcgtgccgttcctcgggcagatgatttcagaaggtattgaacttggaagaagacccttccctaacctcaaggttctgaatttgtcatgatcagggctatctggtgggtaacccaatcacgggcgaaagtatagatttcacttccagagtgccctacgctcatggagtcggtatcatatcagatcaattgtatgagacgatattggggcattgccaaggagaggactacactagtcctgcaaacgctctgtgtgctcaggctctggacactttcaacaatctcatcaacgaagtccagaacgcccagatcttactggacacgtgcgtctacgcgtctcctgcgccaaacgttctcagcagaccggtggacggtggtagaaggatcctgagggcggcggggatgggaggaggggcgacgctgaaccatccgccagctcgtcctcggtttggctgcatcacctacggctactacctgtcgtatttctgggcgaacgatgaacgcactcgaacagctcttgggatcaagaagggaacagtggacgagtgggtgaggtgtcacgacgcagacctgccgtacacgatcgacctcaagagcgccatcaagtaccaccggaacctgacgtccagaggctaccgcgccctggtgtacagcggcgaccatgacctgctggtgccacacctgggcacccaggcatgggtcaggtccctcaacttccccgtcgtcgacgactggagggcgtggcatctcggtggccaagccgccgggttcacgataaattactcaaacaacatgacgttcgcgacgatcaaaggtggcgggcacacggcgccggagtacgagccggagaggtgtttcgccatgttcagccgctggatactcgaccgtccactctaatctccactcgtacattgccggattcttgcaccatgaccatgattgatggactgtgtggattgcagttcataggtggaataaaatggatgatttctgtgaatggataggtctgccaactaggcaactttgtgtaaattaactaggtctgtgtcagcgcgctttaacgtaatatatgcggggataaatcgtgcaaatccagccaccaagattttaggaatgcggtggttcattcactttgtgtaaattaccgtgccgctggagacgagcgttagcagcaacgacgcgaccacgacgccgagcatctgcgcgagccagtataccgcggcacgcccgaaggagatgcggcggcccacgagcaggccaaac

SEQ ID NO: 218450 - DNA, 2596 bp, Zea Mays
cactgacagattggagcagcagcaaccggcaggcgcggaaggtgcagcggagataagtagtgtgattcagtgaaatgccgtggagatgggcggcggcggcggcgacgagaaagctcaccgggatctctcagtcgcgagtttcagtagcctttaccggccgtcttctctaccgctcgttcggaagcgactccagtgaaagccgcaagaggtcactgccacggggggtcgtatcgatcggggccatcagccttgctggaggtctcgtgctcagcgccgtcaacgacctcgccatcttcaatggatgcacaacgaaggcaattgagcatgctgctgacaaccctgctgttgtggaagcaattggagtgcctatagtcagaggaccgtggtatgatgcttctcttgaggtgggccatcgacggcggtctgtgtcatgcacattccctgtatctgggccacatgggtcaggatttctccagattaagaggatggtctgctttcgtttctgcggcatcacgactggaagatcctattgctggaggctcatcttgaagcaccatcagatgatgaggaccagagaaagctggttaaggtgaatcttgcaagcagtggccgtggggaagatggcgatccagagagtggttaatcttttgtactgaattccatggtgagtggaagatcgtgtcatctgaatggactccaaatattaaatgacacgtagatctagggaagcagatgttttttgctccaaaaatagcagcagggacggcagcaacctgcaagcacgcgggcaatatgctatttgtggccacattggcccagttttggcgttttggcgggtgcgtatggtcgcaacatgacaaccggatcatttgtgtttgttgttgccgccgctgcttctcccgttgccaagcctccatccaattggatagtcgcttcgtgcggtcccgtcccctcgccggccggcggagctcacggcttgccgctgcattgccatcgtgtcacttgtacacaatccaccaatctgattggattcggggggatgcttgggcaaattcgagaatttgctcaggcattcgttccgattgcggctagctagctgatcgcttaatcactcgacacgggcaaatttgcacggcgacgacgatgggcatcttgtgttgtttccagtcccacaccagcgatcacgctgttgcttcgtccccggctacctcttcgtcctctgccccctcgtcgtgccgaaacaacgatcgccgtgctccccccgagcggcaggcccccggcgaggagaagagcaggaggaggaacgacagcgtcgacaacagcaacctggtcgacctcgtcaacgacatcgtcgccgagtcagtgagctaccgtcacaggcgtgtggccgaggatatcctcaagatggaaaaggcgggcaaggtcacggcgcgcgccttcacgtacgccgagctgtccgaggccacgggcggcttccggccggagtcgctgctgggcgagggcgggttcggccccgtgtacaggggccgcctggggtcgtcgtcgggcccggaggtggccgtcaagcagctggaccgcaacggcatgcagggcacgcgcgagttcctggtggaggctctcatgctcagcctgctcaagcactccaacctggtgacgctgctgggcttctgtaccgacgccgaccaccgcatgctcatctacgagtacatgccgctgggctccctggaggaccacctgctggacctgcccccgggtcgcgcgccgctcgactgggcgacgcgcatgcgtgtcgcgcagggcgccgcgcgcggccttgagtacctgcacgacaccgcgcggccgcccgtgatctaccgcgacttcaaggcctccaacatcctgctcgacaccggcttccgcgcccgcctctccgacttcgggctcgccaaggtcggccccgtcggcgacaagtcccacgtttccacgcgcgtcatgggcacctacggctactgcgccccggagtacgcgctcacgggcaagctcaccaccatgtccgacgtctacagcttcggcgtcgtcttcctcgagatcatcaccggaagccgcgccatcgacaccaccaggccgccagagaagcacaacctcgtcctctgggccgccccacggttcaaggacaagcgacggttcgccgagatggccgacccgctgctcaagggcgcctaccccaccaaaggcctctaccaggcgctcgccatcgcagccatgtgcctccaggaggatgccaccatgcgccccgccatcagcgacgtcgtcaccgcactcgactacctcacggtcgcaggcggaggcgccgctgccaacgaaccaccggctcccaatcccaaccagcagcagcaacaaacagacattatcggccacgccggcgagcaagcgtaacatcatgtctcatcgaaaattgttaattaagcgcagcgtgcattcatacatataatgtgataatgttgcgcgtctcccatcgatcgatgaaaggaggacttgtcataacaaactataacgcgtattgattgttacaaacatacactacaggaaacgcctaaattttcgtgggccaaaaacc

SEQ ID NO: 218451 - DNA, 2736 bp, Zea Mays
ctgagttttgacgtcgtcgacgtcatcagcatcacctagcgtcgaagcggcgtcgcatcagtgtagaggaggatggggaggagaagagatcgaagcggccgtggacgcagcgcgaggaggcagcaaagcaggttgggctgaggggtagcgcgggcgaccactgacagattggagcagcagcaaccggcaggcgcggaaggtgcagcggagataagtagtgtgattcagtgaaatgccgtggagatgggcggcggcggcggcgacgagaaagctcaccgggatctctcagtcgcgagtttcagtagcctttaccggccgtcttctctaccgctcgttcggaagcgactccagtgaaagccgcaagaggtcactgccacggggggtctcgtgctcagcgccgtcaacgacctcgccatcttcaatggatgcacaacgaaggcaattgagcatgctgctgacaaccctgctgttgtggaagcaattggagtgcctatagtcagaggaccgtggtatgatgcttctcttgaggtgggccatcgacggcggtctgtgtcatgcacattccctgtatctgggccacatgggtcaggatttctccagattaaggcaacccgagatggagaggatggtctgctttcgtttctgcggcatcacgactggaagatcctattgctggaggctcatcttgaagcaccatcagatgatgaggaccagagaaagctggttaaggtgaatcttgcaagcagtggccgtggggaagatggcgatccagagagtggttaatcttttgtactgaattccatggtgagtggaagatcgtgtcatctgaatggactccaaatattaaatgacacgtagatctagggaagcagatgttttttgctccaaaaatagcagcagggacggcagcaacctgcaagcacgcgggcaatatgctatttgtggccacattggcccagttttggcgttttggcgggtgcgtatggtcgcaacatgacaaccggatcatttgtgtttgttgttgccgccgctgcttctcccgttgccaagcctccatccaattggatagtcgcttcgtgcggtcccgtcccctcgccggccggcggagctcacggcttgccgctgcattgccatcgtgtcacttgtacacaatccaccaatctgattggattcggggggatgcttgggcaaattcgagaatttgctcaggcattcgttccgattgcggctagctagctgatcgcttaatcactcgacacgggcaaatttgcacggcgacgacgatgggcatcttgtgttgtttccagtcccacaccagcgatcacgctgttgcttcgtccccggctacctcttcgtcctctgccccctcgtcgtgccgaaacaacgatcgccgtgctccccccgagcggcaggcccccggcgaggagaagagcaggaggaggaacgacagcgtcgacaacagcaacctggtcgacctcgtcaacgacatcgtcgccgagtcagtgagctaccgtcacaggcgtgtggccgaggatatcctcaagatggaaaaggcgggcaaggtcacggcgcgcgccttcacgtacgccgagctgtccgaggccacgggcggcttccggccggagtcgctgctgggcgagggcgggttcggccccgtgtacaggggccgcctggggtcgtcgtcgggcccggaggtggccgtcaagcagctggaccgcaacggcatgcagggcacgcgcgagttcctggtggaggctctcatgctcagcctgctcaagcactccaacctggtgacgctgctgggcttctgtaccgacgccgaccaccgcatgctcatctacgagtacatgccgctgggctccctggaggaccacctgctggacctgcccccgggtcgcgcgccgctcgactgggcgacgcgcatgcgtgtcgcgcagggcgccgcgcgcggccttgagtacctgcacgacaccgcgcggccgcccgtgatctaccgcgacttcaaggcctccaacatcctgctcgacaccggcttccgcgcccgcctctccgacttcgggctcgccaaggtcggccccgtcggcgacaagtcccacgtttccacgcgcgtcatgggcacctacggctactgcgccccggagtacgcgctcacgggcaagctcaccaccatgtccgacgtctacagcttcggcgtcgtcttcctcgagatcatcaccggaagccgcgccatcgacaccaccaggccgccagagaagcacaacctcgtcctctgggccgccccacggttcaaggacaagcgacggttcgccgagatggccgacccgctgctcaagggcgcctaccccaccaaaggcctctaccaggcgctcgccatcgcagccatgtgcctccaggaggatgccaccatgcgccccgccatcagcgacgtcgtcaccgcactcgactacctcacggtcgcaggcggaggcgccgctgccaacgaaccaccggctcccaatcccaaccagcagcagcaacaaacagacattatcggccacgccggcgagcaagcgtaacatcatgtctcatcgaaaattgttaattaagcgcagcgtgcattcatacatataatgtgataatgttgcgcgtctcccatcgatcgatgaaaggaggacttgtcataacaaactataacgcgtattgattgttacaaacatacactacaggaaacgcctaaattttcgtgggccaaaaacc

SEQ ID NO: 218452 - DNA, 4313 bp, Zea Mays
aagtcaggcgtcgggtcctcagtcgtagcggcggcgatggcgcgcggcggcggggggcggtcgaagaaggaggatgaggaggagctgcggggggcgaagcgcggttacaaggaggcgtcggcggagggtaatcgggaggaggaggcgcgctgggctaacgtcatcggcgacatctacaagcgccgctgcgagtacgtcgaggccctccggtggcttcgggcggactacgaggtctccgtaaagcacctcccgcagcggcacctcctcccctcctgtcagtcgctcggcgaggtctacctccgcctcggccgcttctcggaggcgctcacctaccagaagaagcatctacagctcgcaaaggagtctgatgaccttgttgagcagcagcgagctaccacacagcttgggagaacataccatgaaatccttctaagatctgaaaatgaccatagtgccataaggaatgcaaaaaagtactttaaatcttcgatgaagctggcaaggattctaaaggagagatccccttcccaaaagtcggactttctaaaagaacttattgatgcgtacaataatatgggcatgcttgagctggaacttgataattttgaagaagctgagaaactacttatccagggcctgaagatatgcgacgacgaagaggtagattcgtatgatgatgctcgcactaggctccatcataatctcggaaatgtttatactgaactacagaattggaaaaaagccagggggcacattgagaaggacatagagatatgtagaaaaatacgccatcttcaaggtgaggcaaaaggattcataaatctgggggagttacattatcgagttcagaagtatgacaatgcaaaactttgttacaataaagctcttgaagtagcaagatccttggaagatgaggatgctctaattgaacaaattcaccagaatattgaaactgttacgaaagcagttgaagtatttgagcagttgaaggaggatgaactgaagctaaaaaaacttatccgggacacttctaatgctcgtggaacatctaaagagagaaaactcctacttgatcagcatgcatggctggatagtcttattgagaaggccaggatgatatgtgcatggcaaaaacacaaggaattctcaaaagggaaaaaaagggtagcaaatgaacttcgcgataaggaaaagttgagtgattctcttctgtcgataggagaatcataccaaaagcttagaaacttcagtaaagctcgtaagtggtacatgaaaagttggaacatatatcggtcgatagggaacttagagggacaagcattagcgaaagtgaacattggcaatgttcttgattcttgtggcgactgggctggtgcattgcaagcttacgaagaaggctaccggattgctgtggaagcagacctacctaatgtgcaactttctgccctcgagaacatgcattacagtcatatggtcagatttgataatatcgaagaagccaagaaaatgcaggaaaaaatagacaatctgaagcaaacactgaatcaatgtgaagcaagggatactgttagtgactactgctcagaaactgacactgaaggtggttgcacatctgataacacgcttgatgctcagaatgaccatggacaggctgcaaataactacgaggaacctgatgatgatgttacgcttgcttcactcgttcagaggagtgggagctcatccaagattaaggtacccaagatacggaattcttctaagaagtttgatgaactatgtgatgtgactgaagacatacataattcttctaagaaggttgatgaactaggtgatatggctgaaggcactagggcagttttaagtagatcacgttctgatcactctgttggcagaaaacgtgtccgtgtgatcttatcagatgatgaatccgacgagaatcatgaaaacgttcagtttaaaaagacatcaactagtcctgcagatagtatgtcagtctcagaccatggagcaagcagcagcagaaaccaggatactttacaagttaatcaaacaagggatgcaccctatccagctgaggagagcatttgttcattcaaatcaagtagtcctattgatcatgcttttgaaggcataggattaggtgcttccagtgcaggaaagggaccaacctccaaatcagcagcaagtttttccaagctcagtacacctggctcaaacagtctgaatgaaagccaaaatgctgttggttctcaatccaaagatgctgataatcacttctgggccttcagaatcggcggccatctggtttacttggatggacgtgcttgtgtacatgaaggtgcttttagcattgactctctcaaagttgaagtagcatgtgtatattatcttcagatttctgatgaaaaaagggccaaaggtctattgcctatcattggggagctaaagtttcgtgggaaggtattggaagatgcggtatccatatattatgatgatcagctcgcttctgaacagaagtgtgttgatgttgttattgatgattgggtgccaaagcagctgatgaagttgtatgttgatttctgcatgaagtcattagaagcacccaataagaagctgctgacgaaactatataatcttgaggtctccgaagatgaaatcattgtttctgattgcggactgcaggatatgtcaattgtcccctttcttgatgccctaagatctcacaaaacaatagcagttttggatctttctcataatttactaggaaatcaaacagttgaaagacttcagcatatatttgcttcatcaagtcacacatatggtggcttgactctggatttacattgtaatcgattgggtccaactgctttatttcagatatgtgagtgcgctgttttgactgatcgattggaagtacttaatctatctgggaatcgcctcactgatgcatgcagttcttacctattcacaatcctgaaaaagtgcaaagcttgaatgtcgagcagtgttctatcacgtcaagaactgttcagaagatgacagatgcactccatgaagagtctgtcctttcacatctctcattaggaaagaacaacccaatttctagcaatacaatgcttaaccttctatccaaacttgcatctctcacaaggttttcagaactaagcctgactggtataaaactgaataagttaatggttgataagttgtgcctccttgcacaatcctcgtgcctatcaggacttctgctaggtggaacttccattggaccggtggagacaactaggcttactgaggcattgtcttgtacatctcaagatttcctaaggttggagttgtctaattgtgggctcacaacacctgatttcacacaaatctgtacaaatctctcccggatcaatattcttgagttaaaccttggaggaaatccaattaacctggagggatgtgatgctgtacagcgaatgcttgtaaatccccaatgcagtattagatctctcagccttgacaaatgcaatcttggacttgctggaattgtccgtgtcattcaatcattaccagaaaacagccaattagaggagctgcgcgtgtctaagaacaccaacttggcgttggagacaacaacaaagtatgacgaagacatgcaggaagtatcaacagcttctgagcaaaagcaatgtaatgaccctgaaacaacgaatgatatagctccagggaacatagattttgcgaacatgcaggttccagacagtgaagatgaagcagataatgatgcccaccgtgccagatctggttcacgcaggagctgtgcaagttcatcgcagaaaaactcttactcttcttgtcagatgattgaagaactggcgaaggcccttatttcagcaaagcagttgatggtgcttgatcttagctgcaatggtttgtcggaggaggcagtccagtcactgtattctgcttgggcgtctgttccgagaggcgatggaatggctcggaaacatgtaaataaggaggtggtccacttttcagtggatggtatgaggtgctgcggcctaaaaccctgctgcagaagagacctgcaaatgtgaaccctggacgaccttccgatgctaaattatggttgcactctgtaaataaatcatgagtgaatcaactaggcgttgaagcattgtcaatgcaacttcacactagtcacgatagtttggtgagtaattatgctgattcgcgggaatgtatacactacaatactagatgcttgagatttgggtatgcagttgtttcctgaggtgcagttactccttcgaaatcgtgccgtg

SEQ ID NO: 218453 - DNA, 683 bp, Zea Mays
cgccgcctctgttcaaatcaacagcttggagacgacattgtcttcagagaccctctcaacacattcaagggcctgggaaactacaagaggctcttctgggcgctgcgcctcaccggccgggtcttcttcaaggcgtcgtgggttgaagtggtcagcatatggcagcccgccgagaacagcatcctgcttcgctggaccgcccacggcgtccctcgggtgccctggggctggtgggacggccacgcccgcttcgacggcgcgtccgtgtacaagctcgataggaacggcaagatctacgagcacaaggtgcacaacgtcgctacgaacccgccggccaagtccaaggtcctgccggtccacgagctggtcaggtcactcggttgcccctccactgccgaacccacctgttctgacttctgaagctatcgtcgtcgcagtgccatcttattattcgagaattaattatctgggagaaggataggcgtgggtttaacatggtacctccgaattttgtgttttttcattgtgatttgatagcacacaaagttactgagtactcttggagttgtatatatgtatgtacagtgatagtttataaaataaaggcatgttagttaaggtgtacgacatgtgttattgattgttaaagcatcagtcagcaaataactactctgacatgtttc

SEQ ID NO: 218454 - DNA, 1758 bp, Zea Mays
cttcggttgggaatgtgtgggtgacagtgacccagttaaaccaaccattccatatctgcatgtatagcttcctctcacgcactccgttttgtggatctgatctcctcttgtcccaaacttttgcttcttcgttcgtcgctccaaaagtttcgaaacggagagaaagaggcttgaaaactgagccggccgatcgagtattgtagggcgtcaagagatcgattgatctgggagagagagaaaagggtaaagaaatacttgctggctgctgctggccatggaaactggatgcttcttccagatgtgtttttcaagaagttgttggttctcaacaggaaacaaaaagacatgacatgcttggagtaaacaacagaacaggcggaaaagagacgctgcagtcacatatacagttagaagctcacatcagcaaagatagatcacaaaaaggttctctggacaccgccaaacaatggcccatcagcaggaacaccaaaaccatggacaagccagcaccagtccttctgctgcccgtgccgaaaccgaggcagacaagaaggaaccgagctcctcgtcgtccaactcatcagaaaacacagatgaggacgatttcttccagatagagggcccaatactaggcagcacactgtcattcgctgacaacgcggcgatctcagacactagaaagcagagcagctcatcctcctcgcatccctcaggttcaggtcatgccgccaccgacccaaagcagtcgccgccggtcctgcaggccatgtccagggcgccggcggacgagtgtccggaccccaagaggatcccgtcgtccattttcgcgaggtcgaaatcgaaatcatcgccggcagactggagcgtgacgtcgaatgagtccctcttcagcatcaacgtcgggaacgcgagcttctccaaggaccacttgttcttgtatggcacgtcaggtgagctggggggcaaccccagtgagccgctgccgccgctgccgccgttgccacggcagagccctagctctagccccatgagaagcgaggtggcagcagcgccgaccagtgctggagtgaagcctgctactaccagggttggcgacgatggcgatggcaatgctgattacaacaacagcttgtcgcaccggtctgatgctagcacgacaagcttcgcgttccccatattggcaggtgacgcgaggtctagtgagtcactgaaagacggccctcctgagctcgcccggcaaagcacgtcgcagctaccacagcaggcagagcctcttgttgagcaggaggcaccgaaagctaaagatggggcgctggaagctgagcaagcccctgcccctgcccctgccccggaaccaacaccggcaccagcaccggaatcgacaccacaaccaccagccgcgacaaaatggtttccttgctgttcttgttgtccgttctgttgctgagggatgctgcagtagcctctctccatggggatctgttgagtttctgaagtagaagaaggctggatgcagcaataggctgaagtcaaccatccatgggatttgctagcaacttggttggttctgatcagaaaattacttgctctgagttgtgtagattacaataatgtatgtataattaattttattttgttaaaatgtgacagtagctactagcaagatagaatatggcgccattggccacctccaaagagactcttatattctccttaattgatatgaataaggatttttacaaaaaaaatgctttccaa

SEQ ID NO: 218455 - DNA, 1788 bp, Zea Mays
cagaatattgtgcccatgcaagatcttcggttgggaatgtgtgggtgacagtgacccagttaaaccaaccattccatatctgcatgtatagcttcctctcacgcactccgttttgtggatctgatctcctcttgtcccaaacttttgcttcttcgttcgtcgctccaaaagtttcgaaacggagagaaagaggcttgaaaactgagccggccgatcgagtattgtagggcgtcaagagatcgattgatctgggagagagagaaaagggtaaagaaatacttgctggctgctgctggccatggaaactggatgcttcttccagatgtgtttttcaagaagttgttggttctcaacaggaaacaaaaagacatgacatgcttggagtaaacaacagaacaggcggaaaagagacgctgcagtcacatatacagttagaagctcacagaacagtcagcaaagatagatcacaaaaaggttctctggacaccgccaaacaatggcccatcagcaggaacaccaaaaccatggacaagccagcaccagtccttctgctgcccgtgccgaaaccgaggcagacaagaaggaaccgagctcctcgtcgtccaactcatcagaaaacacagatgaggacgatttcttccagatagagggcccaatactaggcagcacactgtcattcgctgacaacgcggcgatctcagacactagaaagcagagcagctcatcctcctcgcatccctcaggttcaggtcatgccgccaccgacccaaagcagtcgccgccggtcctgcaggccatgtccagggcgccggcggacgagtgtccggaccccaagaggatcccgtcgtccattttcgcgaggtcgaaatcgaaatcatcgccggcagactggagcgtgacgtcgaatgagtccctcttcagcatcaacgtcgggaacgcgagcttctccaaggaccacttgttcttgtatggcacgtcaggtgagctggggggcaaccccagtgagccgctgccgccgctgccgccgttgccacggcagagccctagctctagccccatgagaagcgaggtggcagcagcgccgaccagtgctggagtgaagcctgctactaccagggttggcgacgatggcgatggcaatgctgattacaacaacagcttgtcgcaccggtctgatgctagcacgacaagcttcgcgttccccatattggcaggtgacgcgaggtctagtgagtcactgaaagacggccctcctgagctcgcccggcaaagcacgtcgcagctaccacagcaggcagagcctcttgttgagcaggaggcaccgaaagctaaagatggggcgctggaagctgagcaagcccctgcccctgcccctgccccggaaccaacaccggcaccagcaccggaatcgacaccacaaccaccagccgcgacaaaatggtttccttgctgttcttgttgtccgttctgttgctgagggatgctgcagtagcctctctccatggggatctgttgagtttctgaagtagaagaaggctggatgcagcaataggctgaagtcaaccatccatgggatttgctagcaacttggttggttctgatcagaaaattacttgctctgagttgtgtagattacaataatgtatgtataattaattttattttgttaaaatgtgacagtagctactagcaagatagaatatggcgccattggccacctccaaagagactcttatattctccttaattgatatgaataaggatttttacaaaaaaaatgctttccaa

SEQ ID NO: 218456 - DNA, 1831 bp, Zea Mays
aggaagtctagtttgccacctttaatttagatccatgatgagataaaaacaaatgtggaacttgatttgtcagaatcgtgcagaactgataatggcattgttgccatacctgttcgtgcctattcatacggtaaaggtttgccctatgctcctgaaaattggccacgtcatggagacatatggcactggaaagttggaagcagggcttctggagcaggccattgggctgacaggtatattatgccgccatcccgttttcgtggcgctgctcctaagaagttaggatttgcaagtagaggatttgcaagtaggttacaagttgaggaattcgttaagagagaatttccggatgttgatcctagcacattcttttctatgtttatctggaagatccctgctgaaggatacaggatccaaaaaggcacccgacaagtgaggatccatgaacctgaacctgtggtggctgatccgggtggtctctgcaaggctaggaatagcttgtgcaatcttcaaagggaaggttttgttgaatcatcaccagcacgggtttgtaatatctgctgcaaagagcctggtttctgtcgtgagtgctgctgccttctctgtaacaggaccgttgattattctcttggaagttacagctgcataaaatgtgaggcagttgtggaagagaacttaatatgtgggcattttgcacaccttgaatgtgctcttcgatgttacatggctggaactgttggaggaagttttggcttggatgtccaatatttatgcaggctctgtgataacaaaaccaacttaatgacacatgtggagaaactcatggaaacatgccaatctcttgaatctagggaccaaatcaaacctatgctgaatttgggattatgcctcttgcgtggatcaaaacaaatgagagcaagaaacttggagaaccatatgagatcagcaatggaaaagctggaatgtggatttgattttgttgaagtctggaaattggaaggtgacgagggcaggacaacactcaatgcaggagagaattccccaaccaccaatggtgtgactgtgcttggggctcggcaagttcctgaagcgggtgcacttacagggcatcctgatctgatagatccactggttgataatgacttcgagacggttatagaaaaccttccagtgttcattactggagatcagaatgccgcgtctgctaaatttgaggatgagatagatcttgctcttcaagaactgaaaaaatctcaggaagcggaatatagcgtggcggagcagaagctttacgcccagaaagaccacatcctctgtctgtacaggcagcttgacgctgaaagggctgaacttgcagatcccatgcccttgtctgatgcttcaaattatggtgcgatgctcgctaatgttctaagccgcgtggaccaagtcaagcgtgaggaggagaaatttaggtctatgctgaaagttgctggcggatttgcgaaagcaccacaaagcgtcaccagggagatgttcggattacctgctgataagtagttgtaatagcagacttgcttggaacttaactatctgtagtttaccatagaaccaaacttggctgtgttgttatagctgtatgagctgtacatcctaccgacgggttaccccataaagactggtttggatgaaaccagcaagtgctgcggatgcgcaggttctctatggacctgcttgtactaactactaagattcgttaaatgtgacattctaaatggaccgaacctggacctccacattttccttaccaggcgataattatgttacactcgtctaacctgtgttttgtcga

SEQ ID NO: 218457 - DNA, 2505 bp, Zea Mays
aatcgtaggttagctgggcggattgctccgggtatgagttggtttcgtaatctccatccggatcagcgcagccggagctcaaaggtgcctgtggagtttattacatcaagaattttgggttcgacataatccccatgtcccccaataagtccggccatgcttcaggccgtgacgcggttttctggtccgatagaatgaacgaatatcttattgattcgctgcttcaccagcaagccattgggaacaggagtgagtccaaattctcatcggtggcatatgatagcatcatcaccggtgtgggtgagaggtttggcgtggtgatcgaccggaacaatataaaaaatcgcctaaagcatatcaaggaatcgttcaatgaatgtaggaacctccttggtgaagataatcggtttaggtggtgcccagagagcagaagattcaatgccgacccaaatgtttggagggagttgatcgagagaaaaccagaagcaaagaaatggatgatgaagacgattgaccattatgatagcttaatggatctatttggtaagaatagggagaaacgtcaagacgttgagaactcaaaaggtacctcgaagaaaaaggcgcgaacagaaccgccaaaggagatacttcaacgtactccattaaatcggaaggggtcagctcttgccgaaagttcagataagacggtggacaaatgtgagatccatgatgagataaaaacaaatgtggaacttgatttgtcagaatcgtgcagaactgataatggcattgttgccatacctgttcgtgcctattcatacggtaaaggtttgccctatgctcctgaaaattggccacgtcatggagacatatggcactggaaagttggaagcagggcttctggagcaggccattgggctgacaggtatattatgccgccatcccgttttcgtggcgctgctcctaagaagttaggatttgcaagtagaggatttgcaagtaggttacaagttgaggaattcgttaagagagaatttccggatgttgatcctagcacattcttttctatgtttatctggaagatccctgctgaaggatacaggatccaaaaaggcacccgacaagtgaggatccatgaacctgaacctgtggtggctgatccgggtggtctctgcaaggctaggaatagcttgtgcaatcttcaaagggaaggttttgttgaatcatcaccagcacgggtttgtaatatctgctgcaaagagcctggtttctgtcgtgagtgctgctgccttctctgtaacaggaccgttgattattctcttggaagttacagctgcataaaatgtgaggcagttgtggaagagaacttaatatgtgggcattttgcacaccttgaatgtgctcttcgatgttacatggctggaactgttggaggaagttttggcttggatgtccaatatttatgcaggctctgtgataacaaaaccaacttaatgacacatgtggagaaactcatggaaacatgccaatctcttgaatctagggaccaaatcaaacctatgctgaatttgggattatgcctcttgcgtggatcaaaacaaatgagagcaagaaacttggagaaccatatgagatcagcaatggaaaagctggaatgtggatttgattttgttgaagtctggaaattggaaggtgacgagggcaggacaacactcaatgcaggagagaattccccaaccaccaatggtgtgactgtgcttggggctcggcaagttcctgaagcgggtgcacttacagggcatcctgatctgatagatccactggttgataatgacttcgagacggttatagaaaaccttccagtgttcattactggagatcagaatgccgcgtctgctaaatttgaggatgagatagatcttgctcttcaagaactgaaaaaatctcaggaagcggaatatagcgtggcggagcagaagctttacgcccagaaagaccacatcctctgtctgtacaggcagcttgacgctgaaagggctgaacttgcagatcccatgcccttgtctgatgcttcaaattatggtgcgatgctcgctaatgttctaagccgcgtggaccaagtcaagcgtgaggaggagaaatttaggtctatgctgaaagttgctggcggatttgcgaaagcaccacaaagcgtcaccagggagatgttcggattacctgctgataagtagttgtaatagcagacttgcttggaacttaactatctgtagtttaccatagaaccaaacttggctgtgttgttatagctgtatgagctgtacatcctaccgacgggttaccccataaagactggtttggatgaaaccagcaagtgctgcggatgcgcaggttctctatggacctgcttgtactaactactaagattcgttaaatgtgacattctaaatggaccgaacctggacctccacattttccttaccaggcgataattatgttacactcgtctaacctgtgttttgtcga

SEQ ID NO: 218458 - DNA, 2567 bp, Zea Mays
gacgttttaccgtgtaacatcgccgtcccttttccaccatctactatagaaccaaacgacaactgacgccacttcgagtcgcgcccggcgtccccaactccaccgacgccgagcacaaccgttgtttccggctggtcctccactggccgctcctcagtcagtcccggattctcccttgggtctggagtggaatggaggttaatccgatcatggggtgatttcctcttttaactggatcagcgcagccggagctcaaaggtgcctgtggagtttattacatcaagaattttggcaagccattgggaacaggagtgagtccaaattctcatcggtggcatatgatagcatcatcaccggtgtgggtgagaggtttggcgtggtgatcgaccggaacaatataaaaaatcgcctaaagcatatcaaggaatcgttcaatgaatgtaggaacctccttggtgaagataatcggtttaggtggtgcccagagagcagaagattcaatgccgacccaaatgtttggagggagttgatcgagagaaaaccagaagcaaagaaatggatgatgaagacgattgaccattatgatagcttaatggatctatttggtaagaatagggagaaacgtcaagacgttgagaactcaaaaggtacctcgaagaaaaaggcgcgaacagaaccgccaaaggagatacttcaacgtactccattaaatcggaaggggtcagctcttgccgaaagttcagataagacggtggacaaatgtgagatccatgatgagataaaaacaaatgtggaacttgatttgtcagaatcgtgcagaactgataatggcattgttgccatacctgttcgtgcctattcatacggtaaaggtttgccctatgctcctgaaaattggccacgtcatggagacatatggcactggaaagttggaagcagggcttctggagcaggccattgggctgacaggtatattatgccgccatcccgttttcgtggcgctgctcctaagaagttaggatttgcaagtagaggatttgcaagtaggttacaagttgaggaattcgttaagagagaatttccggatgttgatcctagcacattcttttctatgtttatctggaagatccctgctgaaggatacaggatccaaaaaggcacccgacaagtgaggatccatgaacctgaacctgtggtggctgatccgggtggtctctgcaaggctaggaatagcttgtgcaatcttcaaagggaaggttttgttgaatcatcaccagcacgggtttgtaatatctgctgcaaagagcctggtttctgtcgtgagtgctgctgccttctctgtaacaggaccgttgattattctcttggaagttacagctgcataaaatgtgaggcagttgtggaagagaacttaatatgtgggcattttgcacaccttgaatgtgctcttcgatgttacatggctggaactgttggaggaagttttggcttggatgtccaatatttatgcaggctctgtgataacaaaaccaacttaatgacacatgtggagaaactcatggaaacatgccaatctcttgaatctagggaccaaatcaaacctatgctgaatttgggattatgcctcttgcgtggatcaaaacaaatgagagcaagaaacttggagaaccatatgagatcagcaatggaaaagctggaatgtggatttgattttgttgaagtctggaaattggaaggtgacgagggcaggacaacactcaatgcaggagagaattccccaaccaccaatggtgtgactgtgcttggggctcggcaagttcctgaagcgggtgcacttacagggcatcctgatctgatagatccactggttgataatgacttcgagacggttatagaaaaccttccagtgttcattactggagatcagaatgccgcgtctgctaaatttgaggatgagatagatcttgctcttcaagaactgaaaaaatctcaggaagcggaatatagcgtggcggagcagaagctttacgcccagaaagaccacatcctctgtctgtacaggcagcttgacgctgaaagggctgaacttgcagatcccatgcccttgtctgatgcttcaaattatggtgcgatgctcgctaatgttctaagccgcgtggaccaagtcaagcgtgaggaggagaaatttaggtctatgctgaaagttgctggcggatttgcgaaagcaccacaaagcgtcaccagggagatgttcggattacctgctgataagtagttgtaatagcagacttgcttggaacttaactatctgtagtttaccatagaaccaaacttggctgtgttgttatagctgtatgagctgtacatcctaccgacgggttaccccataaagactggtttggatgaaaccagcaagtgctgcggatgcgcaggttctctatggacctgcttgtactaactactaagattcgttaaatgtgacattctaaatggaccgaacctggacctccacattttccttaccaggcgataattatgttacactcgtctaacctgtgttttgtcga

SEQ ID NO: 218459 - DNA, 2308 bp, Zea Mays
cagtcttagaggtaaagcaaattcctctgcattcccgccattccctcccgacccttcaaaaaactcaaacctaaccgtgcatctccaagctaggcaaagaattcctctgcctcgccctccgtccctcaccgttcatgtccgtgtctgcctgccctccgtcggagcaggcagcagcacgcgttccccgccgcggccatgggccagtgctgctccaagggccagtgctgctccaagggcgccgaggcggcggcggcagcaaaggcgaacgcaccaatccgcggcgcgtccgcgagcaacgccgacggccaacgtccgtcgtcatcgtgcgcggcgcctggcggtggcggtggaggcggaggcggcgcgacgaagccggcctcacccaccggcggcgccagggccagcaaaccggcggcggccgccgtgggcacggtgctgggccggcccatggaagacgtgcgcgcgacctacacgatgggcaaggagctggggcgcgggcagttcggcgtgacgcacctgtgcacgcaccgggcgagcggcgagaagctggcgtgcaagacgatcgcgaagcggaagctggcgggcaaggaggacgtggaggacgtgcggcgggaggtgcagatcatgcaccacctctcgggccagcccggcgtggtgtgcctccgcggcgcgtacgaggacaggcacggcgtgcacctggtcatggagctctgcgcgggcggcgagctcttcgaccgcatcatcgcccggggccactacacggagcgcggcgccgcggcgcttctgcgcgccatcgtgcagaccgtgcacacctgccactccatgggggtcatgcaccgcgacatcaagcccgagaacttcctgctgctcagcagggacgaggacgcgccgctcaaggccaccgacttcggcctctccgtcttcttcaaggagggcgagccgctcagggacatcgtcggcagcgcctactacatcgcgcccgaggtgctcaggaggaggtacggccccgaggccgacatctggagcgtcggcgtcatgctctacatcttcctcgccggcgtgcctcccttctgggcagagaacgagaacggcatcttcaccgccatcctgcgagggaagcttgacctctccggcgagccatggccgcacatctcgccgggagccaaggacctcgtcaagaagatgctcaacagcaaccccaaggagcgcctcacggcgttccaggtcctcaaacttgtagatcacccatggatcaaagaagacggagacgcaccagacacgccacttgacaacgttgttctcgacaggctcaagcagttcagggccatgaaccagttcaagaaagctgcactgaggatcatagctgggtgcctatccgaagaggagatcacagggctgaaggagatgttcaagaacatcgacaaggataacagtggcaccatcacgcttgacgagctcaaacaagggttggcaaagcatggacccaagctgtccgacagcgaaatggagcagctaatggaagcagccgatgctgacggcaacgggttaatcgactacgacgagttcgtcaccgcaacggtgcacatgaacaagctggaccgagaagagcacctctacacagcattccagtactttgacaaggacaacagcgggtacattactaaagaagagcttgagcatgccttgaaggagcaagggttgtacgacgccgacaaaatcaaagaggtcatcgcagatgcggactccgacaacgacggaaggatagattattcagagtttgtggcaatgatgaggaaagggacagctggtgcggagccaatgaacaacaagaagaggcgagacatagtcctatagtgaagcagcaagtgtgtaatgtgtataggagctcaagcaagcaaatttgtgtatcagtacacagatgcaatggagctacttttacggcttagttcaccgatggctgtgtacattgggccattgtttgcggggggttttaatgctacgcatacttagggactgagaaagacatggacgagttcatgatgcgtgcagatcagtctggaagtcctggaccaaatagagagaaaacaataggatgacgattcagcaaatgcgtatttgttgcatccactgtgaccatctaagaaaagcatgtgcatatttcataagactacagttggcatttattactctcattgtccttgcacaaaagcagatgacacatttgattatttgaatgaaggaacaacatgcaacaagatcaactgataaggtaaccatatgacagaacacacaatggtgtcaatttatc

SEQ ID NO: 218460 - DNA, 2315 bp, Zea Mays
ggaattctgccttcttctctcatcttcctgctcaacatcagtagcagctttagctgtagcagcgccaccggccaccgccacgccatggccaccacgttgcacaagccccttggggcgatcaccgttgacgacctcgccgcggcggcgcctgggtcggacgccaccgcgctccacgcagcgctccggcgcgcgctcgactcgcacggacccaccgaagtgtggggcgagctctgccggtccgtgctctgtccgtctgtccccttcgccgtccaccggatgctctactacggttgcttcgccgggttcccgtcccccacgccgccggcctggacgcccgaccccaaggagtctgtcttgaccaatgtcggccgtgtcctcgaggcgcgtggtaggaacttgatcggcgacgcgtacaaggatcccatcaccagcttcccagacctccacaagttctccaacgagaacccagaggcgtactggaagatggtatttgaggatatgggtatccaattcagcgtagagccatcctgcatctggagagagaacactgcatatcctggtggcgagtggctaccaggcgccgagctcaacgctgctgttaattgcttgactgctaaacccgggaggagctccgacggtccggccattgtatggagggatgaagggaaggactctgatcctcttaacttcatgtctttggaggacttgaggaagaaagtttgcctagtggccaatgcaattgatgccctggaactgccgaagggatctgcaattgctattgacatgcctatggatgtcaatgctgttgtgatctaccttgcgatcgtgttggcgggatatgtggttgtctcaattgcagacagttttgctgcacctgcaatatcaatgaggttgaagttatcagaagcgaaggcaatttttactcaggattacatccttcgtgatgacaaagaactaccattgtacagtagagttgtggaggctaaggcccctatggcaattgtgattcctgtaagggggtctttgctaataaagggactacgtgttgatgacctttcctggcaagatttccttggaagggttaattataccgaggctgaaaattacactgctgttaaccaacctgcctatgcattcaccaatattctattttcatcagggaccacaggatgctaaggtaacaatgcttggactggtacccagcatcgttcgtacttggaagaatacggactgtacagctggactagactggtcctccatccgatgctttagctcctctggggaggcatccagtgtggatgattatttatggctgatgggaagagctggttacaagccagtaatcgagtactgtggaggcacagagattggtggtggatttgttactggatcgatgctacaacctcaagcgttgtctgcattcagcacacctgccatgggttgtaacctgttcattcttgatagcagtgggaatcctttgccacaagactctgtcggcattggtgaacttgcacttgatccaactttatttggatcatcaacaacacttctaaacgctgatcatcaggaggtttacttcaacggaatgccagaatggcacgggaaaatcctccgcaggcatggagatgaatttgagcgtacttctgacgggtattatagagctcatgggcgtgcagatgatacaatgaaccttggtggaattaaggttagttccattgagatcgagaggatctgcaacagagtacatgacgccatccttgaaacagcagctatcggggttccacctgtagggggtggccccgaacaactaaccatagccgtcgtgttgaaggaccagagctctcaaatagaggacttgaaccagctgaaactagcatgcaacatggctctgaagaaactgaaccctctcttcaaggtttcctccgtcgtcatcgtcccgtccctccctaggaccgcctctaacaaggtcatgaggagagtccttcgcaaggagttcagccaggccgcccaggcaaagcattcaaaaatataggtagttattagaaataattagtgttttctgctgcaaatgcacctgcagaaagagtaaaacaccaaactgggcatatcgggaagtcctgttgtttgccaccaaaacggataaatgagatgtacttagatttcgggaaataagggagctgtattcctgccaacgttcagcactcacttgatgtgctgcactaataaaacactaatgcaatcacttgcattagatcacagtctgaactctaagggcttgttcgtttacgtcggattgcacctggaatcgttccagc

SEQ ID NO: 218461 - DNA, 1419 bp, Zea Mays
gtttgataattttgtcagttctgacatgtctcgcccatatgcaattattaggggagcccaaagcaattccatggacacatataacacccctaaaggcagctgccgatggatggtgtcacatggatattcgtaaaggagatgttgttgcttggccaacgaatcttggttggatgatgggcccttggcttgtttatgcctccttgctgaatggagcttccatggctctgtataatggctccccaaatagttcaggctttgcgaagtttgtacaggatgctaaggtaacaatgcttggactggtacccagcatcgttcgtacttggaagaatacggactgtacagctggactagactggtcctccatccgatgctttagctcctctggggaggcatccagtgtggatgattatttatggctgatgggaagagctggttacaagccagtaatcgagtactgtggaggcacagagattggtggtggatttgttactggatcgatgctacaacctcaagcgttgtctgcattcagcacacctgccatgggttgtaacctgttcattcttgatagcagtgggaatcctttgccacaagactctgtcggcattggtgaacttgcacttgatccaactttatttggatcatcaacaacacttctaaacgctgatcatcaggaggtttacttcaacggaatgccagaatggcacgggaaaatcctccgcaggcatggagatgaatttgagcgtacttctgacgggtattatagagctcatgggcgtgcagatgatacaatgaaccttggtggaattaaggttagttccattgagatcgagaggatctgcaacagagtacatgacgccatccttgaaacagcagctatcggggttccacctgtagggggtggccccgaacaactaaccatagccgtcgtgttgaaggaccagagctctcaaatagaggacttgaaccagctgaaactagcatgcaacatggctctgaagaaactgaaccctctcttcaaggtttcctccgtcgtcatcgtcccgtccctccctaggaccgcctctaacaaggtcatgaggagagtccttcgcaaggagttcagccaggccgcccaggcaaagcattcaaaaatataggtagttattagaaataattagtgttttctgctgcaaatgcacctgcagaaagagtaaaacaccaaactgggcatatcgggaagtcctgttgtttgccaccaaaacggataaatgagatgtacttagatttcgggaaataagggagctgtattcctgccaacgttcagcactcacttgatgtgctgcactaataaaacactaatgcaatcacttgcattagatcacagtctgaactctaagggcttgttcgtttacgtcggattgcacctggaatcgttccagc

SEQ ID NO: 218462 - DNA, 7875 bp, Zea Mays
ctaaaagttatttttagactgactccagtctgagtgagcgaagagccacagagaggagagagcacaccatccgatcacgcctttctccgtcttcctttggtcggtggggtcgactccgcctcctcacccgcaaaacccctcgtgttcgcgagacgatcagacgaggcggtcagggagggggaggtagaatagggtttcggcagggccgtgccgggccgcctcctgctgaccttcctcctccagcgccgtgcaagcactcccgtccctgccaagccctagctagggtagctggtgcagcggattccaggacccacaaatctcttcttctcaacccattgccggtggagcgtggctgaggtagtggcctcgggttgttggggttcgggctcgccggcgattttgggggacgagttcgctgccggtgccgcgggcgggggcgtgattcgcacctcggaggaacaaacggttgaactgacccaggtgttgatctgctgctgctactactgatccatggctaatacccggtcaggaggaggaggagatgcccctccccccccttcttctcctccagctgctgcttctgcaactgccacaaggaagcttgccgatggaagggagaccaggaacaccgcagctgccagtgctcacacaccaaacctcaggaggtccactcgagaaaacaaaggaaagcacaaatctagacttgctgacacaccaccccttcacagatctgctaaaacgcccaccaaggatgccactgcaattgctacccccaaatccacacccttgccaaacaaccccaaagactcaacaaaaaagccctccagagttaggaacacaagtgtttcaccttctccttcaaaacaagaacctaatgaaacctcaacgcccgcctccaccaaaagaaaaacccaagatgatgctctgactgcctctacaccgtccaagaagcagaaaaggctcctgcatgcgaagagctacattgcactcttcaatataggagaagaatctgtgcttgctaccctcagggaggatgaggaaaaagcttctgaggtgcaaccggaaggagatggtgctgttttggtgcatgaagaaagtaatgcaccggaacaacccaaccaggaagcttcaaatgttgttgctagtgaggtcttgggaggtcactcttctgacttgcatgaaattgaggtgatattggagggagatggattgaagattggatcccatcagtctgatgttgttttagagcgttgcattcttactgagacgcgctcactaaataaggcagtggaaagcatccccatgttggaaactggagagcaagctactggtggttcaaaccagaaacctctactagaattgccaaatagcgcttgctctactgctcatcatgaagaggccagcaagtcggtggaagatggtaattctattgggattcaaggtgcatgcacttcaaggaatactgaagctatccaatgtgatgaaacatggtatgatgacaacatttgtgttgtttgcagaagtagggaaatctcagatatcctgaagtcttgtggtggaaaaggatgtaaacgacattaccatctttcgtgtatggatccttccttggacgtgtccctaggaatatggctttgcataatgtgtatgaaaaagaggattcagtttggtgtatattcagtcagcgagggaattgaatctttatgggatgtcaaggaaggagtggtgaacagcaagcaatatttcgttaagtataaaaatcttgctcatgtacataaccagtgggtttcagaaagtgatatagttgatagcaccccgcaaggttctgatcttatctccaaagttagcaagaagattcataaagaaaagacaataaggtggaagcaggaatgggctgaaccacaccgtctgttgaagagaagattgcttatgcctcaaaaagaagccgaagttttttttaattcactaggtgataaatttgtatactgtaatgtcgagtggctagtgaaatggaaggatctgggctatgaacatgctacatgggaactcgagtcctcatcctttttatgtactcctgaggccgaggagcttaaaaggagctatgaggaccgctttaaaactgcaagaaaagcatctgatccttcaaaagtagacaaggctaagggggggatatttcagcaactcgagagactgccagatggttgccctcctggtttagacgatgaccatttgagatcacttaaccagcttcgtgagttctggcacaattcttgtggtgctattttcatcgatgatcaggagcgagtaattaagaccattctttttgtggcatccatactgcctcacatctgtcaaccactcctcattgtgtctactactactactctctccttgtgggagactaaattcaatcgcttggcagcatccatcaatgttgttgtgtacaatggagagaaagatgtacgcaaatcaatacaagatctggagttttatcaggatggttctgtgatgttgcaagttctcttgtcccaccctgatgccatcttagaggacatcgaagtgattgaacgaattaactgggaagcagttatagtcgatgattgccaaaactctagagtttcaaaatggcttgaacaacttaggagacttcctaccaattttaggatggttctattgagttcctcactaaaggaaagtattgctgagcacatcagtctgctgtcttttctcaaccctgaagaaaatggtacattgagtgtttcaaatggtgtttcttttgatacagctggcactctagttgttctgaaagaaaaacttgcacgttatgttgcctttgagcggaagacagattcatcaaagcttttagagtattgggttcctgcccgcctttcaccagtgcaactagagatgtactgttacatattactatcaaactccccagcccttagatcacattctaaaacagatagtgttggtgctcttcgcaacattcttatatctcttcggaagtgttgtgatcacccttatcttgttgatcaatcgctgcaaagcacacttaccaaggatcaccctgtaactgatatccttgatattggagtgcgttcatgtggcaagttgctgcttcttgacagaatgctccaacagatcaggattcaaggtcttagagttcttattctttcgcagtctggtggtgaatctggcaagcctatgggtgacattttggatgactttgttcgtcagagatttggttatgagtcatatgaacgtgttgaacgtggattgctactgcaaaagaaacagacagcaatgaatatgttcaatgacaaaactaaggggcgatttatttttttaattgatagtcgtgcatgtggtccaagcatcaaactatcatctgttgatgccatcatcatatattgtagtgactggaatcccatgaatgacttgagagcccttcagagggtcagcatggagtcacagtctgaacctgtgcctatttttcgtttgtactcgtcttttacagtggaggaaaaagctcttattcttgcaaagcatgaccatattttggatagtaatattgtgaatataacccctagcctgagccattgtctgctcagttggggcgcatcatttctcttcaatagacttgaggagttgcagcaacatagctactcaaatgtctctggtgatgagcttttcatggataatgtagatttggagtttttgacaaaattactcagcaaggttgaactcagaactgaatcaggcaatacagccatatcacaagcttatctgtgtggatctttctattctagggctattgttgtagcgggtgagagggagggaattccatcagttgatggtgacctgccaaagttctgggcctactggttaagtttacttaatgggaggtctcctcagtggcagtatatatctgagccagtacaaagaagccgtagaaagataaataacatggaacaacaattgaaaaacacagacaaacagttgaaaataactactgaagaaactgatgaagccagagtaaagcgtagaagaattggtgaaatcatggattcatctgcaatagactcacctggcaaaaacaaggacaccatattgccaggaaacaataccccacctagttctcatcaaatatcagttgaagatacatggcaggaactagagcgaagcaatcttcatgccacacaaaaaggtctacacgttcaactcaagccagagatttcgaagttatataagttgctgcaactgccggagaaggtgaaatccttatgtgaggaatttcttgagtatattttgaagaatcaccaaatcagccaggagcctaagggcatactgcatgcattcaatttggctctgtgttggcgtgctgcttctctctcaaagcataagatcaatcacacagaatcactcgcacttgctgtaaaaaacttaaactatgagtgcaaagaagaacttgttgattttgtttatgggaagctaaagatccttaagaagaagtttgcacgtagagcaggggaagtgagcaagcaaaactatatggtttcagtgagcgacatatcaacttgtgaacaggtcacttctgttagattgagaaatgatgagttagtccctagccaggtaactttaactgatggtaactttgagaatggttcacatcacgaggctacaggtgacttttggaccgaggagatggtttcgggagagaaagaactgctacctgacccagtaactcatgaaggggaacacttattgagggatgaacttctcagcaaaataatggacaaaagaattaaattagttgacaaagttttctctctgagaggaaggagtatctatgataagcattcaaatcaggtttcatttttagacatgcataggcaaaaggtagtggataaactcagaagagcatgcagtttagttgtggagcatctacgtagtagtcaaaatcacattgctcaagaggacagagatgggaaaataaagctaataattgaatggtttactatgctgctgtatgcttttctggaacacatgaaatgccaacgtaacaggcttgatatgcagcaatcagcttccaggatcaaggagtctcaattgaaggaagaaacccttcaggcagcaagatgtggccaattagatcaaaattttgatcaacatattccttcaccagattttgaatttgctatggaagaatttaggcacttcagggaagtagttggtagctgctatgttgatccagctgctctggtaccagagtctttggatgacaattcagcaatggaaattatgttggttcaaagcgcaactgatgctgaagtcatcgaagaagtgctaaatcgacctactgaagttcttgttcaaggtccagcatcagaagttgttggtccatcagttgatgtgatttgcaattgttctgatggcatcaactcccaaagagatgcatctctggctgttcattcattggaaccttcaagtgacgaccttagaagtactgaccatgttgaggagaacacagttggctcacaaatacagggtggtacaagcaaacatttaggtgatgctgcaatggaagttgaaactggaaacaggaacactgctttggctgattcacctcactttgacaaaccagctttgactgctccatccaggcaggcaacattgctggtttctcgagaaaccgagatgctgagcaatcttgtggaccaatgtgcacaacagagtttagtgtcagcacaacctttgcaggatgagtcggaacaagcagatttgtctagtgcagcatcaactcaacccttgcaatctgagaggcaacaattaatctctgtttccaataatctgcttgaaagagcacagcttgatcagagtcaaccaaattatcagacagatgcggcacctggttgtgcgcagtctacagaactctttccagtgacgtcaatgatgtttaatcacgcacctattgattctgaaccactgaaaaatgagttgcacaaattacgattacacatggacacactcaataaagtccatgaaatgaagaaaacccaacttcagaccgcatgtagccaagaactagagaaggtaaagagaaaatatgatttgttaattaaagaacatgattccactcatcttcagcaaaagaaggcacttggtgatttttatgagaaagttcagcgcaaccaatcgctggctgaggattttcgggccaaattcatatcactgtctgcagcacaaggtgcagcaaaaggccatacccctccagttcgtcacacacctcaggctacccaagtggtgtcctccacatcatcaattgccctgtcatcagcttgtcgaccaccagtgccgaggcctagggttcaagctccacaggtggaccaaccattattgtcattgtcgcagttctcccgtccgtctttgcaagtggtccaacctcccaacctggaactaggcaatcttttcagagcaacgtcaacgactcttagtcatatgccacctcaacgtgggagctatggagttcagagtgaattggctcctcgctcacctgctcctcatcttcagttcagatcgccacgggcacattccatggcacctggaaatcagcagcaatcgccagcaattagtgtggatgcaatgtcctcaaggacacaaccagtgctggcggcaagcacatccccatcagatatacatgtgggacccctagcagcctcagccttgtcaagtttacactctgttctcccttcaacctcattaccctcaagcttgcatcctagtcacctggcacaacgtgtgccaccaactcctaacccaactttacaagccggggcaccgaaaggctcgaatgcaacaatgccttccatccctacaggcatgcagctgccagattctggttccctatcgctggatgcatggcttacagctaatcttgggttgaatgatgcgtctacagctcctgctaaggatacagccagtcttgggttgagcagtgatgcccctagggcagctcctgatacaaatacggccagtcttgggttgagcagtgatgtgcctaggggtacggctcctgctacaaatacagccagtcttgggttgagcagtgatgtgcctaggggaacgactcctgctacaactacaaccagtcttgggttgatcagtgattcacctagggtgattgctcctgccagcagtaattcgcctggggcgattgcttctgctacaaatggtggttccgagatagatgtggtatgcctgtcagatgatgaatgatgctagcacgtgtacaaggctgacagttatagatgactgcttgaaaggactaggcattattttacggctcccttgagtccgttctgacaaggtgggaatgttgtttgtgctgtgaatggctggtaacagcaatgacagttttattaagttcattgtaaatgtgtattatgacaaatgcctgccaacgtttgctgtaaatcgctaacctctggggaatgtggatattaacctctgagatggagttgggtttcaagcgctatgaggtttctgtacatgtttgtcattgattagttccctgaggtgttcgttgtaggccggagtgctagctccgtgtatcgttttggttctacgtatgtttcttttttttagtttgacttaaaaaaacagtagcaacaaaaaacagtagcaacatctccatgatagttattatgtataataaatgctgaaattttcttgtatatatttgattgaaacggcgggagtatgtaacagagcaatttagaccaaggcggtcacttcaacgttgtattgtatttctcttcttggtgaaatacggcagcactgtcctatgttaagttttatatctatatagctagctat

SEQ ID NO: 218463 - DNA, 6575 bp, Zea Mays
agagccacagagaggagagagcacaccatccgatcacgcctttctccgtcttcctttggtcggtggggtcgactccgcctcctcacccgcaaaacccctcgtgttcgcgagacgatcagacgaggcggtcagggagggggaggtagaatagggtttcggcagggccgtgccgggccgcctcctgctgaccttcctcctccagcgccgtgcaagcactcccgtccctgccaagccctagctagggtagctggtgcagcggattccaggacccacaaatctcttcttctcaacccattgccggtggagcgtggctgaggtagtggcctcgggttgttggggttcgggctcgccggcgattttgggggacgagttcgctgccggtgccgcgggcgggggcgtgattcgcacctcggaggaacaaacggttgaactgacccaggtgttgatctgctgctgctactactgatccatggctaatacccggtcaggaggaggaggagatgcccctccccccccttcttctcctccagctgctgcttctgcaactgccacaaggaagcttgccgatggaagggagaccaggaacaccgcagctgccagtgctcacacaccaaacctcaggaggtccactcgagaaaacaaaggaaagcacaaatctagacttgctgacacaccaccccttcacagatctgctaaaacgcccaccaaggatgccactgcaattgctacccccaaatccacacccttgccaaacaaccccaaagactcaacaaaaaagccctccagagttaggaacacaagtgtttcaccttctccttcaaaacaagaacctaatgaaacctcaacgcccgcctccaccaaaagaaaaacccaagatgatgctctgactgcctctacaccgtccaagaagcagaaaaggctcctgcatgcgaagagctacattgcactcttcaatataggagaagaatctgtgcttgctaccctcagggaggatgaggaaaaagcttctgaggtgcaaccggaaggagatggtgctgttttggtgcatgaagaaagtaatgcaccggaacaacccaaccaggaagcttcaaatgttgttgctagtgaggtcttgggaggtcactcttctgacttgcatgaaattgaggtgatattggagggagatggattgaagattggatcccatcagtctgatgttgttttagagcgttgcattcttactgagacgcgctcactaaataaggcagtggaaagcatccccatgttggaaactggagagcaagctactggtggttcaaaccagaaacctctactagaattgccaaatagcgcttgctctactgctcatcatgaagaggccagcaagtcggtggaagatggtaattctattgggattcaaggtgcatgcacttcaaggaatactgaagctatccaatgtgatgaaacatggtatgatgacaacatttgtgttgtttgcagaagtagggaaatctcagatatcctgaagtcttgtggtggaaaaggatgtaaacgacattaccatctttcgtgtatggatccttccttggacgtgtccctaggaatatggctttgcataatgtgtatgaaaaagaggattcagtttggtgtatattcagtcagcgagggaattgaatctttatgggatgtcaaggaaggagtggtgaacagcaagcaatatttcgttaagtataaaaatcttgctcatgtacataaccagtgggtttcagaaagtgatatagttgatagcaccccgcaaggttctgatcttatctccaaagttagcaagaagattcataaagaaaagacaataaggtggaagcaggaatgggctgaaccacaccgtctgttgaagagaagattgcttatgcctcaaaaagaagccgaagttttttttaattcactaggtgataaatttgtatactgtaatgtcgagtggctagtgaaatggaaggatctgggctatgaacatgctacatgggaactcgagtcctcatcctttttatgtactcctgaggccgaggagcttaaaaggagctatgaggaccgctttaaaactgcaagaaaagcatctgatccttcaaaagtagacaaggctaagggggggatatttcagcaactcgagagactgccagatggttgccctcctggtttagacgatgaccatttgagatcacttaaccagcttcgagcgagtaattaagaccattctttttgtggcatccatactgcctcacatctgtcaaccactcctcattgtgtctactactactactctctccttgtgggagactaaattcaatcgcttggcagcatccatcaatgttgttgtgtacaatggagagaaagatgtacgcaaatcaatacaagatctggagttttatcaggatggttctgtgatgttgcaagttctcttgtcccaccctgatgccatcttagaggacatcgaagtgattgaacgaattaactgggaagcagttatagtcgatgattgccaaaactctagagtttcaaaatggcttgaacaacttaggagacttcctaccaattttaggatggttctattgagttcctcactaaaggaaagtattgctgagcacatcagtctgctgtcttttctcaaccctgaagaaaatggtacattgagtgtttcaaatggtgtttcttttgatacagctggcactctagttgttctgaaagaaaaacttgcacgttatgttgcctttgagcggaagacagattcatcaaagcttttagagtattgggttcctgcccgcctttcaccagtgcaactagagatgtactgttacatattactatcaaactccccagcccttagatcacattctaaaacagatagtgttggtgctcttcgcaacattcttatatctcttcggaagtgttgtgatcacccttatcttgttgatcaatcgctgcaaagcacacttaccaaggatcaccctgtaactgatatccttgatattggagtgcgttcatgtggcaagttgctgcttcttgacagaatgctccaacagatcaggattcaaggtcttagagttcttattctttcgcagtctggtggtgaatctggcaagcctatgggtgacattttggatgactttgttcgtcagagatttggttatgagtcatatgaacgtgttgaacgtggattgctactgcaaaagaaacagacagcaatgaatatgttcaatgacaaaactaaggggcgatttatttttttaattgatagtcgtgcatgtggtccaagcatcaaactatcatctgttgatgccatcatcatatattgtagtgactggaatcccatgaatgacttgagagcccttcagagggtcagcatggagtcacagtctgaacctgtgcctatttttcgtttgtactcgtcttttacagtggaggaaaaagctcttattcttgcaaagcatgaccatattttggatagtaatattgtgaatataacccctagcctgagccattgtctgctcagttggggcgcatcatttctcttcaatagacttgaggagttgcagcaacatagctactcaaatgtctctggtgatgagcttttcatggataatgtagatttggagtttttgacaaaattactcagcaaggttgaactcagaactgaatcaggcaatacagccatatcacaagcttatctgtgtggatctttctattctagggctattgttgtagcgggtgagagggagggaattccatcagttgatggtgacctgccaaagttctgggcctactggttaagtttacttaatgggaggtctcctcagtggcagtatatatctgagccagtacaaagaagccgtagaaagataaataacatggaacaacaattgaaaaacacagacaaacagttgaaaataactactgaagaaactgatgaagccagagtaaagcgtagaagaattggtgaaatcatggattcatctgcaatagactcacctggcaaaaacaaggacaccatattgccaggaaacaataccccacctagttctcatcaaatatcagttgaagatacatggcaggaactagagcgaagcaatcttcatgccacacaaaaaggtctacacgttcaactcaagccagagatttcgaagttatataagttgctgcaactgccggaaccttcaagtgacgaccttagaagtactgaccatgttgaggagaacacagttggctcacaaatacagggtggtacaagcaaacatttaggtgatgctgcaatggaagttgaaactggaaacaggaacactgctttggctgattcacctcactttgacaaaccagctttgactgctccatccaggcaggcaacattgctggtttctcgagaaaccgagatgctgagcaatcttgtggaccaatgtgcacaacagagtttagtgtcagcacaacctttgcaggatgagtcggaacaagcagatttgtctagtgcagcatcaactcaacccttgcaatctgagaggcaacaattaatctctgtttccaataatctgcttgaaagagcacagcttgatcagagtcaaccaaattatcagacagatgcggcacctggttgtgcgcagtctacagaactctttccagtgacgtcaatgatgtttaatcacgcacctattgattctgaaccactgaaaaatgagttgcacaaattacgattacacatggacacactcaataaagtccatgaaatgaagaaaacccaacttcagaccgcatgtagccaagaactagagaaggtaaagagaaaatatgatttgttaattaaagaacatgattccactcatcttcagcaaaagaaggcacttggtgatttttatgagaaagttcagcgcaaccaatcgctggctgaggattttcgggccaaattcatatcactgtctgcagcacaaggtgcagcaaaaggccatacccctccagttcgtcacacacctcaggctacccaagtggtgtcctccacatcatcaattgccctgtcatcagcttgtcgaccaccagtgccgaggcctagggttcaagctccacaggtggaccaaccattattgtcattgtcgcagttctcccgtccgtctttgcaagtggtccaacctcccaacctggaactaggcaatcttttcagagcaacgtcaacgactcttagtcatatgccacctcaacgtgggagctatggagttcagagtgaattggctcctcgctcacctgctcctcatcttcagttcagatcgccacgggcacattccatggcacctggaaatcagcagcaatcgccagcaattagtgtggatgcaatgtcctcaaggacacaaccagtgctggcggcaagcacatccccatcagatatacatgtgggacccctagcagcctcagccttgtcaagtttacactctgttctcccttcaacctcattaccctcaagcttgcatcctagtcacctggcacaacgtgtgccaccaactcctaacccaactttacaagccggggcaccgaaaggctcgaatgcaacaatgccttccatccctacaggcatgcagctgccagattctggttccctatcgctggatgcatggcttacagctaatcttgggttgaatgatgcgtctacagctcctgctaaggatacagccagtcttgggttgagcagtgatgcccctagggcagctcctgatacaaatacggccagtcttgggttgagcagtgatgtgcctaggggtacggctcctgctacaaatacagccagtcttgggttgagcagtgatgtgcctaggggaacgactcctgctacaactacaaccagtcttgggttgatcagtgattcacctagggtgattgctcctgccagcagtaattcgcctggggcgattgcttctgctacaaatggtggttccgagatagatgtggtatgcctgtcagatgatgaatgatgctagcacgtgtacaaggctgacagttatagatgactgcttgaaaggactaggcattattttacggctcccttgagtccgttctgacaaggtgggaatgttgtttgtgctgtgaatggctggtaacagcaatgacagttttattaagttcattgtaaatgtgtattatgacaaatgcctgccaacgtttgctgtaaatcgctaacctctggggaatgtggatattaacctctgagatggagttgggtttcaagcgctatgaggtttctgtacatgtttgtcattgattagttccctgaggtgttcgttgtaggccggagtgctagctccgtgtatcgttttggttctacgtatgtttcttttttttagtttgacttaaaaaaacagtagcaacaaaaaacagtagcaacatctccatgatagttattatgtataataaatgctgaaattttcttgtatatatttgattgaaacggcgggagtatgtaacagagcaatttagaccaaggcggtcacttcaacgttgtattgtatttctcttcttggtgaaatacggcagcactgtcctatgttaagttttatatctatatagctagctat

SEQ ID NO: 218464 - DNA, 6727 bp, Zea Mays
agagccacagagaggagagagcacaccatccgatcacgcctttctccgtcttcctttggtcggtggggtcgactccgcctcctcacccgcaaaacccctcgtgttcgcgagacgatcagacgaggcggtcagggagggggaggtagaatagggtttcggcagggccgtgccgggccgcctcctgctgaccttcctcctccagcgccgtgcaagcactcccgtccctgccaagccctagctagggtagctggtgcagcggattccaggacccacaaatctcttcttctcaacccattgccggtggagcgtggctgaggtagtggcctcgggttgttggggttcgggctcgccggcgattttgggggacgagttcgctgccggtgccgcgggcgggggcgtgattcgcacctcggaggaacaaacggttgaactgacccaggtgttgatctgctgctgctactactgatccatggctaatacccggtcaggaggaggaggagatgcccctccccccccttcttctcctccagctgctgcttctgcaactgccacaaggaagcttgccgatggaagggagaccaggaacaccgcagctgccagtgctcacacaccaaacctcaggaggtccactcgagaaaacaaaggaaagcacaaatctagacttgctgacacaccaccccttcacagatctgctaaaacgcccaccaaggatgccactgcaattgctacccccaaatccacacccttgccaaacaaccccaaagactcaacaaaaaagccctccagagttaggaacacaagtgtttcaccttctccttcaaaacaagaacctaatgaaacctcaacgcccgcctccaccaaaagaaaaacccaagatgatgctctgactgcctctacaccgtccaagaagcagaaaaggctcctgcatgcgaagagctacattgcactcttcaatataggagaagaatctgtgcttgctaccctcagggaggatgaggaaaaagcttctgaggtgcaaccggaaggagatggtgctgttttggtgcatgaagaaagtaatgcaccggaacaacccaaccaggaagcttcaaatgttgttgctagtgaggtcttgggaggtcactcttctgacttgcatgaaattgaggtgatattggagggagatggattgaagattggatcccatcagtctgatgttgttttagagcgttgcattcttactgagacgcgctcactaaataaggcagtggaaagcatccccatgttggaaactggagagcaagctactggtggttcaaaccagaaacctctactagaattgccaaatagcgcttgctctactgctcatcatgaagaggccagcaagtcggtggaagatggtaattctattgggattcaaggtgcatgcacttcaaggaatactgaagctatccaatgtgatgaaacatggtatgatgacaacatttgtgttgtttgcagaagtagggaaatctcagatatcctgaagtcttgtggtggaaaaggatgtaaacgacattaccatctttcgtgtatggatccttccttggacgtgtccctaggaatatggctttgcataatgtgtatgaaaaagaggattcagtttggtgtatattcagtcagcgagggaattgaatctttatgggatgtcaaggaaggagtggtgaacagcaagcaatatttcgttaagtataaaaatcttgctcatgtacataaccagtgggtttcagaaagtgatatagttgatagcaccccgcaaggttctgatcttatctccaaagttagcaagaagattcataaagaaaagacaataaggtggaagcaggaatgggctgaaccacaccgtctgttgaagagaagattgcttatgcctcaaaaagaagccgaagttttttttaattcactaggtgataaatttgtatactgtaatgtcgagtggctagtgaaatggaaggatctgggctatgaacatgctacatgggaactcgagtcctcatcctttttatgtactcctgaggccgaggagcttaaaaggagctatgaggaccgctttaaaactgcaagaaaagcatctgatccttcaaaagtagacaaggctaagggggggatatttcagcaactcgagagactgccagatggttgccctcctggtttagacgatgaccatttgagatcacttaaccagcttcgtgagttctggcacaattcttgtggtgctattttcatcgatgatcaggagcgagtaattaagaccattctttttgtggcatccatactgcctcacatctgtcaaccactcctcattgtgtctactactactactctctccttgtgggagactaaattcaatcgcttggcagcatccatcaatgttgttgtgtacaatggagagaaagatgtacgcaaatcaatacaagatctggagttttatcaggatggttctgtgatgttgcaagttctcttgtcccaccctgatgccatcttagaggacatcgaagtgattgaacgaattaactgggaagcagttatagtcgatgattgccaaaactctagagtttcaaaatggcttgaacaacttaggagacttcctaccaattttaggatggttctattgagttcctcactaaaggaaagtattgctgagcacatcagtctgctgtcttttctcaaccctgaagaaaatggtacattgagtgtttcaaatggtgtttcttttgatacagctggcactctagttgttctgaaagaaaaacttgcacgttatgttgcctttgagcggaagacagattcatcaaagcttttagagtattgggttcctgcccgcctttcaccagtgcaactagagatgtactgttacatattactatcaaactccccagcccttagatcacattctaaaacagatagtgttggtgctcttcgcaacattcttatatctcttcggaagtgttgtgatcacccttatcttgttgatcaatcgctgcaaagcacacttaccaaggatcaccctgtaactgatatccttgatattggagtgcgttcatgtggcaagttgctgcttcttgacagaatgctccaacagatcaggattcaaggtcttagagttcttattctttcgcagtctggtggtgaatctggcaagcctatgggtgacattttggatgactttgttcgtcagagatttggttatgagtcatatgaacgtgttgaacgtggattgctactgcaaaagaaacagacagcaatgaatatgttcaatgacaaaactaaggggcgatttatttttttaattgatagtcgtgcatgtggtccaagcatcaaactatcatctgttgatgccatcatcatatattgtagtgactggaatcccatgaatgacttgagagcccttcagagggtcagcatggagtcacagtctgaacctgtgcctatttttcgtttgtactcgtcttttacagtggaggaaaaagctcttattcttgcaaagcatgaccatattttggatagtaatattgtgaatataacccctagcctgagccattgtctgctcagttggggcgcatcatttctcttcaatagacttgaggagttgcagcaacatagctactcaaatgtctctggtgatgagcttttcatggataatgtagatttggagtttttgacaaaattactcagcaaggttgaactcagaactgaatcaggcaatacagccatatcacaagcttatctgtgtggatctttctattctagggctattgttgtagcgggtgagagggagggaattccatcagttgatggtgacctgccaaagttctgggcctactggttaagtttacttaatgggaggtctcctcagtggcagtatatatctgagccagtacaaagaagccgtagaaagataaataacatggaacaacaattgaaaaacacagacaaacagttgaaaataactactgaagaaactgatgaagccagagtaaagcgtagaagaattggtgaaatcatggattcatctgcaatagactcacctggcaaaaacaaggacaccatattgccaggaaacaataccccacctagttctcatcaaatatcagttgaagatacatggcaggaactagagcgaagcaatcttcatgccacacaaaaaggtctacacgttcaactcaagccagagatttcgaagttatataagttgctgcaactgccggagaaggtgaaatccttatgtgaggaatttcttgagtatattttgaagaatcaccaaatcagccaggagcctaagggcatactgcatgcattcaatttggctctggaaccttcaagtgacgaccttagaagtactgaccatgttgaggagaacacagttggctcacaaatacagggtggtacaagcaaacatttaggtgatgctgcaatggaagttgaaactggaaacaggaacactgctttggctgattcacctcactttgacaaaccagctttgactgctccatccaggcaggcaacattgctggtttctcgagaaaccgagatgctgagcaatcttgtggaccaatgtgcacaacagagtttagtgtcagcacaacctttgcaggatgagtcggaacaagcagatttgtctagtgcagcatcaactcaacccttgcaatctgagaggcaacaattaatctctgtttccaataatctgcttgaaagagcacagcttgatcagagtcaaccaaattatcagacagatgcggcacctggttgtgcgcagtctacagaactctttccagtgacgtcaatgatgtttaatcacgcacctattgattctgaaccactgaaaaatgagttgcacaaattacgattacacatggacacactcaataaagtccatgaaatgaagaaaacccaacttcagaccgcatgtagccaagaactagagaaggtaaagagaaaatatgatttgttaattaaagaacatgattccactcatcttcagcaaaagaaggcacttggtgatttttatgagaaagttcagcgcaaccaatcgctggctgaggattttcgggccaaattcatatcactgtctgcagcacaaggtgcagcaaaaggccatacccctccagttcgtcacacacctcaggctacccaagtggtgtcctccacatcatcaattgccctgtcatcagcttgtcgaccaccagtgccgaggcctagggttcaagctccacaggtggaccaaccattattgtcattgtcgcagttctcccgtccgtctttgcaagtggtccaacctcccaacctggaactaggcaatcttttcagagcaacgtcaacgactcttagtcatatgccacctcaacgtgggagctatggagttcagagtgaattggctcctcgctcacctgctcctcatcttcagttcagatcgccacgggcacattccatggcacctggaaatcagcagcaatcgccagcaattagtgtggatgcaatgtcctcaaggacacaaccagtgctggcggcaagcacatccccatcagatatacatgtgggacccctagcagcctcagccttgtcaagtttacactctgttctcccttcaacctcattaccctcaagcttgcatcctagtcacctggcacaacgtgtgccaccaactcctaacccaactttacaagccggggcaccgaaaggctcgaatgcaacaatgccttccatccctacaggcatgcagctgccagattctggttccctatcgctggatgcatggcttacagctaatcttgggttgaatgatgcgtctacagctcctgctaaggatacagccagtcttgggttgagcagtgatgcccctagggcagctcctgatacaaatacggccagtcttgggttgagcagtgatgtgcctaggggtacggctcctgctacaaatacagccagtcttgggttgagcagtgatgtgcctaggggaacgactcctgctacaactacaaccagtcttgggttgatcagtgattcacctagggtgattgctcctgccagcagtaattcgcctggggcgattgcttctgctacaaatggtggttccgagatagatgtggtatgcctgtcagatgatgaatgatgctagcacgtgtacaaggctgacagttatagatgactgcttgaaaggactaggcattattttacggctcccttgagtccgttctgacaaggtgggaatgttgtttgtgctgtgaatggctggtaacagcaatgacagttttattaagttcattgtaaatgtgtattatgacaaatgcctgccaacgtttgctgtaaatcgctaacctctggggaatgtggatattaacctctgagatggagttgggtttcaagcgctatgaggtttctgtacatgtttgtcattgattagttccctgaggtgttcgttgtaggccggagtgctagctccgtgtatcgttttggttctacgtatgtttcttttttttagtttgacttaaaaaaacagtagcaacaaaaaacagtagcaacatctccatgatagttattatgtataataaatgctgaaattttcttgtatatatttgattgaaacggcgggagtatgtaacagagcaatttagaccaaggcggtcacttcaacgttgtattgtatttctcttcttggtgaaatacggcagcactgtcctatgttaagttttatatctatatagctagctat

SEQ ID NO: 218465 - DNA, 6622 bp, Zea Mays
agagccacagagaggagagagcacaccatccgatcacgcctttctccgtcttcctttggtcggtggggtcgactccgcctcctcacccgcaaaacccctcgtgttcgcgagacgatcagacgaggcggtcagggagggggaggtagaatagggtttcggcagggccgtgccgggccgcctcctgctgaccttcctcctccagcgccgtgcaagcactcccgtccctgccaagccctagctagggtagctggtgcagcggattccaggacccacaaatctcttcttctcaacccattgccggtggagcgtggctgaggtagtggcctcgggttgttggggttcgggctcgccggcgattttgggggacgagttcgctgccggtgccgcgggcgggggcgtgattcgcacctcggaggaacaaacggttgaactgacccaggtgttgatctgctgctgctactactgatccatggctaatacccggtcaggaggaggaggagatgcccctccccccccttcttctcctccagctgctgcttctgcaactgccacaaggaagcttgccgatggaagggagaccaggaacaccgcagctgccagtgctcacacaccaaacctcaggaggtccactcgagaaaacaaaggaaagcacaaatctagacttgctgacacaccaccccttcacagatctgctaaaacgcccaccaaggatgccactgcaattgctacccccaaatccacacccttgccaaacaaccccaaagactcaacaaaaaagccctccagagttaggaacacaagtgtttcaccttctccttcaaaacaagaacctaatgaaacctcaacgcccgcctccaccaaaagaaaaacccaagatgatgctctgactgcctctacaccgtccaagaagcagaaaaggctcctgcatgcgaagagctacattgcactcttcaatataggagaagaatctgtgcttgctaccctcagggaggatgaggaaaaagcttctgaggtgcaaccggaaggagatggtgctgttttggtgcatgaagaaagtaatgcaccggaacaacccaaccaggaagcttcaaatgttgttgctagtgaggtcttgggaggtcactcttctgacttgcatgaaattgaggtgatattggagggagatggattgaagattggatcccatcagtctgatgttgttttagagcgttgcattcttactgagacgcgctcactaaataaggcagtggaaagcatccccatgttggaaactggagagcaagctactggtggttcaaaccagaaacctctactagaattgccaaatagcgcttgctctactgctcatcatgaagaggccagcaagtcggtggaagatggtaattctattgggattcaaggtgcatgcacttcaaggaatactgaagctatccaatgtgatgaaacatggtatgatgacaacatttgtgttgtttgcagaagtagggaaatctcagatatcctgaagtcttgtggtggaaaaggatgtaaacgacattaccatctttcgtgtatggatccttccttggacgtgtccctaggaatatggctttgcataatgtgtatgaaaaagaggattcagtttggtgtatattcagtcagcgagggaattgaatctttatgggatgtcaaggaaggagtggtgaacagcaagcaatatttcgttaagtataaaaatcttgctcatgtacataaccagtgggtttcagaaagtgatatagttgatagcaccccgcaaggttctgatcttatctccaaagttagcaagaagattcataaagaaaagacaataaggtggaagcaggaatgggctgaaccacaccgtctgttgaagagaagattgcttatgcctcaaaaagaagccgaagttttttttaattcactaggtgataaatttgtatactgtaatgtcgagtggctagtgaaatggaaggatctgggctatgaacatgctacatgggaactcgagtcctcatcctttttatgtactcctgaggccgaggagcttaaaaggagctatgaggaccgctttaaaactgcaagaaaagcatctgatccttcaaaagtagacaaggctaagggggggatatttcagcaactcgagagactgccagatggttgccctcctggtttagacgatgaccatttgagatcacttaaccagcttcgtgagttctggcacaattcttgtggtgctattttcatcgatgatcaggagcgagtaattaagaccattctttttgtggcatccatactgcctcacatctgtcaaccactcctcattgtgtctactactactactctctccttgtgggagactaaattcaatcgcttggcagcatccatcaatgttgttgtgtacaatggagagaaagatgtacgcaaatcaatacaagatctggagttttatcaggatggttctgtgatgttgcaagttctcttgtcccaccctgatgccatcttagaggacatcgaagtgattgaacgaattaactgggaagcagttatagtcgatgattgccaaaactctagagtttcaaaatggcttgaacaacttaggagacttcctaccaattttaggatggttctattgagttcctcactaaaggaaagtattgctgagcacatcagtctgctgtcttttctcaaccctgaagaaaatggtacattgagtgtttcaaatggtgtttcttttgatacagctggcactctagttgttctgaaagaaaaacttgcacgttatgttgcctttgagcggaagacagattcatcaaagcttttagagtattgggttcctgcccgcctttcaccagtgcaactagagatgtactgttacatattactatcaaactccccagcccttagatcacattctaaaacagatagtgttggtgctcttcgcaacattcttatatctcttcggaagtgttgtgatcacccttatcttgttgatcaatcgctgcaaagcacacttaccaaggatcaccctgtaactgatatccttgatattggagtgcgttcatgtggcaagttgctgcttcttgacagaatgctccaacagatcaggattcaaggtcttagagttcttattctttcgcagtctggtggtgaatctggcaagcctatgggtgacattttggatgactttgttcgtcagagatttggttatgagtcatatgaacgtgttgaacgtggattgctactgcaaaagaaacagacagcaatgaatatgttcaatgacaaaactaaggggcgatttatttttttaattgatagtcgtgcatgtggtccaagcatcaaactatcatctgttgatgccatcatcatatattgtagtgactggaatcccatgaatgacttgagagcccttcagagggtcagcatggagtcacagtctgaacctgtgcctatttttcgtttgtactcgtcttttacagtggaggaaaaagctcttattcttgcaaagcatgaccatattttggatagtaatattgtgaatataacccctagcctgagccattgtctgctcagttggggcgcatcatttctcttcaatagacttgaggagttgcagcaacatagctactcaaatgtctctggtgatgagcttttcatggataatgtagatttggagtttttgacaaaattactcagcaaggttgaactcagaactgaatcaggcaatacagccatatcacaagcttatctgtgtggatctttctattctagggctattgttgtagcgggtgagagggagggaattccatcagttgatggtgacctgccaaagttctgggcctactggttaagtttacttaatgggaggtctcctcagtggcagtatatatctgagccagtacaaagaagccgtagaaagataaataacatggaacaacaattgaaaaacacagacaaacagttgaaaataactactgaagaaactgatgaagccagagtaaagcgtagaagaattggtgaaatcatggattcatctgcaatagactcacctggcaaaaacaaggacaccatattgccaggaaacaataccccacctagttctcatcaaatatcagttgaagatacatggcaggaactagagcgaagcaatcttcatgccacacaaaaaggtctacacgttcaactcaagccagagatttcgaagttatataagttgctgcaactgccggaaccttcaagtgacgaccttagaagtactgaccatgttgaggagaacacagttggctcacaaatacagggtggtacaagcaaacatttaggtgatgctgcaatggaagttgaaactggaaacaggaacactgctttggctgattcacctcactttgacaaaccagctttgactgctccatccaggcaggcaacattgctggtttctcgagaaaccgagatgctgagcaatcttgtggaccaatgtgcacaacagagtttagtgtcagcacaacctttgcaggatgagtcggaacaagcagatttgtctagtgcagcatcaactcaacccttgcaatctgagaggcaacaattaatctctgtttccaataatctgcttgaaagagcacagcttgatcagagtcaaccaaattatcagacagatgcggcacctggttgtgcgcagtctacagaactctttccagtgacgtcaatgatgtttaatcacgcacctattgattctgaaccactgaaaaatgagttgcacaaattacgattacacatggacacactcaataaagtccatgaaatgaagaaaacccaacttcagaccgcatgtagccaagaactagagaaggtaaagagaaaatatgatttgttaattaaagaacatgattccactcatcttcagcaaaagaaggcacttggtgatttttatgagaaagttcagcgcaaccaatcgctggctgaggattttcgggccaaattcatatcactgtctgcagcacaaggtgcagcaaaaggccatacccctccagttcgtcacacacctcaggctacccaagtggtgtcctccacatcatcaattgccctgtcatcagcttgtcgaccaccagtgccgaggcctagggttcaagctccacaggtggaccaaccattattgtcattgtcgcagttctcccgtccgtctttgcaagtggtccaacctcccaacctggaactaggcaatcttttcagagcaacgtcaacgactcttagtcatatgccacctcaacgtgggagctatggagttcagagtgaattggctcctcgctcacctgctcctcatcttcagttcagatcgccacgggcacattccatggcacctggaaatcagcagcaatcgccagcaattagtgtggatgcaatgtcctcaaggacacaaccagtgctggcggcaagcacatccccatcagatatacatgtgggacccctagcagcctcagccttgtcaagtttacactctgttctcccttcaacctcattaccctcaagcttgcatcctagtcacctggcacaacgtgtgccaccaactcctaacccaactttacaagccggggcaccgaaaggctcgaatgcaacaatgccttccatccctacaggcatgcagctgccagattctggttccctatcgctggatgcatggcttacagctaatcttgggttgaatgatgcgtctacagctcctgctaaggatacagccagtcttgggttgagcagtgatgcccctagggcagctcctgatacaaatacggccagtcttgggttgagcagtgatgtgcctaggggtacggctcctgctacaaatacagccagtcttgggttgagcagtgatgtgcctaggggaacgactcctgctacaactacaaccagtcttgggttgatcagtgattcacctagggtgattgctcctgccagcagtaattcgcctggggcgattgcttctgctacaaatggtggttccgagatagatgtggtatgcctgtcagatgatgaatgatgctagcacgtgtacaaggctgacagttatagatgactgcttgaaaggactaggcattattttacggctcccttgagtccgttctgacaaggtgggaatgttgtttgtgctgtgaatggctggtaacagcaatgacagttttattaagttcattgtaaatgtgtattatgacaaatgcctgccaacgtttgctgtaaatcgctaacctctggggaatgtggatattaacctctgagatggagttgggtttcaagcgctatgaggtttctgtacatgtttgtcattgattagttccctgaggtgttcgttgtaggccggagtgctagctccgtgtatcgttttggttctacgtatgtttcttttttttagtttgacttaaaaaaacagtagcaacaaaaaacagtagcaacatctccatgatagttattatgtataataaatgctgaaattttcttgtatatatttgattgaaacggcgggagtatgtaacagagcaatttagaccaaggcggtcacttcaacgttgtattgtatttctcttcttggtgaaatacggcagcactgtcctatgttaagttttatatctatatagctagctat

SEQ ID NO: 218466 - DNA, 7757 bp, Zea Mays
agagccacagagaggagagagcacaccatccgatcacgcctttctccgtcttcctttggtcggtggggtcgactccgcctcctcacccgcaaaacccctcgtgttcgcgagacgatcagacgaggcggtcagggagggggaggtagaatagggtttcggcagggccgtgccgggccgcctcctgctgaccttcctcctccagcgccgtgcaagcactcccgtccctgccaagccctagctagggtagctggtgcagcggattccaggacccacaaatctcttcttctcaacccattgccggtggagcgtggctgtggcctcgggttgttggggttcgggctcgccggcgattttgggggacgagttcgctgccggtgccgcgggcgggggcgtgattcgcacctcggaggaacaaacggttgaactgacccaggtgttgatctgctgctgctactactgatccatggctaatacccggtcaggaggaggaggagatgcccctccccccccttcttctcctccagctgctgcttctgcaactgccacaaggaagcttgccgatggaagggagaccaggaacaccgcagctgccagtgctcacacaccaaacctcaggaggtccactcgagaaaacaaaggaaagcacaaatctagacttgctgacacaccaccccttcacagatctgctaaaacgcccaccaaggatgccactgcaattgctacccccaaatccacacccttgccaaacaaccccaaagactcaacaaaaaagccctccagagttaggaacacaagtgtttcaccttctccttcaaaacaagaacctaatgaaacctcaacgcccgcctccaccaaaagaaaaacccaagatgatgctctgactgcctctacaccgtccaagaagcagaaaaggctcctgcatgcgaagagctacattgcactcttcaatataggagaagaatctgtgcttgctaccctcagggaggatgaggaaaaagcttctgaggtgcaaccggaaggagatggtgctgttttggtgcatgaagaaagtaatgcaccggaacaacccaaccaggaagcttcaaatgttgttgctagtgaggtcttgggaggtcactcttctgacttgcatgaaattgaggtgatattggagggagatggattgaagattggatcccatcagtctgatgttgttttagagcgttgcattcttactgagacgcgctcactaaataaggcagtggaaagcatccccatgttggaaactggagagcaagctactggtggttcaaaccagaaacctctactagaattgccaaatagcgcttgctctactgctcatcatgaagaggccagcaagtcggtggaagatggtaattctattgggattcaaggtgcatgcacttcaaggaatactgaagctatccaatgtgatgaaacatggtatgatgacaacatttgtgttgtttgcagaagtagggaaatctcagatatcctgaagtcttgtggtggaaaaggatgtaaacgacattaccatctttcgtgtatggatccttccttggacgtgtccctaggaatatggctttgcataatgtgtatgaaaaagaggattcagtttggtgtatattcagtcagcgagggaattgaatctttatgggatgtcaaggaaggagtggtgaacagcaagcaatatttcgttaagtataaaaatcttgctcatgtacataaccagtgggtttcagaaagtgatatagttgatagcaccccgcaaggttctgatcttatctccaaagttagcaagaagattcataaagaaaagacaataaggtggaagcaggaatgggctgaaccacaccgtctgttgaagagaagattgcttatgcctcaaaaagaagccgaagttttttttaattcactaggtgataaatttgtatactgtaatgtcgagtggctagtgaaatggaaggatctgggctatgaacatgctacatgggaactcgagtcctcatcctttttatgtactcctgaggccgaggagcttaaaaggagctatgaggaccgctttaaaactgcaagaaaagcatctgatccttcaaaagtagacaaggctaagggggggatatttcagcaactcgagagactgccagatggttgccctcctggtttagacgatgaccatttgagatcacttaaccagcttcgtgagttctggcacaattcttgtggtgctattttcatcgatgatcaggagcgagtaattaagaccattctttttgtggcatccatactgcctcacatctgtcaaccactcctcattgtgtctactactactactctctccttgtgggagactaaattcaatcgcttggcagcatccatcaatgttgttgtgtacaatggagagaaagatgtacgcaaatcaatacaagatctggagttttatcaggatggttctgtgatgttgcaagttctcttgtcccaccctgatgccatcttagaggacatcgaagtgattgaacgaattaactgggaagcagttatagtcgatgattgccaaaactctagagtttcaaaatggcttgaacaacttaggagacttcctaccaattttaggatggttctattgagttcctcactaaaggaaagtattgctgagcacatcagtctgctgtcttttctcaaccctgaagaaaatggtacattgagtgtttcaaatggtgtttcttttgatacagctggcactctagttgttctgaaagaaaaacttgcacgttatgttgcctttgagcggaagacagattcatcaaagcttttagagtattgggttcctgcccgcctttcaccagtgcaactagagatgtactgttacatattactatcaaactccccagcccttagatcacattctaaaacagatagtgttggtgctcttcgcaacattcttatatctcttcggaagtgttgtgatcacccttatcttgttgatcaatcgctgcaaagcacacttaccaaggatcaccctgtaactgatatccttgatattggagtgcgttcatgtggcaagttgctgcttcttgacagaatgctccaacagatcaggattcaaggtcttagagttcttattctttcgcagtctggtggtgaatctggcaagcctatgggtgacattttggatgactttgttcgtcagagatttggttatgagtcatatgaacgtgttgaacgtggattgctactgcaaaagaaacagacagcaatgaatatgttcaatgacaaaactaaggggcgatttatttttttaattgatagtcgtgcatgtggtccaagcatcaaactatcatctgttgatgccatcatcatatattgtagtgactggaatcccatgaatgacttgagagcccttcagagggtcagcatggagtcacagtctgaacctgtgcctatttttcgtttgtactcgtcttttacagtggaggaaaaagctcttattcttgcaaagcatgaccatattttggatagtaatattgtgaatataacccctagcctgagccattgtctgctcagttggggcgcatcatttctcttcaatagacttgaggagttgcagcaacatagctactcaaatgtctctggtgatgagcttttcatggataatgtagatttggagtttttgacaaaattactcagcaagggctattgttgtagcgggtgagagggagggaattccatcagttgatggtgacctgccaaagttctgggcctactggttaagtttacttaatgggaggtctcctcagtggcagtatatatctgagccagtacaaagaagccgtagaaagataaataacatggaacaacaattgaaaaacacagacaaacagttgaaaataactactgaagaaactgatgaagccagagtaaagcgtagaagaattggtgaaatcatggattcatctgcaatagactcacctggcaaaaacaaggacaccatattgccaggaaacaataccccacctagttctcatcaaatatcagttgaagatacatggcaggaactagagcgaagcaatcttcatgccacacaaaaaggtctacacgttcaactcaagccagagatttcgaagttatataagttgctgcaactgccggagaaggtgaaatccttatgtgaggaatttcttgagtatattttgaagaatcaccaaatcagccaggagcctaagggcatactgcatgcattcaatttggctctgtgttggcgtgctgcttctctctcaaagcataagatcaatcacacagaatcactcgcacttgctgtaaaaaacttaaactatgagtgcaaagaagaacttgttgattttgtttatgggaagctaaagatccttaagaagaagtttgcacgtagagcaggggaagtgagcaagcaaaactatatggtttcagtgagcgacatatcaacttgtgaacaggtcacttctgttagattgagaaatgatgagttagtccctagccaggtaactttaactgatggtaactttgagaatggttcacatcacgaggctacaggtgacttttggaccgaggagatggtttcgggagagaaagaactgctacctgacccagtaactcatgaaggggaacacttattgagggatgaacttctcagcaaaataatggacaaaagaattaaattagttgacaaagttttctctctgagaggaaggagtatctatgataagcattcaaatcaggtttcatttttagacatgcataggcaaaaggtagtggataaactcagaagagcatgcagtttagttgtggagcatctacgtagtagtcaaaatcacattgctcaagaggacagagatgggaaaataaagctaataattgaatggtttactatgctgctgtatgcttttctggaacacatgaaatgccaacgtaacaggcttgatatgcagcaatcagcttccaggatcaaggagtctcaattgaaggaagaaacccttcaggcagcaagatgtggccaattagatcaaaattttgatcaacatattccttcaccagattttgaatttgctatggaagaatttaggcacttcagggaagtagttggtagctgctatgttgatccagctgctctggtaccagagtctttggatgacaattcagcaatggaaattatgttggttcaaagcgcaactgatgctgaagtcatcgaagaagtgctaaatcgacctactgaagttcttgttcaaggtccagcatcagaagttgttggtccatcagttgatgtgatttgcaattgttctgatggcatcaactcccaaagagatgcatctctggctgttcattcattggaaccttcaagtgacgaccttagaagtactgaccatgttgaggagaacacagttggctcacaaatacagggtggtacaagcaaacatttaggtgatgctgcaatggaagttgaaactggaaacaggaacactgctttggctgattcacctcactttgacaaaccagctttgactgctccatccaggcaggcaacattgctggtttctcgagaaaccgagatgctgagcaatcttgtggaccaatgtgcacaacagagtttagtgtcagcacaacctttgcaggatgagtcggaacaagcagatttgtctagtgcagcatcaactcaacccttgcaatctgagaggcaacaattaatctctgtttccaataatctgcttgaaagagcacagcttgatcagagtcaaccaaattatcagacagatgcggcacctggttgtgcgcagtctacagaactctttccagtgacgtcaatgatgtttaatcacgcacctattgattctgaaccactgaaaaatgagttgcacaaattacgattacacatggacacactcaataaagtccatgaaatgaagaaaacccaacttcagaccgcatgtagccaagaactagagaaggtaaagagaaaatatgatttgttaattaaagaacatgattccactcatcttcagcaaaagaaggcacttggtgatttttatgagaaagttcagcgcaaccaatcgctggctgaggattttcgggccaaattcatatcactgtctgcagcacaaggtgcagcaaaaggccatacccctccagttcgtcacacacctcaggctacccaagtggtgtcctccacatcatcaattgccctgtcatcagcttgtcgaccaccagtgccgaggcctagggttcaagctccacaggtggaccaaccattattgtcattgtcgcagttctcccgtccgtctttgcaagtggtccaacctcccaacctggaactaggcaatcttttcagagcaacgtcaacgactcttagtcatatgccacctcaacgtgggagctatggagttcagagtgaattggctcctcgctcacctgctcctcatcttcagttcagatcgccacgggcacattccatggcacctggaaatcagcagcaatcgccagcaattagtgtggatgcaatgtcctcaaggacacaaccagtgctggcggcaagcacatccccatcagatatacatgtgggacccctagcagcctcagccttgtcaagtttacactctgttctcccttcaacctcattaccctcaagcttgcatcctagtcacctggcacaacgtgtgccaccaactcctaacccaactttacaagccggggcaccgaaaggctcgaatgcaacaatgccttccatccctacaggcatgcagctgccagattctggttccctatcgctggatgcatggcttacagctaatcttgggttgaatgatgcgtctacagctcctgctaaggatacagccagtcttgggttgagcagtgatgcccctagggcagctcctgatacaaatacggccagtcttgggttgagcagtgatgtgcctaggggtacggctcctgctacaaatacagccagtcttgggttgagcagtgatgtgcctaggggaacgactcctgctacaactacaaccagtcttgggttgatcagtgattcacctagggtgattgctcctgccagcagtaattcgcctggggcgattgcttctgctacaaatggtggttccgagatagatgtggtatgcctgtcagatgatgaatgatgctagcacgtgtacaaggctgacagttatagatgactgcttgaaaggactaggcattattttacggctcccttgagtccgttctgacaaggtgggaatgttgtttgtgctgtgaatggctggtaacagcaatgacagttttattaagttcattgtaaatgtgtattatgacaaatgcctgccaacgtttgctgtaaatcgctaacctctggggaatgtggatattaacctctgagatggagttgggtttcaagcgctatgaggtttctgtacatgtttgtcattgattagttccctgaggtgttcgttgtaggccggagtgctagctccgtgtatcgttttggttctacgtatgtttcttttttttagtttgacttaaaaaaacagtagcaacaaaaaacagtagcaacatctccatgatagttattatgtataataaatgctgaaattttcttgtatatatttgattgaaacggcgggagtatgtaacagagcaatttagaccaaggcggtcacttcaacgttgtattgtatttctcttcttggtgaaatacggcagcactgtcctatgttaagttttatatctatatagctagctat

SEQ ID NO: 218467 - DNA, 7777 bp, Zea Mays
agagccacagagaggagagagcacaccatccgatcacgcctttctccgtcttcctttggtcggtggggtcgactccgcctcctcacccgcaaaacccctcgtgttcgcgagacgatcagacgaggcggtcagggagggggaggtagaatagggtttcggcagggccgtgccgggccgcctcctgctgaccttcctcctccagcgccgtgcaagcactcccgtccctgccaagccctagctagggtagctggtgcagcggattccaggacccacaaatctcttcttctcaacccattgccggtggagcgtggctgaggtagtggcctcgggttgttggggttcgggctcgccggcgattttgggggacgagttcgctgccggtgccgcgggcgggggcgtgattcgcacctcggaggaacaaacggttgaactgacccaggtgttgatctgctgctgctactactgatccatggctaatacccggtcaggaggaggaggagatgcccctccccccccttcttctcctccagctgctgcttctgcaactgccacaaggaagcttgccgatggaagggagaccaggaacaccgcagctgccagtgctcacacaccaaacctcaggaggtccactcgagaaaacaaaggaaagcacaaatctagacttgctgacacaccaccccttcacagatctgctaaaacgcccaccaaggatgccactgcaattgctacccccaaatccacacccttgccaaacaaccccaaagactcaacaaaaaagccctccagagttaggaacacaagtgtttcaccttctccttcaaaacaagaacctaatgaaacctcaacgcccgcctccaccaaaagaaaaacccaagatgatgctctgactgcctctacaccgtccaagaagcagaaaaggctcctgcatgcgaagagctacattgcactcttcaatataggagaagaatctgtgcttgctaccctcagggaggatgaggaaaaagcttctgaggtgcaaccggaaggagatggtgctgttttggtgcatgaagaaagtaatgcaccggaacaacccaaccaggaagcttcaaatgttgttgctagtgaggtcttgggaggtcactcttctgacttgcatgaaattgaggtgatattggagggagatggattgaagattggatcccatcagtctgatgttgttttagagcgttgcattcttactgagacgcgctcactaaataaggcagtggaaagcatccccatgttggaaactggagagcaagctactggtggttcaaaccagaaacctctactagaattgccaaatagcgcttgctctactgctcatcatgaagaggccagcaagtcggtggaagatggtaattctattgggattcaaggtgcatgcacttcaaggaatactgaagctatccaatgtgatgaaacatggtcttgtggtggaaaaggatgtaaacgacattaccatctttcgtgtatggatccttccttggacgtgtccctaggaatatggctttgcataatgtgtatgaaaaagaggattcagtttggtgtatattcagtcagcgagggaattgaatctttatgggatgtcaaggaaggagtggtgaacagcaagcaatatttcgttaagtataaaaatcttgctcatgtacataaccagtgggtttcagaaagtgatatagttgatagcaccccgcaaggttctgatcttatctccaaagttagcaagaagattcataaagaaaagacaataaggtggaagcaggaatgggctgaaccacaccgtctgttgaagagaagattgcttatgcctcaaaaagaagccgaagttttttttaattcactaggtgataaatttgtatactgtaatgtcgagtggctagtgaaatggaaggatctgggctatgaacatgctacatgggaactcgagtcctcatcctttttatgtactcctgaggccgaggagcttaaaaggagctatgaggaccgctttaaaactgcaagaaaagcatctgatccttcaaaagtagacaaggctaagggggggatatttcagcaactcgagagactgccagatggttgccctcctggtttagacgatgaccatttgagatcacttaaccagcttcgtgagttctggcacaattcttgtggtgctattttcatcgatgatcaggagcgagtaattaagaccattctttttgtggcatccatactgcctcacatctgtcaaccactcctcattgtgtctactactactactctctccttgtgggagactaaattcaatcgcttggcagcatccatcaatgttgttgtgtacaatggagagaaagatgtacgcaaatcaatacaagatctggagttttatcaggatggttctgtgatgttgcaagttctcttgtcccaccctgatgccatcttagaggacatcgaagtgattgaacgaattaactgggaagcagttatagtcgatgattgccaaaactctagagtttcaaaatggcttgaacaacttaggagacttcctaccaattttaggatggttctattgagttcctcactaaaggaaagtattgctgagcacatcagtctgctgtcttttctcaaccctgaagaaaatggtacattgagtgtttcaaatggtgtttcttttgatacagctggcactctagttgttctgaaagaaaaacttgcacgttatgttgcctttgagcggaagacagattcatcaaagcttttagagtattgggttcctgcccgcctttcaccagtgcaactagagatgtactgttacatattactatcaaactccccagcccttagatcacattctaaaacagatagtgttggtgctcttcgcaacattcttatatctcttcggaagtgttgtgatcacccttatcttgttgatcaatcgctgcaaagcacacttaccaaggatcaccctgtaactgatatccttgatattggagtgcgttcatgtggcaagttgctgcttcttgacagaatgctccaacagatcaggattcaaggtcttagagttcttattctttcgcagtctggtggtgaatctggcaagcctatgggtgacattttggatgactttgttcgtcagagatttggttatgagtcatatgaacgtgttgaacgtggattgctactgcaaaagaaacagacagcaatgaatatgttcaatgacaaaactaaggggcgatttatttttttaattgatagtcgtgcatgtggtccaagcatcaaactatcatctgttgatgccatcatcatatattgtagtgactggaatcccatgaatgacttgagagcccttcagagggtcagcatggagtcacagtctgaacctgtgcctatttttcgtttgtactcgtcttttacagtggaggaaaaagctcttattcttgcaaagcatgaccatattttggatagtaatattgtgaatataacccctagcctgagccattgtctgctcagttggggcgcatcatttctcttcaatagacttgaggagttgcagcaacatagctactcaaatgtctctggtgatgagcttttcatggataatgtagatttggagtttttgacaaaattactcagcaaggttgaactcagaactgaatcaggcaatacagccatatcacaagcttatctgtgtggatctttctattctagggctattgttgtagcgggtgagagggagggaattccatcagttgatggtgacctgccaaagttctgggcctactggttaagtttacttaatgggaggtctcctcagtggcagtatatatctgagccagtacaaagaagccgtagaaagataaataacatggaacaacaattgaaaaacacagacaaacagttgaaaataactactgaagaaactgatgaagccagagtaaagcgtagaagaattggtgaaatcatggattcatctgcaatagactcacctggcaaaaacaaggacaccatattgccaggaaacaataccccacctagttctcatcaaatatcagttgaagatacatggcaggaactagagcgaagcaatcttcatgccacacaaaaaggtctacacgttcaactcaagccagagatttcgaagttatataagttgctgcaactgccggagaaggtgaaatccttatgtgaggaatttcttgagtatattttgaagaatcaccaaatcagccaggagcctaagggcatactgcatgcattcaatttggctctgtgttggcgtgctgcttctctctcaaagcataagatcaatcacacagaatcactcgcacttgctgtaaaaaacttaaactatgagtgcaaagaagaacttgttgattttgtttatgggaagctaaagatccttaagaagaagtttgcacgtagagcaggggaagtgagcaagcaaaactatatggtttcagtgagcgacatatcaacttgtgaacaggtcacttctgttagattgagaaatgatgagttagtccctagccaggtaactttaactgatggtaactttgagaatggttcacatcacgaggctacaggtgacttttggaccgaggagatggtttcgggagagaaagaactgctacctgacccagtaactcatgaaggggaacacttattgagggatgaacttctcagcaaaataatggacaaaagaattaaattagttgacaaagttttctctctgagaggaaggagtatctatgataagcattcaaatcaggtttcatttttagacatgcataggcaaaaggtagtggataaactcagaagagcatgcagtttagttgtggagcatctacgtagtagtcaaaatcacattgctcaagaggacagagatgggaaaataaagctaataattgaatggtttactatgctgctgtatgcttttctggaacacatgaaatgccaacgtaacaggcttgatatgcagcaatcagcttccaggatcaaggagtctcaattgaaggaagaaacccttcaggcagcaagatgtggccaattagatcaaaattttgatcaacatattccttcaccagattttgaatttgctatggaagaatttaggcacttcagggaagtagttggtagctgctatgttgatccagctgctctggtaccagagtctttggatgacaattcagcaatggaaattatgttggttcaaagcgcaactgatgctgaagtcatcgaagaagtgctaaatcgacctactgaagttcttgttcaaggtccagcatcagaagttgttggtccatcagttgatgtgatttgcaattgttctgatggcatcaactcccaaagagatgcatctctggctgttcattcattggaaccttcaagtgacgaccttagaagtactgaccatgttgaggagaacacagttggctcacaaatacagggtggtacaagcaaacatttaggtgatgctgcaatggaagttgaaactggaaacaggaacactgctttggctgattcacctcactttgacaaaccagctttgactgctccatccaggcaggcaacattgctggtttctcgagaaaccgagatgctgagcaatcttgtggaccaatgtgcacaacagagtttagtgtcagcacaacctttgcaggatgagtcggaacaagcagatttgtctagtgcagcatcaactcaacccttgcaatctgagaggcaacaattaatctctgtttccaataatctgcttgaaagagcacagcttgatcagagtcaaccaaattatcagacagatgcggcacctggttgtgcgcagtctacagaactctttccagtgacgtcaatgatgtttaatcacgcacctattgattctgaaccactgaaaaatgagttgcacaaattacgattacacatggacacactcaataaagtccatgaaatgaagaaaacccaacttcagaccgcatgtagccaagaactagagaaggtaaagagaaaatatgatttgttaattaaagaacatgattccactcatcttcagcaaaagaaggcacttggtgatttttatgagaaagttcagcgcaaccaatcgctggctgaggattttcgggccaaattcatatcactgtctgcagcacaaggtgcagcaaaaggccatacccctccagttcgtcacacacctcaggctacccaagtggtgtcctccacatcatcaattgccctgtcatcagcttgtcgaccaccagtgccgaggcctagggttcaagctccacaggtggaccaaccattattgtcattgtcgcagttctcccgtccgtctttgcaagtggtccaacctcccaacctggaactaggcaatcttttcagagcaacgtcaacgactcttagtcatatgccacctcaacgtgggagctatggagttcagagtgaattggctcctcgctcacctgctcctcatcttcagttcagatcgccacgggcacattccatggcacctggaaatcagcagcaatcgccagcaattagtgtggatgcaatgtcctcaaggacacaaccagtgctggcggcaagcacatccccatcagatatacatgtgggacccctagcagcctcagccttgtcaagtttacactctgttctcccttcaacctcattaccctcaagcttgcatcctagtcacctggcacaacgtgtgccaccaactcctaacccaactttacaagccggggcaccgaaaggctcgaatgcaacaatgccttccatccctacaggcatgcagctgccagattctggttccctatcgctggatgcatggcttacagctaatcttgggttgaatgatgcgtctacagctcctgctaaggatacagccagtcttgggttgagcagtgatgcccctagggcagctcctgatacaaatacggccagtcttgggttgagcagtgatgtgcctaggggtacggctcctgctacaaatacagccagtcttgggttgagcagtgatgtgcctaggggaacgactcctgctacaactacaaccagtcttgggttgatcagtgattcacctagggtgattgctcctgccagcagtaattcgcctggggcgattgcttctgctacaaatggtggttccgagatagatgtggtatgcctgtcagatgatgaatgatgctagcacgtgtacaaggctgacagttatagatgactgcttgaaaggactaggcattattttacggctcccttgagtccgttctgacaaggtgggaatgttgtttgtgctgtgaatggctggtaacagcaatgacagttttattaagttcattgtaaatgtgtattatgacaaatgcctgccaacgtttgctgtaaatcgctaacctctggggaatgtggatattaacctctgagatggagttgggtttcaagcgctatgaggtttctgtacatgtttgtcattgattagttccctgaggtgttcgttgtaggccggagtgctagctccgtgtatcgttttggttctacgtatgtttcttttttttagtttgacttaaaaaaacagtagcaacaaaaaacagtagcaacatctccatgatagttattatgtataataaatgctgaaattttcttgtatatatttgattgaaacggcgggagtatgtaacagagcaatttagaccaaggcggtcacttcaacgttgtattgtatttctcttcttggtgaaatacggcagcactgtcctatgttaagttttatatctatatagctagctat

SEQ ID NO: 218468 - DNA, 4883 bp, Zea Mays
ccaagtttgttagtcttctgagaagtctggtggtgaatctggcaagcctatgggtgacattttggatgactttgttcgtcagagatttggttatgagtcatatgaacgtgttgaacgtggattgctactgcaaaagaaacagacagcaatgaatatgttcaatgacaaaactaaggggcgatttatttttttaattgatagtcgtgcatgtggtccaagcatcaaactatcatctgttgatgccatcatcatatattgtagtgactggaatcccatgaatgacttgagagcccttcagagggtcagcatggagtcacagtctgaacctgtgcctatttttcgtttgtactcgtcttttacagtggaggaaaaagctcttattcttgcaaagcatgaccatattttggatagtaatattgtgaatataacccctagcctgagccattgtctgctcagttggggcgcatcatttctcttcaatagacttgaggagttgcagcaacatagctactcaaatgtctctggtgatgagcttttcatggataatgtagatttggagtttttgacaaaattactcagcaaggttgaactcagaactgaatcaggcaatacagccatatcacaagcttatctgtgtggatctttctattctagggctattgttgtagcgggtgagagggagggaattccatcagttgatggtgacctgccaaagttctgggcctactggttaagtttacttaatgggaggtctcctcagtggcagtatatatctgagccagtacaaagaagccgtagaaagataaataacatggaacaacaattgaaaaacacagacaaacagttgaaaataactactgaagaaactgatgaagccagagtaaagcgtagaagaattggtgaaatcatggattcatctgcaatagactcacctggcaaaaacaaggacaccatattgccaggaaacaataccccacctagttctcatcaaatatcagttgaagatacatggcaggaactagagcgaagcaatcttcatgccacacaaaaaggtctacacgttcaactcaagccagagatttcgaagttatataagttgctgcaactgccggagaaggtgaaatccttatgtgaggaatttcttgagtatattttgaagaatcaccaaatcagccaggagcctaagggcatactgcatgcattcaatttggctctggttagataaaattttttttttgtttttattttaatcatgtttgctgctaaatgcttttgttttgtattgttcttgcttcagtgttggcgtgctgcttctctctcaaagcataagatcaatcacacagaatcactcgcacttgctgtaaaaaacttaaactatgagtgcaaagaagaacttgttgattttgtttatgggaagctaaagatccttaagaagaagtttgcacgtagagcaggggaagtgagcaagcaaaactatatggtttcagtgagcgacatatcaacttgtgaacaggtcacttctgttagattgagaaatgatgagttagtccctagccaggtaactttaactgatggtaactttgagaatggttcacatcacgaggctacaggtgacttttggaccgaggagatggtttcgggagagaaagaactgctacctgacccagtaactcatgaaggggaacacttattgagggatgaacttctcagcaaaataatggacaaaagaattaaattagttgacaaagttttctctctgagaggaaggagtatctatgataagcattcaaatcaggtttcatttttagacatgcataggcaaaaggtagtggataaactcagaagagcatgcagtttagttgtggagcatctacgtagtagtcaaaatcacattgctcaagaggacagagatgggaaaataaagctaataattgaatggtttactatgctgctgtatgcttttctggaacacatgaaatgccaacgtaacaggcttgatatgcagcaatcagcttccaggatcaaggagtctcaattgaaggaagaaacccttcaggcagcaagatgtggccaattagatcaaaattttgatcaacatattccttcaccagattttgaatttgctatggaagaatttaggcacttcagggaagtagttggtagctgctatgttgatccagctgctctggtaccagagtctttggatgacaattcagcaatggaaattatgttggttcaaagcgcaactgatgctgaagtcatcgaagaagtgctaaatcgacctactgaagttcttgttcaaggtccagcatcagaagttgttggtccatcagttgatgtgatttgcaattgttctgatggcatcaactcccaaagagatgcatctctggctgttcattcattggaaccttcaagtgacgaccttagaagtactgaccatgttgaggagaacacagttggctcacaaatacagggtggtacaagcaaacatttaggtgatgctgcaatggaagttgaaactggaaacaggaacactgctttggctgattcacctcactttgacaaaccagctttgactgctccatccaggcaggcaacattgctggtttctcgagaaaccgagatgctgagcaatcttgtggaccaatgtgcacaacagagtttagtgtcagcacaacctttgcaggatgagtcggaacaagcagatttgtctagtgcagcatcaactcaacccttgcaatctgagaggcaacaattaatctctgtttccaataatctgcttgaaagagcacagcttgatcagagtcaaccaaattatcagacagatgcggcacctggttgtgcgcagtctacagaactctttccagtgacgtcaatgatgtttaatcacgcacctattgattctgaaccactgaaaaatgagttgcacaaattacgattacacatggacacactcaataaagtccatgaaatgaaggtttcttatttttggtcacttttccttcctttatatatgctgttccagtatcacaatgtctaaccaactccaatttggacagaaaacccaacttcagaccgcatgtagccaagaactagagaaggtaaagagaaaatatgatttgttaattaaagaacatgattccactcatcttcagcaaaagaaggcacttggtgatttttatgagaaagttcagcgcaaccaatcgctggctgaggattttcgggccaaattcatatcactgtctgcagcacaaggtgcagcaaaaggccatacccctccagttcgtcacacacctcaggctacccaagtggtgtcctccacatcatcaattgccctgtcatcagcttgtcgaccaccagtgccgaggcctagggttcaagctccacaggtggaccaaccattattgtcattgtcgcagttctcccgtccgtctttgcaagtggtccaacctcccaacctggaactaggcaatcttttcagagcaacgtcaacgactcttagtcatatgccacctcaacgtgggagctatggagttcagagtgaattggctcctcgctcacctgctcctcatcttcagttcagatcgccacgggcacattccatggcacctggaaatcagcagcaatcgccagcaattagtgtggatgcaatgtcctcaaggacacaaccagtgctggcggcaagcacatccccatcagatatacatgtgggacccctagcagcctcagccttgtcaagtttacactctgttctcccttcaacctcattaccctcaagcttgcatcctagtcacctggcacaacgtgtgccaccaactcctaacccaactttacaagccggggcaccgaaaggctcgaatgcaacaatgccttccatccctacaggcatgcagctgccagattctggttccctatcgctggatgcatggcttacagctaatcttgggttgaatgatgcgtctacagctcctgctaaggatacagccagtcttgggttgagcagtgatgcccctagggcagctcctgatacaaatacggccagtcttgggttgagcagtgatgtgcctaggggtacggctcctgctacaaatacagccagtcttgggttgagcagtgatgtgcctaggggaacgactcctgctacaactacaaccagtcttgggttgatcagtgattcacctagggtgattgctcctgccagcagtaattcgcctggggcgattgcttctgctacaaatggtggttccgagatagatgtggtatgcctgtcagatgatgaatgatgctagcacgtgtacaaggctgacagttatagatgactgcttgaaaggactaggcattattttacggctcccttgagtccgttctgacaaggtgggaatgttgtttgtgctgtgaatggctggtaacagcaatgacagttttattaagttcattgtaaatgtgtattatgacaaatgcctgccaacgtttgctgtaaatcgctaacctctggggaatgtggatattaacctctgagatggagttgggtttcaagcgctatgaggtttctgtacatgtttgtcattgattagttccctgaggtgttcgttgtaggccggagtgctagctccgtgtatcgttttggttctacgtatgtttcttttttttagtttgacttaaaaaaacagtagcaacaaaaaacagtagcaacatctccatgatagttattatgtataataaatgctgaaattttcttgtatatatttgattgaaacggcgggagtatgtaacagagcaatttagaccaaggcggtcacttcaacgttgtattgtatttctcttcttggtgaaatacggcagcactgtcctatgttaagttttatatctatatagctagctat

SEQ ID NO: 218469 - DNA, 867 bp, Zea Mays
aggcactcctgagtgagatgagatgctagttacaagtgaaataataggcagtattatttgttaatcaaggcactactaccctcatgcaactttctgcactgttgataacggggatactggttagtgatcagttgatcatcacagctcgtctcaattatcaacactgtaacaacagacaggtttcttggaccgctacgatcctccagtgattgcctccaaaggtgtcagagttcaggttcattgaatgtgcaatgctgccgtaacctgagagagacggcgctgaagaaaggaaccccactaggatcttgccaaagacttccttagcaaatctgcggatggagctcctcggtattagaagattcaaccaaggatgtggaacttctccaagctcgccttctggacgaatggtatgttctgttttttgtgactataatattttgatttacatgttgaaaagaacatgctgttttttgctgtaatttctttccatgctcatggaatatattttgatatgatgtaaattgttcacaaggagctgtaaaaattatggcaaactatcttatccgcacaagacaccaaatcacaaaattctatgccctcaagtcccagctacaaggtgtatctcttcgtatatagtctctaaaatcaacacaggcgatgggtgaagccatgaagtgtgtgacgaaagtcatgtggcagatgactagacagatgaatcttcttgccttgtagaagataatgcgagagtttgagatgcaaaacgagaagatggagatggttggtgaactgatgaacgatgccttcgatgatgcctttggagggtgacgaggaggaaaagatggaatagaactcaaattttggtgaccg

SEQ ID NO: 218470 - DNA, 3909 bp, Zea Mays
cccgcatcaatactaaccaaaaccttcccagcaaaagcccggtccttctcagtctccctcgtctccctcagatctaagccaccgtcccttcccccagctccggcgatcaccggagtgcctccgccttggggcatgatggacctcctcatcgcgcagatcaccactgacctccgctcctcggacgcgctccggcagtcgtcggcgctgctgcaggccctgcagcagtgcgccgcggggcgggacgtctccgcgctcgcccgcaccgcggccaccgagatcctgtcggcgccctcctccgccgtctgcaagcgcctggcgctcgacctcctccgcgcgctcccgctgccgccggacctcctcgacccgctccttctctcctccctccgctccgatctctcctttccagaccccgacgtcgccgcctcctccatcgcctcgttcccatccctgccctcccaccttctcccctcgcttctctcctccgcccacgctgaaatcgctaatgcactctcctcgcccgctgagtcgctgcgcctcgcagctgtcacatctctgtcctcgctcctcccgcgcgatgacctaacgctcatgtgctccacaaacccctccctcatggcgcatgctaccacgtggtggggccgcctggccgagcttgcgctggactctgcagacgctgtttccgccggtgcgtttgaggctcttgcacggctgttccaggagctagaggggcgccgcatgagccggctagctggagacaagcttgttgatggagaaggtgcgcttgcagtgcgtgcccagtgggcggctgatgccattgatttcatttggtcaaggcgcaacatgctgattgcgcgctctatggtgatgcctgtggagagcttccgagttactgtgtaccctctagtgcatgcagcaaaaatggttgcttctggtgtggtaaacactctgcggcgagttgctaagccaggagacactacaattgctgatagcgtggagtcgagtgcggagaaattggtaggagtgtcagacatcgtctcacacttgctgccatttcttagttcacttgacccaccactggtgttcgaggttgggatcaatatgctggcgcttgcagatgtccctggaggcaagccagagtgggcatcagctgcaattattgcaatcctgacactatgggaccggcaagagttctcttcgatgagggagacaattgtaagggctgttgtaaccaatcttcatttgctggatcttggaatgcaggtctctctattcaaaagactgcttcagatggtgagaaacttgagagcagaatcagatcgaatgcatgctttggcatgtatttgtcggactgctctttgtgttgatctttttgcaaaggagagtgtccgaagaggtcagaagcctgttcctggaacagatgtgatatcgctctttgaagatgtgagggtgaaggaagatctaaacagcgtaacaagcaaaaacttgttcagagaagagctagtggcttccctagtcgaaagttgtttccagctatctcttccactaccagagttgaagaattctgggacagagagcagagttataggagcgttagcctatggaactggttatggtgcccttaactggacagaacctgctttggatgtggtggaagtttgcaggccatgtgttctttgggactgtgatggtcgtacctatgcaattgattgctatctaaagttacttgtgaggctttgtcatatatatgataccagaggcggtgtgaagacaattaaagctggtgcatctcaagatcagattctgaatgagacacgacttagaaatttgcagctgcagcttatcagggaccttcgcgaggttcacactccacgtatatcttcacgcttgatatgggcaatttctgaacactttgatcttgaaggtctggatccccttttagctgatgacccagaggacccactgaatattgtcatatctaacatgcacaagatattattcaacaccgattcatctgctactacatcaaataggatacaagatgtgcaggctgttctaatttgcgctcagcggttgggagcaagaaatgcaagagcaggccaacttctcactaaagaactggaagagtttagggcaagtacttcagctgattctatgaccaagcatcaatcacgttatgtgttgcaagtaataaaatacgtaacaaaccatcctgacaacaggtgggttggtgtaggtgatgctacaggggattatccatttagtcaccacaagcttaccgttcaattttcagaggcgtctgctgcccaagataggaaattggagggattagtccataaggccatccgggagctttggaggccgaatcccagtcaattaattctcctacaaacaaggggaattggtgctttgcataaagagcttccaaaagcgtgtgctttgactggcagcagtgatccgtgctacatcgaagcatatcatttggcagatccaactgatggcagaattaccctacatctaaagattttaaatttgactgagctggaactcaacagggtggacatccgtgttggcctgtctggagcactgtattatatggatggtttctctcgcactgttcgtcaccttcggaatcttgtttcccaggatccagtccaaagtagtgtgactgttggagtttcacattttgagagatgctcgctctgggttcaagttttgtattacccgttttatggaagtagtggatcaacagactatgaaggagattatgcagaagaggattcacagatgatgaggcagaagcgctcacatcggcctgaacttggggaaccggttgttttgcggtgccaaccatacaagtttcctctcgctgagctcctcctaccattagagtgttctccagttgagtatttccggctatggcctagcctaccagccatggtggagtgcactggcacatacacatatgaaggcagtggtttcaaggccaccgctgctcagcagtatgacagctctcccttcctcagtggattgaagtcgatttcttctaagcccttccatcaagtctgctcacatttcatccggacagtagctggattccagcaaagacatggtttggtggatttgtgggcatgatgatatttggggcaagtgaagtcagccggaatgttgatttgggtgatgagaccaccacaatgatctgcaaattcgtcatgcgcgcatccgatgaatccatcacgagagagatcaaatccgacctccagggctggctggatgatatcaccgacggcgctgtggaatacatgcctgaggatgaggtgaagagtgtggccgccgagcagctgaagatctccatggagaggattgccctgctcaaggcagccaggccaaaggtcccacccgcaaagaccgatcaagaggaggaagaggagcgaaagcagagcgaggaactagatgggtttggaaaccccaagggcccctcgacgctctccaagctcaccgcggaggaggctgagcaccgcgctctccaggctgccgtgcttcaggagtggcaccagctatgcaaagagagagccatgaaagcgcagtgaggtcgatttggaccgtgtggatcttacgcgcatgtataattttgtatttttccttcgtctcccattctttgcgtgtctatactgctggtttcactcactgtataccgtcgccgatttgttcattgtattctcaaatacttgtgcacgaaaaaacctgttttgtaacatactactgttagggcgtttttaagcttcggtgtgaagatcgattgtacaagagaatccaaatgtcattgttgccttcccagttttatgaaaatgcattctgtaattgaagaattctccccaaaatgccacgatttataaataagaaatgtggaat

SEQ ID NO: 218471 - DNA, 3884 bp, Zea Mays
ccggtccttctcagtctccctcgtctccctcagatctaagccaccgtcccttcccccagctccggcgatcaccggagtgcctccgccttggggcatgatggacctcctcatcgcgcagatcaccactgacctccgctcctcggacgcgctccggcagtcgtcggcgctgctgcaggccctgcagcagtgcgccgcggggcgggacgtctccgcgctcgcccgcaccgcggccaccgagatcctgtcggcgccctcctccgccgtctgcaagcgcctggcgctcgacctcctccgcgcgctcccgctgccgccggacctcctcgacccgctccttctctcctccctccgctccgatctctcctttccagaccccgacgtcgccgcctcctccatcgcctcgttcccatccctgccctcccaccttctcccctcgcttctctcctccgcccacgctgaaatcgctaatgcactctcctcgcccgctgagtcgctgcgcctcgcagctgtcacatctctgtcctcgctcctcccgcgcgatgacctaacgctcatgtgctccacaaacccctccctcatggcgcatgctaccacgtggtggggccgcctggccgagcttgcgctggactctgcagacgctgtttccgccggtgcgtttgaggctcttgcacggctgttccaggagctagaggggcgccgcatgagccggctagctggagacaagcttgttgatggagaaggtgcgcttgcagtgcgtgcccagtgggcggctgatgccattgatttcatttggtcaaggcgcaacatgctgattgcgcgctctatggtgatgcctgtggagagcttccgagttactgtgtaccctctagtgcatgcagcaaaaatggttgcttctggtgtggtaaacactctgcggcgagttgctaagccaggagacactacaattgctgatagcgtggagtcgagtgcggagaaattggtaggagtgtcagacatcgtctcacacttgctgccatttcttagttcacttgacccaccactggtgttcgaggttgggatcaatatgctggcgcttgcagatgtccctggaggcaagccagagtgggcatcagctgcaattattgcaatcctgacactatgggaccggcaagagttctcttcgatgagggagacaattgtaagggctgttgtaaccaatcttcatttgctggatcttggaatgcaggtctctctattcaaaagactgcttcagatggtgagaaacttgagagcagaatcagatcgaatgcatgctttggcatgtatttgtcggactgctctttgtgttgatctttttgcaaaggagagtgtccgaagaggtcagaagcctgttcctggaacagatgtgatatcgctctttgaagatgtgagggtgaaggaagatctaaacagcgtaacaagcaaaaacttgttcagagaagagctagtggcttccctagtcgaaagttgtttccagctatctcttccactaccagagttgaagaattctgggacagagagcagagttataggagcgttagcctatggaactggttatggtgcccttaactggacagaacctgctttggatgtggtggaagtttgcaggccatgtgttctttgggactgtgatggtcgtacctatgcaattgattgctatctaaagttacttgtgaggctttgtcatatatatgataccagaggcggtgtgaagacaattaaagctggtgcatctcaagatcagattctgaatgagacacgacttagaaatttgcagctgcagcttatcagggaccttcgcgaggttcacactccacgtatatcttcacgcttgatatgggcaatttctgaacactttgatcttgaaggtctggatccccttttagctgatgacccagaggacccactgaatattgtcatatctaacatgcacaagatattattcaacaccgattcatctgctactacatcaaataggatacaagatgtgcaggctgttctaatttgcgctcagcggttgggagcaagaaatgcaagagcaggccaacttctcactaaagaactggaagagtttagggcaagtacttcagctgattctatgaccaagcatcaatcacgttatgtgttgcaagtaataaaatacgtaacaaaccatcctgacaacaggtgggttggtgtaggtgatgctacaggggattatccatttagtcaccacaagcttaccgttcaattttcagaggcgtctgctgcccaagataggaaattggagggattagtccataaggccatccgggagctttggaggccgaatcccagtcaattaattctcctacaaacaaggggaattggtgctttgcataaagagcttccaaaagcgtgtgctttgactggcagcagtgatccgtgctacatcgaagcatatcatttggcagatccaactgatggcagaattaccctacatctaaagattttaaatttgactgagctggaactcaacagggtggacatccgtgttggcctgtctggagcactgtattatatggatggtttctctcgcactgttcgtcaccttcggaatcttgtttcccaggatccagtccaaagtagtgtgactgttggagtttcacattttgagagatgctcgctctgggttcaagttttgtattacccgttttatggaagtagtggatcaacagactatgaaggagattatgcagaagaggattcacagatgatgaggcagaagcgctcacatcggcctgaacttggggaaccggttgttttgcggtgccaaccatacaagtttcctctcgctgagctcctcctaccattagagtgttctccagttgagtatttccggctatggcctagcctaccagccatggtggagtgcactggcacatacacatatgaaggcagtggtttcaaggccaccgctgctcagcagtatgacagctctcccttcctcagtggattgaagtcgatttcttctaagcccttccatcaagtctgctcacatttcatccggacagtagctggattccagttatgttatgcagcaaagacatggtttggtggatttgtgggcatgatgatatttggggcaagtgaagtcagccggaatgttgatttgggtgatgagaccaccacaatgatctgcaaattcgtcatgcgcgcatccgatgaatccatcacgagagagatcaaatccgacctccagggctggctggatgatatcaccgacggcgctgtggaatacatgcctgaggatgaggtgaagagtgtggccgccgagcagctgaagatctccatggagaggattgccctgctcaaggcagccaggccaaaggtcccacccgcaaagaccgatcaagaggaggaagaggagcgaaagcagagcgaggaactagatgggtttggaaaccccaagggcccctcgacgctctccaagctcaccgcggaggaggctgagcaccgcgctctccaggctgccgtgcttcaggagtggcaccagctatgcaaagagagagccatgaaagcgcagtgaggtcgatttggaccgtgtggatcttacgcgcatgtataattttgtatttttccttcgtctcccattctttgcgtgtctatactgctggtttcactcactgtataccgtcgccgatttgttcattgtattctcaaatacttgtgcacgaaaaaacctgttttgtaacatactactgttagggcgtttttaagcttcggtgtgaagatcgattgtacaagagaatccaaatgtcattgttgccttcccagttttatgaaaatgcattctgtaattgaagaattctccccaaaatgccacgatttataaataagaaatgtggaat

SEQ ID NO: 218472 - DNA, 2002 bp, Zea Mays
gggaccttcgcgaggtctggatccccttttagctgatgacccagaggacccactgaatattgtcatatctaacatgcacaagatattattcaacaccgattcatctgctactacatcaaataggatacaagatgtgcaggctgttctaatttgcgctcagcggttgggagcaagaaatgcaagagcaggccaacttctcactaaagaactggaagagtttagggcaagtacttcagctgattctatgaccaagcatcaatcacgttatgtgttgcaagtaataaaatacgtaacaaaccatcctgacaacaggtgggttggtgtaggtgatgctacaggggattatccatttagtcaccacaagcttaccgttcaattttcagaggcgtctgctgcccaagataggaaattggagggattagtccataaggccatccgggagctttggaggccgaatcccagtcaattaattctcctacaaacaaggggaattggtgctttgcataaagagcttccaaaagcgtgtgctttgactggcagcagtgatccgtgctacatcgaagcatatcatttggcagatccaactgatggcagaattaccctacatctaaagattttaaatttgactgagctggaactcaacagggtggacatccgtgttggcctgtctggagcactgtattatatggatggtttctctcgcactgttcgtcaccttcggaatcttgtttcccaggatccagtccaaagtagtgtgactgttggagtttcacattttgagagatgctcgctctgggttcaagttttgtattacccgttttatggaagtagtggatcaacagactatgaaggagattatgcagaagaggattcacagatgatgaggcagaagcgctcacatcggcctgaacttggggaaccggttgttttgcggtgccaaccatacaagtttcctctcgctgagctcctcctaccattagagtgttctccagttgagtatttccggctatggcctagcctaccagccatggtggagtgcactggcacatacacatatgaaggcagtggtttcaaggccaccgctgctcagcagtatgacagctctcccttcctcagtggattgaagtcgatttcttctaagcccttccatcaagtctgctcacatttcatccggacagtagctggattccagcaaagacatggtttggtggatttgtgggcatgatgatatttggggcaagtgaagtcagccggaatgttgatttgggtgatgagaccaccacaatgatctgcaaattcgtcatgcgcgcatccgatgaatccatcacgagagagatcaaatccgacctccagggctggctggatgatatcaccgacggcgctgtggaatacatgcctgaggatgaggtgaagagtgtggccgccgagcagctgaagatctccatggagaggattgccctgctcaaggcagccaggccaaaggtcccacccgcaaagaccgatcaagaggaggaagaggagcgaaagcagagcgaggaactagatgggtttggaaaccccaagggcccctcgacgctctccaagctcaccgcggaggaggctgagcaccgcgctctccaggctgccgtgcttcaggagtggcaccagctatgcaaagagagagccatgaaagcgcagtgaggtcgatttggaccgtgtggatcttacgcgcatgtataattttgtatttttccttcgtctcccattctttgcgtgtctatactgctggtttcactcactgtataccgtcgccgatttgttcattgtattctcaaatacttgtgcacgaaaaaacctgttttgtaacatactactgttagggcgtttttaagcttcggtgtgaagatcgattgtacaagagaatccaaatgtcattgttgccttcccagttttatgaaaatgcattctgtaattgaagaattctccccaaaatgccacgatttataaataagaaatgtggaat

SEQ ID NO: 218473 - DNA, 450 bp, Zea Mays
gtttaattgtattgtcagtcttctggctcaaaatcagttactagtttgagttcacttcttggtcggggaatatgatgaaactattggcacctgctatctattttctgaaagtgaaactgaaccaaaacctgcaagtgatgagctggcaccttctaaagaaaacacagaaacaccgcttaacagcagtaaggaagcgcccttgaaggaggtgaaccatctggccagcgttcaaaagatcctcaaatttaagccaatcaatgtggagcactcgcagcatcgagcatatcagcacaaggacaaggaactttagaggaaaaaaaatacctgctgttttcttcagtcaatgcattcagtgtacagttttaggttcattgaaatgaggtgggctgtatacttgttgaatgttgagttcatctatatatatgagctactatatcgatctgcttgtcc

SEQ ID NO: 218474 - DNA, 652 bp, Zea Mays
cgactggcagactgggccgccgccgccctaaaccagctgaggctttcgttggtctcttcgccggcaacgagcaccaccagtttaagatgtcagaagcacttcagaaagataaggaaattggtgaagaggaagaggaagaggagtatgtattgttagagttggacaattgtctttattcagacatatcgcctggtgctcagttcgtactctctggtttggatacattgacgcctaccttgatagtaggtgacaatctgaagatggtcggggaatatgatgaaactattggcacctgctatctattttctgaaagtgaaactgaaccaaaacctgcaagtgatgagctggcaccttctaaagaaaacacagaaacaccgcttaacagcagtaaggaagcgcccttgaaggaggtgaaccatctggccagcgttcaaaagatcctcaaatttaagccaatcaatgtggagcactcgcagcatcgagcatatcagcacaaggacaaggaactttagaggaaaaaaaatacctgctgttttcttcagtcaatgcattcagtgtacagttttaggttcattgaaatgaggtgggctgtatacttgttgaatgttgagttcatctatatatatgagctactatatcgatctgcttgtcc

SEQ ID NO: 218475 - DNA, 1210 bp, Zea Mays
gaaggggcagcgttgcagttagtctgacattttacgccgtcagacgactggcagactgggccgccgccgccctaaaccagctgaggctttcgttggtctcttcgccggcaacgagcaccaccaggagtgaagagttttgttcgccgtgcagtttaagatgtcagaagcacttcagaaagataaggaaattggtgaagaggaagaggaagaggagtatgtattgttagagttggacaattgtctttattcagacatatcgcctggtgctcagttcgtactctctggtttggatacattgacgcctaccttgatagtaggtgacaatctgaagatgagcacggagtacatatttgtcatgactgtagcttgtgccgttgaatgctgtaacaggacaagatcagttactagtttgagttcacttcttggtgagtaacagagcacggagtacatatttgtcatgactgtagcttgtgccgttgaatgctgtaacaggacaagatcagttactagtttgagttcacttcttggtgagtaacagagcacggagtacatatttgtcatgactgtagcttgtgccgttgaatgctgtaacaggacaagatggaaacaagatatatttggaggccataagttacttgttattccttaaagtaccaagcgtgcattttactgattatctattttgttgctaatgaatccctttgttctaacgattttcttctttacaaaatgatttttttttgaaattcccaattcatactagagtttctggctctaatctgcttaccagccgtgctaatccttatgccttctaatgacaggtcggggaatatgatgaaactattggcacctgctatctattttctgaaagtgaaactgaaccaaaacctgcaagtgatgagctggcaccttctaaagaaaacacagaaacaccgcttaacagcagtaaggaagcgcccttgaaggaggtgaaccatctggccagcgttcaaaagatcctcaaatttaagccaatcaatgtggagcactcgcagcatcgagcatatcagcacaaggacaaggaactttagaggaaaaaaaatacctgctgttttcttcagtcaatgcattcagtgtacagttttaggttcattgaaatgaggtgggctgtatacttgttgaatgttgagttcatctatatatatgagctactatatcgatctgcttgtcc

SEQ ID NO: 218476 - DNA, 6070 bp, Zea Mays
gtccccacgtttcctcggctcctcgcccgcctctctcgtttattagcgctcgtaaaccccactcacttcttccttctcttcggccccttcctcggccgaaacctcagttgctcctccgcccgctcgaaaaccccaagtccccaatcacacatcgggccaccgccgcggcatccatggccgccgaagacaaagggaccggagaccgcgagaatgcagaccccaacctctgctccatcgccgacgcgtcgctgtctcacgagaacaccgaagacaaatcggatttggataccaagagcgcgccatctattcagttgcttcagccaaaaccgggggaaaacaaggagcctggttcacatgatatccactttaattctgcaaacacgacaggaaacagtgaagaagggaacaatactggaaagaaaagagatgttttcaggccttctgtgtttgatagaatatctggccaccgtgaccaatggtgcaatgaagacaccagactgaattcagattcccatcgaaatcaatggagggaaatggaaaaagaacatagtgatatgaacaaagtggaacagcactgtgatgaccccaagcaatatcttggtagccagcggagtcgaaaagagcgctgggttagtaacgaaagaaactatgaccaacaccatgagaataattggaattctcgctggggtgcaagtagtaaagattctcaaaattggcgtgaaaagtcaacagattcagatataaaagatgattactcctgtgaaaaagttttttcttacagtacatgccatgggaaagaaaaggatggtaccaatcatgagaaggttaatgaaagggacagtaatatttctcgatcgtggaactccagctattttgcaaaccgtggtgcaggcggtacatctgatcatctttttacggatccacagaagttatctgcttcatttggatacagtagctataggcaggaaagtgatagcccaaactctacaagttctcgcagaaggtttacatctgttacaagcagagtcaatagtcggtcttcacgaccattccatcttggtgtactttctgagaggcctgttggtccatctagtaactctgtgagatatagcaggataaagttgtttgaaatatatagaacaactgatgttagaaacttcacaatgccgataaatgatattggtaacaatgagatatcttcgttgtggcaagaagatcctatggatcctttagctctcattgcacctaatgctgaagaagcggtgattttgaaaggaattgaaaaaggagatatcacaaacagtttggcacaagcttgcaaagatggttctgatgacaaaaatattccaggcgtggcagcattagaacaaatgaaattaagtggaagagaagatcaaacaggaaacaatgaagaattcaatggtaaaatgaccattgatatcagaggaattcttggggctgctgatttgagggaacacttgaagtctgataaatctcctccaaaagaatctgagtctggtggtggtggtatccatgggccatgtgctgaatttggacatcagcgcaatgccttggaccaaggaactaaagttggtgatggtgaaaatgttaacccagaaaacctctctctgtactacaaggatccaaaagggtgcatccaaggtccttttcctggatatgacatcattggttggtttgaagctggatattttggtattgatttgctagttcgtgttgccagtgctccctgtgattctcctttcttattacttggggatgtcatgccacacttacgggcaaaggtaagggtgcctccaggcttcagcaataccaaaccaagaagtatgacagatgcctcacatctaggatcagtgtatcttggaacatctgattatggatccataaacaagaatggctgtgtaactgaagcagaaaattactttttggaggctccagtgtctagtaaaatccagaatcctagagcagcaactaatgttgttactggaggtatgaatgaatggaggtttgtttccggtgagaaagtgaatagtataaaccatcttgaagtacagaaggtgcagttagagacagaaaatacctttcaaatagaaggtgatgtcatatcagttggagagtcacaaaagaaagaatcagtacagtcaacttcacactcaacattcttcccgcaaatggttgacccatcgagtgaagccctccaacctcagaatattaacctgctctcaatgctgcttcctgcagaaaaaggacaagcaccgactgctacttctggattgtcacttcggtcaaataatgctgactctggaaatctgcatgctggtatgtgtggtatagatgttactcaagagatactaaatgtgcaccaaaatctgcataattctcagcaaataggtattgatgctcaacagcattacgttttaacacagaatcaaccaactttagcttgtttgaactctcaaatcacacagccagaaaagtttctcggtggaatatatcatgatcctcagttaaacatcaaccaacaacagtatctgctatcagagctacacttgcaacccctgattcctggagtccctgaacctcaatcctctctattgaacaacatgctacagctcaggcagcaggagcaacagcaacaatacatttctcagtccatacctcatgatcgttccatgcagcagctttatgattcttcccatgggacaatacatacttcattgtcatctggtgaccgtatgaagctttgtcttcaaagaacagaagagattcttgatcttgctctgaagttacctggtcatggtaagcataatctacaactacatgcaagtgtgaaattgagagacacaggaaatattggtttgtcggaaagttgcgctactgccctaccactgccccatgaaatgatgggtcatgcagcttggaaagaatgttctgctagtctcacacagggctctgcagttgttgatgctctttcacaaaaagaaagtattgtagactcaccatctaagaaaactccaagttatggttctaacgattatagcaagatgactgtttttgaagttacaggttttcctcaaccatttcaaggtcttcagaaaccgaaaagtgtagcatctcatatctcaaatgaagttcatgaaatggatatttcctctgtccatcctcattcatggaaacctactccaggtgttagggctaaatcagtgttggaaattcaagcagaggaacgattggaaactcagagggaaatagccctggaaaatacaaaggtaactacaacaacagcttccgggctatctattcattgggttgatttggttgaaacttctgggcaacagtttggagatcaggctagacctatgtgtgataaaaaaaatgacaatatatcacagagtaacagaagtcatttacatgatttatcggcaagagaggaactgataaagtcaaatgctaaagctggtgttatcataaacagtgctgatgatacatcttttcctcctctggcaccttctattactcagtctgatgctcatattcatgatggtgctgatttcattgagttcaagggcacaagaaagataagtaacagggggaagaaacccaaaggttctgcagttaaaaccccagcatcacatgcaaatgttatacctggaccagctactgatcctgcacaggtacgcgaaccatgttctctgagaaatattcaggtggaagaagaacaggaatcagctaatcttcagcaactagtaccagcatcatcccatgcaaaagggcctatggaccagcatattcatgggaacaattcatcctggcaaggttctgaatcacctccatcgaggggtaacgaattcctcaaaatgacttctcatgtttccagtcactccactcctaattcagaagagtatctgttttgggagcctcgtgagcatgcaaagcaagataagtatgttcttaactacgggctcaactttgtcagcttttcttcattctttttattaatgaaaaaatggaccttcttgctaagcttataccctctggaagcaaaattatgactgatacacattaaattgcactgtagccatttctgtttaagttaatctgcatctaaatcttgccagttttgttcttattttcttgcttggcgtggcaagagtttgttaatagacttagtccatcatgtgcatggactagtcagtactacattttgttattcacattcattactatcctttgcgattgagtatgttttatctgttatataaacttgctatagtggatgcagtaacatgcatgatgtgtccttgcacctgtactgacttaacatgtttcactattgaggtgtatgcaatatgattttgatctttcaacaacacaactctacaactttctttggcctgacgcaatatgtttgctattcctcgaccattaaaataaaatgtcattcatatatccgaaaatggtactagtaaattattcttacttctgcaataccttattttgtatatttcccaaatatatggtaataaataatataatggttaaaagtaaatgttcacctaaatgtaataagttagtcacctgttgtttaggcaattattattgggcaaaactgccattaaatgggctacatggccgtttaaacagtttaaatggacacggctgggcaccttgtagcatttaaatggtgtttgtactttgaacgggccaaacagctgtttagttgaagaatgaatagggtgcaatattgtgctctgaataaagggtaaaaggggtagcttcatttgtttctaccagatggaacgaaatagggacactttgatgcaacatgtttaactttagaatatcaaactgttcaagtccttgttctgcataggttgtggtttgtgcaagcttaaaaaaatatattgtcaacatctacaaaatcaaataaatgcaatatcaaaatagatagcatggtgtatcgaatgaatcttgcttgatattttagcatttttctacaaatttggtctaacctagaaaagtttgacttgggacaaagctacaacgacgaaacatgtaagttaggtttccagcactaaattaaatgaattctcaggttatattactgcatatgattttgtattgttactcccattcatggattgattattgataaaaagtagttggatttatcgatgctcataatcaaacccagtaccagtaacatggagctatctatgctttgcaatctgctgaaagatatttatgttctgtgtaatgcataaccaggccgagactccaatcacctccgagttccgtggtcaatacaaggtctactgcattggacattcataagaaggggaagaaaggtacaaagctgagcacgtcagctttggggttcaaggttcagagcacccgtatcatgatgggtgagatcgcgcatgttgacgagtagatgtccagactggtatatatatagttaagatctatatctatattatatgttgagctacgaaaggcgaccaattcgtgtactgatgcacatagcttacacttcgcatcatcgttttagcacagaatttttatcatggtaggcgagcttcctgaagaatgaagatgatgacagtttggcggctgaagtgacgagaattcaaattgagcaactggcaaaggttttggttttcagcaggcttggttgtaacttgaaaatcgtataatgtttgttgctgggcggattttgtgcgaagcattgagcctggaaggttcaagattcaggtctaatttgcagtatggaatattcgagtgcttgcttgtgaccgtttcctgaaacagtcatctggtgtatagtttcctggaatctgatgggatcgtttgtcattaaaataatttacgtgcatatcaacattaacatttgcccagaattgaaataaactaaccatgctttactatcgaattattttacaaactaatttatgagataacacccggacttcggcagcatcaccgcatccaaagaatcagttacctacctgacaatgctagagaaaaagagaaacaacaaggtacacgaaca

SEQ ID NO: 218477 - DNA, 4635 bp, Zea Mays
gtccccacgtttcctcggctcctcgcccgcctctctcgtttattagcgctcgtaaaccccactcacttcttccttctcttcggccccttcctcggccgaaacctcagttgctcctccgcccgctcgaaaaccccaagtccccaatcacacatcgggccaccgccgcggcatccatggccgccgaagacaaagggaccggagaccgcgagaatgcagaccccaacctctgctccatcgccgacgcgtcgctgtctcacgagaacaccgaagacaaatcggatttggataccaagagcgcgccatctattcagttgcttcagccaaaaccgggggaaaacaaggagcctggttcacatgatatccactttaattctgcaaacacgacaggaaacagtgaagaagggaacaatactggaaagaaaagagatgttttcaggccttctgtgtttgatagaatatctggccaccgtgaccaatggtgcaatgaagacaccagactgaattcagattcccatcgaaatcaatggagggaaatggaaaaagaacatagtgatatgaacaaagtggaacagcactgtgatgaccccaagcaatatcttggtagccagcggagtcgaaaagagcgctgggttagtaacgaaagaaactatgaccaacaccatgagaataattggaattctcgctggggtgcaagtagtaaagattctcaaaattggcgtgaaaagtcaacagattcagatataaaagatgattactcctgtgaaaaagttttttcttacagtacatgccatgggaaagaaaaggatggtaccaatcatgagaaggttaatgaaagggacagtaatatttctcgatcgtggaactccagctattttgcaaaccgtggtgcaggcggtacatctgatcatctttttacggatccacagaagttatctgcttcatttggatacagtagctataggcaggaaagtgatagcccaaactctacaagttctcgcagaaggtttacatctgttacaagcagagtcaatagtcggtcttcacgaccattccatcttggtgtactttctgagaggcctgttggtccatctagtaactctgtgagatatagcaggataaagttgtttgaaatatatagaacaactgatgttagaaacttcacaatgccgataaatgatattggtaacaatgagatatcttcgttgtggcaagaagatcctatggatcctttagctctcattgcacctaatgctgaagaagcggtgattttgaaaggaattgaaaaaggagatatcacaaacagtttggcacaagcttgcaaagatggttctgatgacaaaaatattccaggcgtggcagcattagaacaaatgaaattaagtggaagagaagatcaaacaggaaacaatgaagaattcaatggtaaaatgaccattgatatcagaggaattcttggggctgctgatttgagggaacacttgaagtctgataaatctcctccaaaagaatctgagtctggtggtggtggtatccatgggccatgtgctgaatttggacatcagcgcaatgccttggaccaaggaactaaagttggtgatggtgaaaatgttaacccagaaaacctctctctgtactacaaggatccaaaagggtgcatccaaggtccttttcctggatatgacatcattggttggtttgaagctggatattttggtattgatttgctagttcgtgttgccagtgctccctgtgattctcctttcttattacttggggatgtcatgccacacttacgggcaaaggtaagggtgcctccaggcttcagcaataccaaaccaagaagtatgacagatgcctcacatctaggatcagtgtatcttggaacatctgattatggatccataaacaagaatggctgtgtaactgaagcagaaaattactttttggaggctccagtgtctagtaaaatccagaatcctagagcagcaactaatgttgttactggaggtatgaatgaatggaggtttgtttccggtgagaaagtgaatagtataaaccatcttgaagtacagaaggtgcagttagagacagaaaatacctttcaaatagaaggtgatgtcatatcagttggagagtcacaaaagaaagaatcagtacagtcaacttcacactcaacattcttcccgcaaatggttgacccatcgagtgaagccctccaacctcagaatattaacctgctctcaatgctgcttcctgcagaaaaaggacaagcaccgactgctacttctggattgtcacttcggtcaaataatgctgactctggaaatctgcatgctggtatgtgtggtatagatgttactcaagagatactaaatgtgcaccaaaatctgcataattctcagcaaataggtattgatgctcaacagcattacgttttaacacagaatcaaccaactttagcttgtttgaactctcaaatcacacagccagaaaagtttctcggtggaatatatcatgatcctcagttaaacatcaaccaacaacagtatctgctatcagagctacacttgcaacccctgattcctggagtccctgaacctcaatcctctctattgaacaacatgctacagctcaggcagcaggagcaacagcaacaatacatttctcagtccatacctcatgatcgttccatgcagcagctttatgattcttcccatgggacaatacatacttcattgtcatctggtgaccgtatgaagctttgtcttcaaagaacagaagagattcttgatcttgctctgaagttacctggtcatggtaagcataatctacaactacatgcaagtgtgaaattgagagacacaggaaatattggtttgtcggaaagttgcgctactgccctaccactgccccatgaaatgatgggtcatgcagcttggaaagaatgttctgctagtctcacacagggctctgcagttgttgatgctctttcacaaaaagaaagtattgtagactcaccatctaagaaaactccaagttatggttctaacgattatagcaagatgactgtttttgaagttacaggttttcctcaaccatttcaaggtcttcagaaaccgaaaagtgtagcatctcatatctcaaatgaagttcatgaaatggatatttcctctgtccatcctcattcatggaaacctactccaggtgttagggctaaatcagtgttggaaattcaagcagaggaacgattggaaactcagagggaaatagccctggaaaatacaaaggtaactacaacaacagcttccgggctatctattcattgggttgatttggttgaaacttctgggcaacagtttggagatcaggctagacctatgtgtgataaaaaaaatgacaatatatcacagagtaacagaagtcatttacatgatttatcggcaagagaggaactgataaagtcaaatgctaaagctggtgttatcataaacagtgctgatgatacatcttttcctcctctggcaccttctattactcagtctgatgctcatattcatgatggtgctgatttcattgagttcaagggcacaagaaagataagtaacagggggaagaaacccaaaggttctgcagttaaaaccccagcatcacatgcaaatgttatacctggaccagctactgatcctgcacaggtacgcgaaccatgttctctgagaaatattcaggtggaagaagaacaggaatcagctaatcttcagcaactagtaccagcatcatcccatgcaaaagggcctatggaccagcatattcatgggaacaattcatcctggcaaggttctgaatcacctccatcgaggggtaacgaattcctcaaaatgacttctcatgtttccagtcactccactcctaattcagaagagtatctgttttgggagcctcgtgagcatgcaaagcaagataagccgagactccaatcacctccgagttccgtggtcaatacaaggtctactgcattggacattcataagaaggggaagaaaggtacaaagctgagcacgtcagctttggggttcaaggttcagagcacccgtatcatgatgggtgagatcgcgcatgttgacgagtagatgtccagactgaatttttatcatggtaggcgagcttcctgaagaatgaagatgatgacagtttggcggctgaagtgacgagaattcaaattgagcaactggcaaaggttttggttttcagcaggcttggttgtaacttgaaaatcgtataatgtttgttgctgggcggattttgtgcgaagcattgagcctggaaggttcaagattcaggtctaatttgcagtatggaatattcgagtgcttgcttgtgaccgtttcctgaaacagtcatctggtgtatagtttcctggaatctgatgggatcgtttgtcattaaaataatttacgtgcatatcaacattaacatttgcccagaattgaaataaactaaccatgctttactatcgaattattttacaaactaatttatgagataacacccggacttcggcagcatcaccgcatccaaagaatcagttacctacctgacaatgctagagaaaaagagaaacaacaaggtacacgaaca

SEQ ID NO: 218478 - DNA, 4618 bp, Zea Mays
gtccccacgtttcctcggctcctcgcccgcctctctcgtttattagcgctcgtaaaccccactcacttcttccttctcttcggccccttcctcggccgaaacctcagttgctcctccgcccgctcgaaaaccccaagtccccaatcacacatcgggccaccgccgcggcatccatggccgccgaagacaaagggaccggagaccgcgagaatgcagaccccaacctctgctccatcgccgacgcgtcgctgtctcacgagaacaccgaagacaaatcggatttggataccaagagcgcgccatctattcagttgcttcagccaaaaccgggggaaaacaaggagcctggttcacatgatatccactttaattctgcaaacacgacaggaaacagtgaagaagggaacaatactggaaagaaaagagatgttttcaggccttctgtgtttgatagaatatctggccaccgtgaccaatggtgcaatgaagacaccagactgaattcagattcccatcgaaatcaatggagggaaatggaaaaagaacatagtgatatgaacaaagtggaacagcactgtgatgaccccaagcaatatcttggtagccagcggagtcgaaaagagcgctgggttagtaacgaaagaaactatgaccaacaccatgagaataattggaattctcgctggggtgcaagtagtaaagattctcaaaattggcgtgaaaagtcaacagattcagatataaaagatgattactcctgtgaaaaagttttttcttacagtacatgccatgggaaagaaaaggatggtaccaatcatgagaaggttaatgaaagggacagtaatatttctcgatcgtggaactccagctattttgcaaaccgtggtgcaggcggtacatctgatcatctttttacggatccacagaagttatctgcttcatttggatacagtagctataggcaggaaagtgatagcccaaactctacaagttctcgcagaaggtttacatctgttacaagcagagtcaatagtcggtcttcacgaccattccatcttggtgtactttctgagaggcctgttggtccatctagtaactctgtgagatatagcaggataaagttgtttgaaatatatagaacaactgatgttagaaacttcacaatgccgataaatgatattggtaacaatgagatatcttcgttgtggcaagaagatcctatggatcctttagctctcattgcacctaatgctgaagaagcggtgattttgaaaggaattgaaaaaggagatatcacaaacagtttggcacaagcttgcaaagatggttctgatgacaaaaatattccaggcgtggcagcattagaacaaatgaaattaagtggaagagaagatcaaacaggaaacaatgaagaattcaatggtaaaatgaccattgatatcagaggaattcttggggctgctgatttgagggaacacttgaagtctgataaatctcctccaaaagaatctgagtctggtggtggtggtatccatgggccatgtgctgaatttggacatcagcgcaatgccttggaccaaggaactaaagttggtgatggtgaaaatgttaacccagaaaacctctctctgtactacaaggatccaaaagggtgcatccaaggtccttttcctggatatgacatcattggttggtttgaagctggatattttggtattgatttgctagttcgtgttgccagtgctccctgtgattctcctttcttattacttggggatgtcatgccacacttacgggcaaaggtaagggtgcctccaggcttcagcaataccaaaccaagaagtatgacagatgcctcacatctaggatcagtgtatcttggaacatctgattatggatccataaacaagaatggctgtgtaactgaagcagaaaattactttttggaggctccagtgtctagtaaaatccagaatcctagagcagcaactaatgttgttactggaggtatgaatgaatggaggtttgtttccggtgagaaagtgaatagtataaaccatcttgaagtacagaaggtgcagttagagacagaaaatacctttcaaatagaaggtgatgtcatatcagttggagagtcacaaaagaaagaatcagtacagtcaacttcacactcaacattcttcccgcaaatggttgacccatcgagtgaagccctccaacctcagaatattaacctgctctcaatgctgcttcctgcagaaaaaggacaagcaccgactgctacttctggattgtcacttcggtcaaataatgctgactctggaaatctgcatgctggtatgtgtggtatagatgttactcaagagatactaaatgtgcaccaaaatctgcataattctcagcaaataggtattgatgctcaacagcattacgttttaacacagaatcaaccaactttagcttgtttgaactctcaaatcacacagccagaaaagtttctcggtggaatatatcatgatcctcagttaaacatcaaccaacaacagtatctgctatcagagctacacttgcaacccctgattcctggagtccctgaacctcaatcctctctattgaacaacatgctacagctcaggcagcaggagcaacagcaacaatacatttctcagtccatacctcatgatcgttccatgcagcagctttatgattcttcccatgggacaatacatacttcattgtcatctggtgaccgtatgaagctttgtcttcaaagaacagaagagattcttgatcttgctctgaagttacctggtcatggtaagcataatctacaactacatgcaagtgtgaaattgagagacacaggaaatattggtttgtcggaaagttgcgctactgccctaccactgccccatgaaatgatgggtcatgcagcttggaaagaatgttctgctagtctcacacagggctctgcagttgttgatgctctttcacaaaaagaaagtattgtagactcaccatctaagaaaactccaagttatggttctaacgattatagcaagatgactgtttttgaagttacaggttttcctcaaccatttcaaggtcttcagaaaccgaaaagtgtagcatctcatatctcaaatgaagttcatgaaatggatatttcctctgtccatcctcattcatggaaacctactccaggtgttagggctaaatcagtgttggaaattcaagcagaggaacgattggaaactcagagggaaatagccctggaaaatacaaaggtaactacaacaacagcttccgggctatctattcattgggttgatttggttgaaacttctgggcaacagtttggagatcaggctagacctatgtgtgataaaaaaaatgacaatatatcacagagtaacagaagtcatttacatgatttatcggcaagagaggaactgataaagtcaaatgctaaagctggtgttatcataaacagtgctgatgatacatcttttcctcctctggcaccttctattactcagtctgatgctcatattcatgatggtgctgatttcattgagttcaagggcacaagaaagataagtaacagggggaagaaacccaaaggttctgcagttaaaaccccagcatcacatgcaaatgttatacctggaccagctactgatcctgcacaggtacgcgaaccatgttctctgagaaatattcaggtggaagaagaacaggaatcagctaatcttcagcaactagtaccagcatcatcccatgcaaaagggcctatggaccagcatattcatgggaacaattcatcctggcaaggttctgaatcacctccatcgaggggtaacgaattcctcaaaatgacttctcatgtttccagtcactccactcctaattcagaagagtatctgttttgggagcctcgtgagcatgcaaagcaagataagccgagactccaatcacctccgagttccgtggtcaatacaaggtctactgcattggacattcataagaaggggaagaaaggtacaaagctgagcacgtcagctttggggttcaaggttcagagcacccgtatcatgatgggtgagatcgcgcatgttgacgagtagatgtccagactggcgagcttcctgaagaatgaagatgatgacagtttggcggctgaagtgacgagaattcaaattgagcaactggcaaaggttttggttttcagcaggcttggttgtaacttgaaaatcgtataatgtttgttgctgggcggattttgtgcgaagcattgagcctggaaggttcaagattcaggtctaatttgcagtatggaatattcgagtgcttgcttgtgaccgtttcctgaaacagtcatctggtgtatagtttcctggaatctgatgggatcgtttgtcattaaaataatttacgtgcatatcaacattaacatttgcccagaattgaaataaactaaccatgctttactatcgaattattttacaaactaatttatgagataacacccggacttcggcagcatcaccgcatccaaagaatcagttacctacctgacaatgctagagaaaaagagaaacaacaaggtacacgaaca

SEQ ID NO: 218479 - DNA, 1095 bp, Zea Mays
gtaagcatatatctgtgatcaatcaactgtggattcatattagtcgaaaagcatggactgatacattgtgactttaatgagttcaatatcatgattgatgatgatgaaaaaattacggttattgattttccacagatggtatctgtttctcatcgtaatgcccaaatgttttttgaccgagacattgaatgtatctacaagttctttaacaaaaggttcaatctgacatcagagaaaaatgaagaacaagctgggtctgaaagtgatgatgaagggaatagcagaccttcctttttgtctgtgaaaaagactgctggttccttggacaaggaactagctgcaagtggatataccaggaaagagcaagtggagatggacaagtacattgaggaagatgctgaaagacatgattccagctcagatgatgatgacgacgacgacgacaatgacaaggacgattctgctgagcctgattgtaatcttgcctcaagggattcagatgtgcctggaactttttctgaagagaatgaaacaagctgtagcagtgagaagagattggaaagtccctcgggtgacaatggagaggctatgaaaccgcttgaatctgagggcaagacgctttcccagaaagacgacaacaatgatgatgactcatcagaggatgctgatgaagaagaagaagatgccgagctcacgaaacaattgaacaagcaaaggaaaaaggcaatagcagctgccagtggtcggagaaggccagtgtcgtccaggaacgcctgcaaggacaagggtaagggcaccatgaactccaaaatccagaggcaggcgtgccagtggtgatggtcactcgaatgtctgcagtgcctctttcgacaatcgtaaagtagaccaagagtaggattttccatgagggtagaaccgagggatccctgtactagaatcaactctggttttattcttttatcacatgtcgtatacctttttgtacacggttatggtgagatcatttgagttatgcttgtgtttataccaactgaatagctgagcgtactgccttcttcaagagcccgtactgctgccaatgccattgttcttgag

SEQ ID NO: 218480 - DNA, 224 bp, Zea Mays
gccaggcgatgggtacttcgtcaactctgagttacgattcagacttggccagctcagtgtctaaatcaaatgtagtaattgtagaaggctatctgtttgagctgcctcacacaattgaagctatcaagcaagcgtgtgaagatgctcaccagaatggtgcactcgttgctgttactgcatcagatgtgtcttgcatcgagcattgctacaatgactttcggtga

SEQ ID NO: 218481 - DNA, 1999 bp, Zea Mays
tttctcagcaccttcttgtgccgttcttcacccgtcgtctcctttccgcagcaaccatcagcgtccaacctcctctctcaccctctccgtttgcaacaaccgcccaacgccaggtgcccagatcggcgtcccttccagccattttccgcgtccttcgccggtgtcgaagcacccatcagtgtacctgcttcagttaatagttatctgatatctacccttggccaaagcaagctatctattgtgcctgtgatttttgttgggagctgtcatagttcagtttttggtaggaacggtcacagctctactcaactgaaggcatggctgtaaaatctagtagaagttcagatgaaagctatatagagcctctcctatgctggaagaaggaattcagatcatctgtaattaaaattgttgattcgtccttaaactcgagtttgatgtctgccgacagtatttgttcaattcctgcttcagaatatggtttctattttaataaacgaatgaagatggatgaggaatatgatcaccttctgacaaatggaaatatgaaagatagtagcacggcaaacttcacaaccactggatatgtctcatctccagagcgcaacatggatggtcaatcatgtatggttagttcaactacagaatttttagcaggatcacattctaatgttaatactggtcagccatcatcctcatcaagtgcaccatcttatatcagtcagagtattaaagaagcttgggagtgttcattgcctgatacaaatactccaaaaccattaacagagttaatatcagcgagggacctttgcatctccatcctcaaaaggaaaatatgttccgccaaagactcagaactaagcagaacatcaagtactatagaccgtgatgataatctaaacaatcctttatttgaatgcacaaaatgcggtctgatggaagatccatccaaaatgttaatttgtgattgttgtgaaggagcatttcatttattgtgttgcaatccacatgtcaagaaaataccagaggaagagtggtattgtttggcatgtaaaagaaagaaacctaagagacaacgtggaaagtttgcaaatcccaaagttgaatcatccaagggcattcaaagaccccgccgaggtcttggtcctattcgagatatgttactggattctgaatcatatgaaagtggggttcggattggtactaagtttcaagcagaagttccaaaatggtctggtcctatttctagtagagaagatgagtttgctgagcccactgaacttgatcgtagtaaaacgacaatgctgagtttcgaggataagaaaaccagtatcggtaactggatccagtgccgggaagttctagacacaggagttgtttgtggcaaatggcggagggcaccattgtttgttgttcaatcaagtgactgggactgttcgtgctcagttgtttgggatcctatccatgctgattgtgctgttccacaggaattggagaccgttaaagttcacgagcaactgaagtacataaataagggtactcttgctgtcctgcaccagtgctgtccacagatgggtgtcgataccgtgtaccaattttcctcggatgcctcggatgaagtgagagccagtagatatgaaatccgtgtctacgcatgacatcttgacacataaaaatgctccttccagtcaaccggcatacgttatacgagtttcagtgtcgtgtgtaaataagagaaagaaaaggcattttaaaaacaaaagccatagcaaaagcaaaaaaaggaggaggagaagaaaatactcgatgctgctggagaactacaactcggtgagatggaaacagaaaggtctgggttgtatcatgaggtgtaaactggggtggtgggcgtgtggccgtgtttgtgtgtgtgtttacagttttgtcacctccgctgcttgaattatgatgaccgaagaatggatcacaatgctatagtttgatttcttttacaaaaaaa

SEQ ID NO: 218482 - DNA, 2043 bp, Zea Mays
tttctcagcaccttcttgtgccgttcttcacccgtcgtctcctttccgcagcaaccatcagcgtccaacctcctctctcaccctctccgtttgcaacaaccgcccaacgccaggtgcccagatcggcgtcccttccagccattttccgcgtccttcgccggtgtcgaagcacccatcagtgtacctgcttcagttaatagttatctgatatctacccttggccaaagcaagctatctattgtgcctgtgatttttgttgggagctgtcatagttcagtttttggtaggaacggtcacagctctactcaactgaaggcatggctgtaaaatctagtagaagttcagatgaaagctatatagagcctctcctatgctggaagaaggaattcagatcatctgtaattaaaattgttgattcgtccttaaactcgagtttgatgtctgccgacagtatttgttcaattcctgcttcagaatatggtttctattttaataaacgaatgaagatggatgaggaatatgatcaccttctgacaaatggaaatatgaaagatagtagcacggcaaacttcacaaccactggatatgtctcatctccagagcgcaacatggatggtcaatcatgtatggttagttcaactacagaatttttagcaggatcacattctaatgttaatactggtcagccatcatcctcatcaagtgcaccatcttatatcagtcagagtattaaagaagcttgggagtgttcattgcctgatacaaatactccaaaaccattaacagagttaatatcagcgagggacctttgcatctccatcctcaaaaggaaaatatgttccgccaaagactcagaactaagcagaacatcaagtactatagaccgtgatgataatctaaacaatcctttatttgaatgcacaaaatgcggtctgatggaagatccatccaaaatgttaatttgtgattgttgtgaaggagcatttcatttattgtgttgcaatccacatgtcaagaaaataccagaggaagagtggtattgtttggcatgtaaaagaaagaaacctaagagacaacgtggaaagtttgcaaatcccaaagttgaatcatccaagggcattcaaagaccccgccgaggtcttggtcctattcgagatatgttactggattctgaatcatatgaaagtggggttcggattggtactaagtttcaagcagaagttccaaaatggtctggtcctatttctagtagagaagatgagtttgctgagcccactgaacttgatcgtagtaaaacgacaatgctgagtttcgaggataagaaaaccagtatcggtaactggatccagtgccgggaagttctagacacaggagttgtttgtggcaaatggcggagggcaccattgtttgttgttcaatcaagtgactgggactgttcgtgctcagttgtttgggatcctatccatgctgattgtgctgttccacaggaattggagaccgttaaagttcacgagcaactgaagtacataaataagctgaagaatcgtctaggtgacagcaatcagaaacgctgaaaaacggtactcttgctgtcctgcaccagtgctgtccacagatgggtgtcgataccgtgtaccaattttcctcggatgcctcggatgaagtgagagccagtagatatgaaatccgtgtctacgcatgacatcttgacacataaaaatgctccttccagtcaaccggcatacgttatacgagtttcagtgtcgtgtgtaaataagagaaagaaaaggcattttaaaaacaaaagccatagcaaaagcaaaaaaaggaggaggagaagaaaatactcgatgctgctggagaactacaactcggtgagatggaaacagaaaggtctgggttgtatcatgaggtgtaaactggggtggtgggcgtgtggccgtgtttgtgtgtgtgtttacagttttgtcacctccgctgcttgaattatgatgaccgaagaatggatcacaatgctatagtttgatttcttttacaaaaaaa

SEQ ID NO: 218483 - DNA, 2046 bp, Zea Mays
tttctcagcaccttcttgtgccgttcttcacccgtcgtctcctttccgcagcaaccatcagcgtccaacctcctctctcaccctctccgtttgcaacaaccgcccaacgccaggtgcccagatcggcgtcccttccagccattttccgcgtccttcgccggtgtcgaagcacccatcagcagtgtacctgcttcagttaatagttatctgatatctacccttggccaaagcaagctatctattgtgcctgtgatttttgttgggagctgtcatagttcagtttttggtaggaacggtcacagctctactcaactgaaggcatggctgtaaaatctagtagaagttcagatgaaagctatatagagcctctcctatgctggaagaaggaattcagatcatctgtaattaaaattgttgattcgtccttaaactcgagtttgatgtctgccgacagtatttgttcaattcctgcttcagaatatggtttctattttaataaacgaatgaagatggatgaggaatatgatcaccttctgacaaatggaaatatgaaagatagtagcacggcaaacttcacaaccactggatatgtctcatctccagagcgcaacatggatggtcaatcatgtatggttagttcaactacagaatttttagcaggatcacattctaatgttaatactggtcagccatcatcctcatcaagtgcaccatcttatatcagtcagagtattaaagaagcttgggagtgttcattgcctgatacaaatactccaaaaccattaacagagttaatatcagcgagggacctttgcatctccatcctcaaaaggaaaatatgttccgccaaagactcagaactaagcagaacatcaagtactatagaccgtgatgataatctaaacaatcctttatttgaatgcacaaaatgcggtctgatggaagatccatccaaaatgttaatttgtgattgttgtgaaggagcatttcatttattgtgttgcaatccacatgtcaagaaaataccagaggaagagtggtattgtttggcatgtaaaagaaagaaacctaagagacaacgtggaaagtttgcaaatcccaaagttgaatcatccaagggcattcaaagaccccgccgaggtcttggtcctattcgagatatgttactggattctgaatcatatgaaagtggggttcggattggtactaagtttcaagcagaagttccaaaatggtctggtcctatttctagtagagaagatgagtttgctgagcccactgaacttgatcgtagtaaaacgacaatgctgagtttcgaggataagaaaaccagtatcggtaactggatccagtgccgggaagttctagacacaggagttgtttgtggcaaatggcggagggcaccattgtttgttgttcaatcaagtgactgggactgttcgtgctcagttgtttgggatcctatccatgctgattgtgctgttccacaggaattggagaccgttaaagttcacgagcaactgaagtacataaataagctgaagaatcgtctaggtgacagcaatcagaaacgctgaaaaacggtactcttgctgtcctgcaccagtgctgtccacagatgggtgtcgataccgtgtaccaattttcctcggatgcctcggatgaagtgagagccagtagatatgaaatccgtgtctacgcatgacatcttgacacataaaaatgctccttccagtcaaccggcatacgttatacgagtttcagtgtcgtgtgtaaataagagaaagaaaaggcattttaaaaacaaaagccatagcaaaagcaaaaaaaggaggaggagaagaaaatactcgatgctgctggagaactacaactcggtgagatggaaacagaaaggtctgggttgtatcatgaggtgtaaactggggtggtgggcgtgtggccgtgtttgtgtgtgtgtttacagttttgtcacctccgctgcttgaattatgatgaccgaagaatggatcacaatgctatagtttgatttcttttacaaaaaaa

SEQ ID NO: 218484 - DNA, 2040 bp, Zea Mays
tttctcagcaccttcttgtgccgttcttcacccgtcgtctcctttccgcagcaaccatcagcgtccaacctcctctctcaccctctccgtttgcaacaaccgcccaacgccaggtgcccagatcggcgtcccttccagccattttccgcgtccttcgccggtgtcgaagcacccatcagtgtacctgcttcagttaatagttatctgatatctacccttggccaaagcaagctatctattgtgcctgtgatttttgttgggagctgtcatagttcagtttttggtaggaacggtcacagctctactcaactgaaggcatggctgtaaaatctagtagaagttcagatgaaagctatatagagcctctcctatgctggaagaaggaattcagatcatctgtaattaaaattgttgattcgtccttaaactcgagtttgatgtctgccgacagtatttgttcaattcctgcttcagaatatggtttctattttaataaacgaatgaagatggatgaggaatatgatcaccttctgacaaatggaaatatgaaagatagtagcacggcaaacttcacaaccactggatatgtctcatctccagagcgcaacatggatggtcaatcatgtatggttagttcaactacagaatttttagcaggatcacattctaatgttaatactggtcagccatcatcctcatcaagtgcaccatcttatatcagtcagagtattaaagaagcttgggagtgttcattgcctgatacaaatactccaaaaccattaacagagttaatatcagcgagggacctttgcatctccatcctcaaaaggaaaatatgttccgccaaagactcagaactaagcagaacatcaagtactatagaccgtgatgataatctaaacaatcctttatttgaatgcacaaaatgcggtctgatggaagatccatccaaaatgttaatttgtgattgttgtgaaggagcatttcatttattgtgttgcaatccacatgtcaagaaaataccagaggaagagtggtattgtttggcatgtaaaagaaagaaacctaagagacaacgtggaaagtttgcaaatcccaaagttgaatcatccaagggcattcaaagaccccgccgaggtcttggtcctattcgagatatgttactggattctgaatcatatgaaagtggggttcggattggtactaagtttcaagcagaagttccaaaatggtctggtcctatttctagagaagatgagtttgctgagcccactgaacttgatcgtagtaaaacgacaatgctgagtttcgaggataagaaaaccagtatcggtaactggatccagtgccgggaagttctagacacaggagttgtttgtggcaaatggcggagggcaccattgtttgttgttcaatcaagtgactgggactgttcgtgctcagttgtttgggatcctatccatgctgattgtgctgttccacaggaattggagaccgttaaagttcacgagcaactgaagtacataaataagctgaagaatcgtctaggtgacagcaatcagaaacgctgaaaaacggtactcttgctgtcctgcaccagtgctgtccacagatgggtgtcgataccgtgtaccaattttcctcggatgcctcggatgaagtgagagccagtagatatgaaatccgtgtctacgcatgacatcttgacacataaaaatgctccttccagtcaaccggcatacgttatacgagtttcagtgtcgtgtgtaaataagagaaagaaaaggcattttaaaaacaaaagccatagcaaaagcaaaaaaaggaggaggagaagaaaatactcgatgctgctggagaactacaactcggtgagatggaaacagaaaggtctgggttgtatcatgaggtgtaaactggggtggtgggcgtgtggccgtgtttgtgtgtgtgtttacagttttgtcacctccgctgcttgaattatgatgaccgaagaatggatcacaatgctatagtttgatttcttttacaaaaaaa

SEQ ID NO: 218485 - DNA, 1985 bp, Zea Mays
tttctcagcaccttcttgtgccgttcttcacccgtcgtctcctttccgcagcaaccatcagcgtccaacctcctctctcaccctctccgtttgcaacaaccgcccaacgccaggtgcccagatcggcgtcccttccagccattttccgcgtccttcgccggtgtcgaagcacccatcagcagtgtacctgcttcagttaatagttatctgatatctacccttggccaaagcaagctatctattgtgcctgtgatttttgttgggagctgtcatagttcagtttttggtaggaacggtcacagctctactcaactgaaggcatggctgtaaaatctagtagaagttcagatgaaagctatatagagcctctcctatgctggaagaaggaattcagatcatctgtaattaaaattgttgattcgtccttaaactcgagtttgatgtctgccgacagtatttgttcaattcctgcttcagaatatggtttctattttaataaacgaatgaagatggatgaggaatatgatcaccttctgacaaatggaaatatgaaagatagtagcacggcaaacttcacaaccactggatatgtctcatctccagagcgcaacatggatggtcaatcatgtatggttagttcaactacagaatttttagcaggatcacattctaatgttaatactggtcagccatcatcctcatcaagtgcaccatcttatatcagtcagagtattaaagaagcttgggagtgttcattgcctgatacaaatactccaaaaccattaacagagttaatatcagcgagggacctttgcatctccatcctcaaaaggaaaatatgttccgccaaagactcagaactaagcagaacatcaagtactatagaccgtgatgataatctaaacaatcctttatttgaatgcacaaaatgcggtctgatggaagatccatccaaaatgttaatttgtgattgttgtgaaggagcatttcatttattgtgttgcaatccacatgtcaagaaaataccagaggaagagtggtattgtttggcatgtaaaagaaagaaacctaagagacaacgtggaaagtttgcaaatcccaaagttgaatcatccaagggcattcaaagaccccgccgaggtcttggtcctattcgagatatgttactggattctgaatcatatgaaagtggggttcggattggtactaagtttcaagcagaagttccaaaatggtctggtcctatttctagttcgaggataagaaaaccagtatcggtaactggatccagtgccgggaagttctagacacaggagttgtttgtggcaaatggcggagggcaccattgtttgttgttcaatcaagtgactgggactgttcgtgctcagttgtttgggatcctatccatgctgattgtgctgttccacaggaattggagaccgttaaagttcacgagcaactgaagtacataaataagctgaagaatcgtctaggtgacagcaatcagaaacgctgaaaaacggtactcttgctgtcctgcaccagtgctgtccacagatgggtgtcgataccgtgtaccaattttcctcggatgcctcggatgaagtgagagccagtagatatgaaatccgtgtctacgcatgacatcttgacacataaaaatgctccttccagtcaaccggcatacgttatacgagtttcagtgtcgtgtgtaaataagagaaagaaaaggcattttaaaaacaaaagccatagcaaaagcaaaaaaaggaggaggagaagaaaatactcgatgctgctggagaactacaactcggtgagatggaaacagaaaggtctgggttgtatcatgaggtgtaaactggggtggtgggcgtgtggccgtgtttgtgtgtgtgtttacagttttgtcacctccgctgcttgaattatgatgaccgaagaatggatcacaatgctatagtttgatttcttttacaaaaaaa

SEQ ID NO: 218486 - DNA, 1938 bp, Zea Mays
tttctcagcaccttcttgtgccgttcttcacccgtcgtctcctttccgcagcaaccatcagcgtccaacctcctctctcaccctctccgtttgcaacaaccgcccaacgccaggtgcccagatcggcgtcccttccagccattttccgcgtccttcgccggtgtcgaagcacccatcagtgtacctgcttcagttaatagttatctgatatctacccttggccaaagcaagctatctattgtgcctgtgatttttgttgggagctgtcatagttcagtttttggtaggaacggtcacagctctactcaactgaaggcatggctgtaaaatctagtagaagttcagatgaaagctatatagagcctctcctatgctggaagaaggaattcagatcatctgtaattaaaattgttgattcgtccttaaactcgagtttgatgtctgccgacagtatttgttcaattcctgcttcagaatatggtttctattttaataaacgaatgaagatggatgaggaatatgatcaccttctgacaaatggaaatatgaaagatagtagcacggcaaacttcacaaccactggatatgtctcatctccagagcgcaacatggatggtcaatcatgtatggttagttcaactacagaatttttagcaggatcacattctaatgttaatactggtcagccatcatcctcatcaagtgcaccatcttatatcagtcagagtattaaagaagcttgggagtgttcattgcctgatacaaatactccaaaaccattaacagagttaatatcagcgagggacctttgcatctccatcctcaaaaggaaaatatgttccgccaaagactcagaactaagcagaacatcaagtactatagaccgtgatgataatctaaacaatcctttatttgaatgcacaaaatgcggtctgatggaagatccatccaaaatgttaatttgtgattgttgtgaaggagcatttcatttattgtgttgcaatccacatgtcaagaaaataccagaggaagagtggtattgtttggcatgtaaaagaaagaaacctaagagacaacgtggaaagtttgcaaatcccaaagttgaatcatccaagggcattcaaagaccccgccgaggtcttggtcctattcgagatatgttactggattctgaatcatatgaaagtggggttcggattggtactaagtttcaagcagaagttccaaaatggtctggtcctatttctagttcgaggataagaaaaccagtatcggtaactggatccagtgccgggaagttctagacacaggagttgtttgtggcaaatggcggagggcaccattgtttgttgttcaatcaagtgactgggactgttcgtgctcagttgtttgggatcctatccatgctgattgtgctgttccacaggaattggagaccgttaaagttcacgagcaactgaagtacataaataagggtactcttgctgtcctgcaccagtgctgtccacagatgggtgtcgataccgtgtaccaattttcctcggatgcctcggatgaagtgagagccagtagatatgaaatccgtgtctacgcatgacatcttgacacataaaaatgctccttccagtcaaccggcatacgttatacgagtttcagtgtcgtgtgtaaataagagaaagaaaaggcattttaaaaacaaaagccatagcaaaagcaaaaaaaggaggaggagaagaaaatactcgatgctgctggagaactacaactcggtgagatggaaacagaaaggtctgggttgtatcatgaggtgtaaactggggtggtgggcgtgtggccgtgtttgtgtgtgtgtttacagttttgtcacctccgctgcttgaattatgatgaccgaagaatggatcacaatgctatagtttgatttcttttacaaaaaaa

SEQ ID NO: 218487 - DNA, 2040 bp, Zea Mays
tttctcagcaccttcttgtgccgttcttcacccgtcgtctcctttccgcagcaaccatcagcgtccaacctcctctctcaccctctccgtttgcaacaaccgcccaacgccaggtgcccagatcggcgtcccttccagccattttccgcgtccttcgccggtgtcgaagcacccatcagcagtgtacctgcttcagttaatagttatctgatatctacccttggccaaagcaagctatctattgtgcctgtgatttttgttgggagctgtcatagttcagtttttggtaggaacggtcacagctctactcaactgaaggcatggctgtaaaatctagtagaagttcagatgaaagctatatagagcctctcctatgctggaagaaggaattcagatcatctgtaattaaaattgttgattcgtccttaaactcgagtttgatgtctgccgacagtatttgttcaattcctgcttcagaatatggtttctattttaataaacgaatgaagatggatgaggaatatgatcaccttctgacaaatggaaatatgaaagatagtagcacggcaaacttcacaaccactggatatgtctcatctccagagcgcaacatggatggtcaatcatgtatggttagttcaactacagaatttttagcaggatcacattctaatgttaatactggtcagccatcatcctcatcaagtgcaccatcttatatcagtcagagtattaaagaagcttgggagtgttcattgcctgatacaaatactccaaaaccattaacagagttaatatcagcgagggacctttgcatctccatcctcaaaaggaaaatatgttccgccaaagactcagaactaagcagaacatcaagtactatagaccgtgatgataatctaaacaatcctttatttgaatgcacaaaatgcggtctgatggaagatccatccaaaatgttaatttgtgattgttgtgaaggagcatttcatttattgtgttgcaatccacatgtcaagaaaataccagaggaagagtggtattgtttggcatgtaaaagaaagaaacctaagagacaacgtggaaagtttgcaaatcccaaagttgaatcatccaagggcattcaaagaccccgccgaggtcttggtcctattcgagatatgttactggattctgaatcatatgaaagtggggttcggattggtactaagtttcaagcagaagttccaaaatggtctggtcctatttctagtagagaagatgagtttgctgagcccactgaacttgatcgtagtaaaacgacaatgctgagtttcgaggataagaaaaccagtatcggtaactggatccagtgccgggaagttctagacacaggagttgtttgtggcaaatggcggagggcaccattgtttgttgttcaatcaagtgactgggactgttcgtgctcagttgtttgggatcctatccatgctgattgtgctgttccacaggaattggagaccgttaaagttcacgagcaactgaagtacataaataagaatcgtctaggtgacagcaatcagaaacgctgaaaaacggtactcttgctgtcctgcaccagtgctgtccacagatgggtgtcgataccgtgtaccaattttcctcggatgcctcggatgaagtgagagccagtagatatgaaatccgtgtctacgcatgacatcttgacacataaaaatgctccttccagtcaaccggcatacgttatacgagtttcagtgtcgtgtgtaaataagagaaagaaaaggcattttaaaaacaaaagccatagcaaaagcaaaaaaaggaggaggagaagaaaatactcgatgctgctggagaactacaactcggtgagatggaaacagaaaggtctgggttgtatcatgaggtgtaaactggggtggtgggcgtgtggccgtgtttgtgtgtgtgtttacagttttgtcacctccgctgcttgaattatgatgaccgaagaatggatcacaatgctatagtttgatttcttttacaaaaaaa

SEQ ID NO: 218488 - DNA, 3194 bp, Zea Mays
cccgatccagctgtgcgcaagttactggtgtgcccggtgcgcgggccgcgtacatcctgcacagccgaaccacaaagccccccacccgaccatggaccaccagtccaccgcaaggcacactcctgtctccaccctgctccgctctttgctcccgctcccgctcccgctcgcctacgctacttgccgttcatcgccggccacagcctctgcccccgccgcttagagttcgcctccgtcgctgctgcaggagctagggtttccggcgccgggcgccggggtatgagcatccgccgccgccgccctgcaggatctaaggtttcgacgactccgctcactgatggagggtggtagaagggcgagcgagtccctctcggcatacacccatggaccatgacgatactgattttcagagccaaaattttcaactagctggtgtaggaagtagcaaattcccatcaggtttgcgaccatttgcactgccaaaacttgatatcgaggaccaactacaaggccatcttcgatttgataatttgatagattcagaagcatttttcagcgtacaagggcacgagaatagctggattgaggttctgtccactggaagcagtgttgttgattttagctctagcgcagctgaatcttgctcgatatctaaaactaataatgtctggtcagaggcaacgtccacagaatctgtcgaaatgctattgaaatcagtgggaggaaatgagacaactggtaacatggacagtaatgctcaccttcagttaattggtatggacagtcaaactgatcaatcgagtgttcatcctaaatctagtacctccccgacagatagtactgtagtgccaactgagaaagatcagtcttggagcactcattctagaatgactgctgacctttcaaacactgagtctcagcttgaacattttgtgcctttcttactggacaagaaagctgcgcaggcagcagattctgttgctgagaagtgccttacaggtgagaagttgtcctcttcaaacaacacaccaggaagctgcccaactgttggcaactattttggggcaggccatgatgataattctttggacaaatttaatgtaccctcagctgaagtagattcaaagaaattgaataatgaatctttcccagagttggctcccctgcagaacatatatactgattcatatcacttcaagaaagatattaaagaatctgaggctgttgttactcctcaagattcgaagttttgccatatcaatgaaaataaagttgaaggtggactacaagaactgcaaaatttgtcatgtgctggtcagtccttgggcgctgtaaacttgtccagtccaccaagcaatgaaactctattgtcaaaaagttctgatggattactagaagccatcacaaatccagttaagatgctgcacaggagcgatgatacttgccataaagtgaacatcactcttcaaccatcttttttagcagtgcaacatggaactgaaggcctgaaaagttcagttcacaggagcaatgagcttgttgttaaggagtttagtattggttcaaattctcttatctctcaccaatctgaggcagacccaagaaattctaatccacatcctgtcagttctgtgtctcccaaaagtaaaattaccgatgccacttgtgttcctgaagaaacaaacaacactgaaacgaatagtacaaacacctgctatacatatgatgaatcaaaacatgtagtgctggagtacaatcaaggttctgttgacaagctaaaaagtggtgacatgggagaaaaggcaactggggaggaaataccagcagtttcagggagcattgagcaaatgatagaaaattatcatgaagaaaatgctactggtacatccaacaataaggttggcctttccgacagtattgcacctgaaaactgtgcagctgacactttgaatgcttcagaggaaccaaacagtccttcgttaaatcatgagaggtcatttgaggaacacgaattgcctgctttaggagaggagcctaaaagcacaaatttactcctttctacttctgggtttcaagagaaaatttcagcatcagtgatcagttctagcagtggtgtcatgcctaccattgttactgacaacgttgctacttctgaggataataatggttgttcaataggtgtttcttctgttgattcttctgttttactagacgaaaaggatttgagaacgtccacagtgaataatgaggagccattcaaggaaggcactaaatctgctttaggagatcaagaaaacgatggtatttctcctggctctgaacaaggaggggaaatgccagctgtgcccatggattcaaacattgccgtttatagtgatactgtttctgctacagaaaaggagaaatacaaggaccatcctaattctttgggtagtttgaccacaggaggaacccaggataaatcaggtaaccatccagatgctctttcactgaaatgccagactggtagatcttcaatacatacagatcttatagatccaaccacggcacctatgttaggtatcccaactggaaaggtggctgaaaagatagtaaaaactccactgaatgcaagtgatgatttgaatgcacatatgcaagacatagtgttaaatcatggtacggattgtagtcctggtactgtgacatcccaaggaaaggaaggctcaagcttgctggaacctggtaatggtatctgcactggggttacatgcggatccccttcagtgattagttgcgctgaatcgtttccccaaggtggtggaaatggcagcaatgatttacttgatcacacactatgtgggcaatctgaggatcctaaagaccgtggggcctcagctgatgctactcagagatcaaaacaatgctgtaccagaaacatgaaatctgctcctggttctgaggagactagtgcagcaggaggtgatagaagcttttcatttgaggtgggagctccacccaatgttgctgagaaagcacatagctctgtttggagtccttttcatttgaagagtactgagacggtcacagaaaatcttcaagctggaagttctttgaaggatactagtgatgataatttagtgaattttccattcacagaggcacagcatttgcagctacgcgcacaaatatttgtttatggagctcttatgtga

SEQ ID NO: 218489 - DNA, 3260 bp, Zea Mays
cccgatccagctgtgcgcaagttactggtgtgcccggtgcgcgggccgcgtacatcctgcacagccgaaccacaaagccccccacccgaccatggaccaccagtccaccgcaaggcacactcctgtctccaccctgctccgctctttgctcccgctcccgctcccgctcgcctacgctacttgccgttcatcgccggccacagcctctgcccccgccgcttagagttcgcctccgtcgctgctgcaggagctagggtttccggcgccgggcgccggggtatgagcatccgccgccgccgccctgcaggatctaaggtttcgacgactccgctcactgatggagggtggtagaagggcgagcgagtccctctcggcatacacccatggaccatgacgatactgattttcagagccaaaattttcaactagctggtgtaggaagtagcaaattcccatcaggtttgcgaccatttgcactgccaaaacttgatatcgaggaccaactacaaggccatcttcgatttgataatttgatagattcagaagcatttttcagcgtacaagggcacgagaatagctggattgaggttctgtccactggaagcagtgttgttgattttagctctagcgcagctgaatcttgctcgatatctaaaactaataatgtctggtcagaggcaacgtccacagaatctgtcgaaatgctattgaaatcagtgggaggaaatgagacaactggtaacatggacagtaatgctcaccttcagttaattggtatggacagtcaaactgatcaatcgagtgttcatcctaaatctagtacctccccgacagatagtactgtagtgccaactgagaaagatcagtcttggagcactcattctagaatgactgctgacctttcaaacactgagtctcagcttgaacattttgtgcctttcttactggacaagaaagctgcgcaggcagcagattctgttgctgagaagtgccttacaggtgagaagttgtcctcttcaaacaacacaccaggaagctgcccaactgttggcaactattttggggcaggccatgatgataattctttggacaaatttaatgtaccctcagctgaagtagattcaaagaaattgaataatgaatctttcccagagttggctcccctgcagaacatatatactgattcatatcacttcaagaaagatattaaagaatctgaggctgttgttactcctcaagattcgaagttttgccatatcaatgaaaataaagttgaaggtggactacaagaactgcaaaatttgtcatgtgctggtcagtccttgggcgctgtaaacttgtccagtccaccaagcaatgaaactctattgtcaaaaagttctgatggattactagaagccatcacaaatccagttaagatgctgcacaggagcgatgatacttgccataaagtgaacatcactcttcaaccatcttttttagcagtgcaacatggaactgaaggcctgaaaagttcagttcacaggagcaatgagcttgttgttaaggagtttagtattggttcaaattctcttatctctcaccaatctgaggcagacccaagaaattctaatccacatcctgtcagttctgtgtctcccaaaagtaaaattaccgatgccacttgtgttcctgaagaaacaaacaacactgaaacgaatagtacaaacacctgctatacatatgatgaatcaaaacatgtagtgctggagtacaatcaaggttctgttgacaagctaaaaagtggtgacatgggagaaaaggcaactggggaggaaataccagcagtttcagggagcattgagcaaatgatagaaaattatcatgaagaaaatgctactggtacatccaacaataaggttggcctttccgacagtattgcacctgaaaactgtgcagctgacactttgaatgcttcagaggaaccaaacagtccttcgttaaatcatgagaggtcatttgaggaacacgaattgcctgctttaggagaggagcctaaaagcacaaatttactcctttctacttctgggtttcaagagaaaatttcagcatcagtgatcagttctagcagtggtgtcatgcctaccattgttactgacaacgttgctacttctgaggataataatggttgttcaataggtgtttcttctgttgattcttctgttttactagacgaaaaggatttgagaacgtccacagtgaataatgaggagccattcaaggaaggcactaaatctgctttaggagatcaagaaaacgatggtatttctcctggctctgaacaaggaggggaaatgccagctgtgcccatggattcaaacattgccgtttatagtgatactgtttctgctacagaaaaggagaaatacaaggaccatcctaattctttgggtagtttgaccacaggaggaacccaggataaatcaggtatcccaactggaaaggtggctgaaaagatagtaaaaactccactgaatgcaagtgatgatttgaatgcacatatgcaagacatagtgttaaatcatggtacggattgtagtcctggtactgtgacatcccaaggaaaggaaggctcaagcttgctggaacctggtaatggtatctgcactggggttacatgcggatccccttcagtgattagttgcgctgaatcgtttccccaaggtggtggaaatggcagcaatgatttacttgatcacacactatgtgggcaatctgaggatcctaaagaccgtggggcctcagctgatgctactcagagatcaaaacaatgctgtaccagaaacatgaaatctgctcctggttctgaggagactagtgcagcaggaggtgatagaagcttttcatttgaggtgggagctccacccaatgttgctgagaaagcacatagctctgtttggagtccttttcatttgaagagtactgagacggtcacagaaaatcttcaagctggaagttctttgaaggatactagtgatgatagtaagaaaacatctactatagatgcttgtaaagaacaactatcagaaaggaaagtggctgaaagttctgggggcagccccccagacaactctaatataggcggcagcattaagagcagaagttcgccaccgcagcagcatccaatccctgagtgttctgatttagtgaattttccattcacagaggcacagcatttgcagctacgcgcacaaatatttgtttatggagctcttatgtga

SEQ ID NO: 218490 - DNA, 3268 bp, Zea Mays
cccgatccagctgtgcgcaagttactggtgtgcccggtgcgcgggccgcgtacatcctgcacagccgaaccacaaagccccccacccgaccatggaccaccagtccaccgcaaggcacactcctgtctccaccctgctccgctctttgctcccgctcccgctcccgctcgcctacgctacttgccgttcatcgccggccacagcctctgcccccgccgcttagagttcgcctccgtcgctgctgcaggagctagggtttccggcgccgggcgccggggtatgagcatccgccgccgccgccctgcaggatctaaggtttcgacgactccgctcactgatggagggtggtagaagggcgagcgagtccctctcggcatacacccatggaccatgacgatactgattttcagagccaaaattttcaactagctggtgtaggaagtagcaaattcccatcaggtttgcgaccatttgcactgccaaaacttgatatcgaggaccaactacaaggccatcttcgatttgataatttgatagattcagaagcatttttcagcgtacaagggcacgagaatagctggattgaggttctgtccactggaagcagtgttgttgattttagctctagcgcagctgaatcttgctcgatatctaaaactaataatgtctggtcagaggcaacgtccacagaatctgtcgaaatgctattgaaatcagtgggaggaaatgagacaactggtaacatggacagtaatgctcaccttcagttaattggtatggacagtcaaactgatcaatcgagtgttcatcctaaatctagtacctccccgacagatagtactgtagtgccaactgagaaagatcagtcttggagcactcattctagaatgactgctgacctttcaaacactgagtctcagcttgaacattttgtgcctttcttactggacaagaaagctgcgcaggcagcagattctgttgctgagaagtgccttacaggtgagaagttgtcctcttcaaacaacacaccaggaagctgcccaactgttggcaactattttggggcaggccatgatgataattctttggacaaatttaatgtaccctcagctgaagtagattcaaagaaattgaataatgaatctttcccagagttggctcccctgcagaacatatatactgattcatatcacttcaagaaagatattaaagaatctgaggctgttgttactcctcaagattcgaagttttgccatatcaatgaaaataaagttgaaggtggactacaagaactgcaaaatttgtcatgtgctggtcagtccttgggcgctgtaaacttgtccagtccaccaagcaatgaaactctattgtcaaaaagttctgatggattactagaagccatcacaaatccagttaagatgctgcacaggagcgatgatacttgccataaagtgaacatcactcttcaaccatcttttttagcagtgcaacatggaactgaaggcctgaaaagttcagttcacaggagcaatgagcttgttgttaaggagtttagtattggttcaaattctcttatctctcaccaatctgaggcagacccaagaaattctaatccacatcctgtcagttctgtgtctcccaaaagtaaaattaccgatgccacttgtgttcctgaagaaacaaacaacactgaaacgaatagtacaaacacctgctatacatatgatgaatcaaaacatgtagtgctggagtacaatcaaggttctgttgacaagctaaaaagtggtgacatgggagaaaaggcaactggggaggaaataccagcagtttcagggagcattgagcaaatgatagaaaattatcatgaagaaaatgctactggtacatccaacaataaggttggcctttccgacagtattgcacctgaaaactgtgcagctgacactttgaatgcttcagaggaaccaaacagtccttcgttaaatcatgagaggtcatttgaggaacacgaattgcctgctttaggagaggagcctaaaagcacaaatttactcctttctacttctgggtttcaagagaaaatttcagcatcagtgatcagttctagcagtggtgtcatgcctaccattgttactgacaacgttgctacttctgaggataataatggttgttcaataggtgtttcttctgttgattcttctgttttactagacgaaaaggatttgagaacgtccacagtgaataatgaggagccattcaaggaaggcactaaatctgctttaggagatcaagaaaacgatggtatttctcctggctctgaacaaggaggggaaatgccagctgtgcccatggattcaaacattgccgtttatagtgatactgtttctgctacagaaaaggagaaatacaaggaccatcctaattctttgggtagtttgaccacaggaggaacccaggataaatcaggtaaccatccagatgctctttcactgaaatgccagactggtagatcttcaatacatacagatcttatagatccaaccacggcacctatgttaggtatcccaactggaaaggtggctgaaaagatagtaaaaactccactgaatgcaagtgatgatttgaatgcacatatgcaagacatagtgttaaatcatggtacggattgtagtcctggtactgtgacatcccaaggaaaggaaggctcaagcttgctggaacctggtaatggtatctgcactggggttacatgcggatccccttcagtgattagttgcgctgaatcgtttccccaaggtggtggaaatggcagcaatgatttacttgatcacacactatgtgggcaatctgaggatcctaaagaccgtggggcctcagctgatgctactcagagatcaaaacaatgctgtaccagaaacatgaaatctgctcctggttctgaggagactagtgcagcaggaggtgatagaagcttttcatttgagaaaatcttcaagctggaagttctttgaaggatactagtgatgatagtaagaaaacatctactatagatgcttgtaaagaacaactatcagaaaggaaagtggctgaaagttctgggggcagccccccagacaactctaatataggcggcagcattaagagcagaagttcgccaccgcagcagcatccaatccctgagtgttctgatttagtgaattttccattcacagaggcacagcatttgcagctacgcgcacaaatatttgtttatggagctcttatgtga

SEQ ID NO: 218491 - DNA, 3278 bp, Zea Mays
cccgatccagctgtgcgcaagttactggtgtgcccggtgcgcgggccgcgtacatcctgcacagccgaaccacaaagccccccacccgaccatggaccaccagtccaccgcaaggcacactcctgtctccaccctgctccgctctttgctcccgctcccgctcccgctcgcctacgctacttgccgttcatcgccggccacagcctctgcccccgccgcttagagttcgcctccgtcgctgctgcaggagctagggtttccggcgccgggcgccggggtatgagcatccgccgccgccgccctgcaggatctaaggtttcgacgactccgctcactgatggagggtggtagaagggcgagcgagtccctctcggcatacacccatggaccatgacgatactgattttcagagccaaaattttcaactagctggtgtaggaagtagcaaattcccatcaggtttgcgaccatttgcactgccaaaacttgatatcgaggaccaactacaaggccatcttcgatttgataatttgatagattcagaagcatttttcagcgtacaagggcacgagaatagctggattgaggttctgtccactggaagcagtgttgttgattttagctctagcgcagctgaatcttgctcgatatctaaaactaataatgtctggtcagaggcaacgtccacagaatctgtcgaaatgctattgaaatcagtgggaggaaatgagacaactggtaacatggacagtaatgctcaccttcagttaattggtatggacagtcaaactgatcaatcgagtgttcatcctaaatctagtacctccccgacagatagtactgtagtgccaactgagaaagatcagtcttggagcactcattctagaatgactgctgacctttcaaacactgagtctcagcttgaacattttgtgcctttcttactggacaagaaagctgcgcaggcagcagattctgttgctgagaagtgccttacaggtgagaagttgtcctcttcaaacaacacaccaggaagctgcccaactgttggcaactattttggggcaggccatgatgataattctttggacaaatttaatgtaccctcagctgaagtagattcaaagaaattgaataatgaatctttcccagagttggctcccctgcagaacatatatactgattcatatcacttcaagaaagatattaaagaatctgaggctgttgttactcctcaagattcgaagttttgccatatcaatgaaaataaagttgaaggtggactacaagaactgcaaaatttgtcatgtgctggtcagtccttgggcgctgtaaacttgtccagtccaccaagcaatgaaactctattgtcaaaaagttctgatggattactagaagccatcacaaatccagttaagatgctgcacaggagcgatgatacttgccataaagtgaacatcactcttcaaccatcttttttagcagtgcaacatggaactgaaggcctgaaaagttcagttcacaggagcaatgagcttgttgttaaggagtttagtattggttcaaattctcttatctctcaccaatctgaggcagacccaagaaattctaatccacatcctgtcagttctgtgtctcccaaaagtaaaattaccgatgccacttgtgttcctgaagaaacaaacaacactgaaacgaatagtacaaacacctgctatacatatgatgaatcaaaacatgtagtgctggagtacaatcaaggttctgttgacaagctaaaaagtggtgacatgggagaaaaggcaactggggaggaaataccagcagtttcagggagcattgagcaaatgatagaaaattatcatgaagaaaatgctactggtacatccaacaataaggttggcctttccgacagtattgcacctgaaaactgtgcagctgacactttgaatgcttcagaggaaccaaacagtccttcgttaaatcatgagaggtcatttgaggaacacgaattgcctgctttaggagaggagcctaaaagcacaaatttactcctttctacttctgggtttcaagagaaaatttcagcatcagtgatcagttctagcagtggtgtcatgcctaccattgttactgacaacgttgctacttctgaggataataatggttgttcaataggtgtttcttctgttgattcttctgttttactagacgaaaaggatttgagaacgtccacagtgaataatgaggagccattcaaggaaggcactaaatctgctttaggagatcaagaaaacgatggtatttctcctggctctgaacaaggaggggaaatgccagctgtgcccatggattcaaacattgccgtttatagtgatactgtttctgctacagaaaaggagaaatacaaggaccatcctaattctttgggtagtttgaccacaggaggaacccaggataaatcaggtaaccatccagatgctctttcactgaaatgccagactggtagatcttcaatacatacagatcttatagatccaaccacggcacctatgttaggtatcccaactggaaaggtggctgaaaagatagtaaaaactccactgaatgcaagtgatgatttgaatgcacatatgcaagacatagtgttaaatcatggtacggattgtagtcctggtactgtgacatcccaaggaaaggaaggctcaagcttgctggaacctggtaatggtatctgcactggggttacatgcggatccccttcagtgattagttgcgctgaatcgtttccccaaggtggtggaaatggcagcaatgatttacttgatcacacactatgtgggcaatctgaggatcctaaagaccgtggggcctcagctgatgctactcagagatcaaaacaatgctgtaccagaaacatgaaatctgctcctggttctgaggagactagtgcagcaggaggtgatagaagcttttcatttgagacggtcacagaaaatcttcaagctggaagttctttgaaggatactagtgatgatagtaagaaaacatctactatagatgcttgtaaagaacaactatcagaaaggaaagtggctgaaagttctgggggcagccccccagacaactctaatataggcggcagcattaagagcagaagttcgccaccgcagcagcatccaatccctgagtgttctgatttagtgaattttccattcacagaggcacagcatttgcagctacgcgcacaaatatttgtttatggagctcttatgtga

SEQ ID NO: 218492 - DNA, 3260 bp, Zea Mays
cccgatccagctgtgcgcaagttactggtgtgcccggtgcgcgggccgcgtacatcctgcacagccgaaccacaaagccccccacccgaccatggaccaccagtccaccgcaaggcacactcctgtctccaccctgctccgctctttgctcccgctcccgctcccgctcgcctacgctacttgccgttcatcgccggccacagcctctgcccccgccgcttagagttcgcctccgtcgctgctgcaggagctagggtttccggcgccgggcgccggggtatgagcatccgccgccgccgccctgcaggatctaaggtttcgacgactccgctcactgatggagggtggtagaagggcgagcgagtccctctcggcatacacccatggaccatgacgatactgattttcagagccaaaattttcaactagctggtgtaggaagtagcaaattcccatcaggtttgcgaccatttgcactgccaaaacttgatatcgaggaccaactacaaggccatcttcgatttgataatttgatagattcagaagcatttttcagcgtacaagggcacgagaatagctggattgaggttctgtccactggaagcagtgttgttgattttagctctagcgcagctgaatcttgctcgatatctaaaactaataatgtctggtcagaggcaacgtccacagaatctgtcgaaatgctattgaaatcagtgggaggaaatgagacaactggtaacatggacagtaatgctcaccttcagttaattggtatggacagtcaaactgatcaatcgagtgttcatcctaaatctagtacctccccgacagatagtactgtagtgccaactgagaaagatcagtcttggagcactcattctagaatgactgctgacctttcaaacactgagtctcagcttgaacattttgtgcctttcttactggacaagaaagctgcgcaggcagcagattctgttgctgagaagtgccttacaggtgagaagttgtcctcttcaaacaacacaccaggaagctgcccaactgttggcaactattttggggcaggccatgatgataattctttggacaaatttaatgtaccctcagctgaagtagattcaaagaaattgaataatgaatctttcccagagttggctcccctgcagaacatatatactgattcatatcacttcaagaaagatattaaagaatctgaggctgttgttactcctcaagattcgaagttttgccatatcaatgaaaataaagttgaaggtggactacaagaactgcaaaatttgtcatgtgctggtcagtccttgggcgctgtaaacttgtccagtccaccaagcaatgaaactctattgtcaaaaagttctgatggattactagaagccatcacaaatccagttaagatgctgcacaggagcgatgatacttgccataaagtgaacatcactcttcaaccatcttttttagcagtgcaacatggaactgaaggcctgaaaagttcagttcacaggagcaatgagcttgttgttaaggagtttagtattggttcaaattctcttatctctcaccaatctgaggcagacccaagaaattctaatccacatcctgtcagttctgtgtctcccaaaagtaaaattaccgatgccacttgtgttcctgaagaaacaaacaacactgaaacgaatagtacaaacacctgctatacatatgatgaatcaaaacatgtagtgctggagtacaatcaaggttctgttgacaagctaaaaagtggtgacatgggagaaaaggcaactggggaggaaataccagcagtttcagggagcattgagcaaatgatagaaaattatcatgaagaaaatgctactggtacatccaacaataaggttggcctttccgacagtattgcacctgaaaactgtgcagctgacactttgaatgcttcagaggaaccaaacagtccttcgttaaatcatgagaggtcatttgaggaacacgaattgcctgctttaggagaggagcctaaaagcacaaatttactcctttctacttctgggtttcaagagaaaatttcagcatcagtgatcagttctagcagtggtgtcatgcctaccattgttactgacaacgttgctacttctgaggataataatggttgttcaataggtgtttcttctgttgattcttctgttttactagacgaaaaggatttgagaacgtccacagtgaataatgaggagccattcaaggaaggcactaaatctgctttaggagatcaagaaaacgatgaaaaggagaaatacaaggaccatcctaattctttgggtagtttgaccacaggaggaacccaggataaatcaggtaaccatccagatgctctttcactgaaatgccagactggtagatcttcaatacatacagatcttatagatccaaccacggcacctatgttaggtatcccaactggaaaggtggctgaaaagatagtaaaaactccactgaatgcaagtgatgatttgaatgcacatatgcaagacatagtgttaaatcatggtacggattgtagtcctggtactgtgacatcccaaggaaaggaaggctcaagcttgctggaacctggtaatggtatctgcactggggttacatgcggatccccttcagtgattagttgcgctgaatcgtttccccaaggtggtggaaatggcagcaatgatttacttgatcacacactatgtgggcaatctgaggatcctaaagaccgtggggcctcagctgatgctactcagagatcaaaacaatgctgtaccagaaacatgaaatctgctcctggttctgaggagactagtgcagcaggaggtgatagaagcttttcatttgaggtgggagctccacccaatgttgctgagaaagcacatagctctgtttggagtccttttcatttgaagagtactgagacggtcacagaaaatcttcaagctggaagttctttgaaggatactagtgatgatagtaagaaaacatctactatagatgcttgtaaagaacaactatcagaaaggaaagtggctgaaagttctgggggcagccccccagacaactctaatataggcggcagcattaagagcagaagttcgccaccgcagcagcatccaatccctgagtgttctgatttagtgaattttccattcacagaggcacagcatttgcagctacgcgcacaaatatttgtttatggagctcttatgtga

SEQ ID NO: 218493 - DNA, 3343 bp, Zea Mays
cccgatccagctgtgcgcaagttactggtgtgcccggtgcgcgggccgcgtacatcctgcacagccgaaccacaaagccccccacccgaccatggaccaccagtccaccgcaaggcacactcctgtctccaccctgctccgctctttgctcccgctcccgctcccgctcgcctacgctacttgccgttcatcgccggccacagcctctgcccccgccgcttagagttcgcctccgtcgctgctgcaggagctagggtttccggcgccgggcgccggggtatgagcatccgccgccgccgccctgcaggatctaaggtttcgacgactccgctcactgatggagggtggtagaagggcgagcgagtccctctcggcatacacccatggaccatgacgatactgattttcagagccaaaattttcaactagctggtgtaggaagtagcaaattcccatcaggtttgcgaccatttgcactgccaaaacttgatatcgaggaccaactacaaggccatcttcgatttgataatttgatagattcagaagcatttttcagcgtacaagggcacgagaatagctggattgaggttctgtccactggaagcagtgttgttgattttagctctagcgcagctgaatcttgctcgatatctaaaactaataatgtctggtcagaggcaacgtccacagaatctgtcgaaatgctattgaaatcagtgggaggaaatgagacaactggtaacatggacagtaatgctcaccttcagttaattggtatggacagtcaaactgatcaatcgagtgttcatcctaaatctagtacctccccgacagatagtactgtagtgccaactgagaaagatcagtcttggagcactcattctagaatgactgctgacctttcaaacactgagtctcagcttgaacattttgtgcctttcttactggacaagaaagctgcgcaggcagcagattctgttgctgagaagtgccttacaggtgagaagttgtcctcttcaaacaacacaccaggaagctgcccaactgttggcaactattttggggcaggccatgatgataattctttggacaaatttaatgtaccctcagctgaagtagattcaaagaaattgaataatgaatctttcccagagttggctcccctgcagaacatatatactgattcatatcacttcaagaaagatattaaagaatctgaggctgttgttactcctcaagattcgaagttttgccatatcaatgaaaataaagttgaaggtggactacaagaactgcaaaatttgtcatgtgctggtcagtccttgggcgctgtaaacttgtccagtccaccaagcaatgaaactctattgtcaaaaagttctgatggattactagaagccatcacaaatccagttaagatgctgcacaggagcgatgatacttgccataaagtgaacatcactcttcaaccatcttttttagcagtgcaacatggaactgaaggcctgaaaagttcagttcacaggagcaatgagcttgttgttaaggagtttagtattggttcaaattctcttatctctcaccaatctgaggcagacccaagaaattctaatccacatcctgtcagttctgtgtctcccaaaagtaaaattaccgatgccacttgtgttcctgaagaaacaaacaacactgaaacgaatagtacaaacacctgctatacatatgatgaatcaaaacatgtagtgctggagtacaatcaaggttctgttgacaagctaaaaagtggtgacatgggagaaaaggcaactggggaggaaataccagcagtttcagggagcattgagcaaatgatagaaaattatcatgaagaaaatgctactggtacatccaacaataaggttggcctttccgacagtattgcacctgaaaactgtgcagctgacactttgaatgcttcagaggaaccaaacagtccttcgttaaatcatgagaggtcatttgaggaacacgaattgcctgctttaggagaggagcctaaaagcacaaatttactcctttctacttctgggtttcaagagaaaatttcagcatcagtgatcagttctagcagtggtgtcatgcctaccattgttactgacaacgttgctacttctgaggataataatggttgttcaataggtgtttcttctgttgattcttctgttttactagacgaaaaggatttgagaacgtccacagtgaataatgaggagccattcaaggaaggcactaaatctgctttaggagatcaagaaaacgatggtatttctcctggctctgaacaaggaggggaaatgccagctgtgcccatggattcaaacattgccgtttatagtgatactgtttctgctacagaaaaggagaaatacaaggaccatcctaattctttgggtagtttgaccacaggaggaacccaggataaatcaggtaaccatccagatgctctttcactgaaatgccagactggtagatcttcaatacatacagatcttatagatccaaccacggcacctatgttaggtatcccaactggaaaggtggctgaaaagatagtaaaaactccactgaatgcaagtgatgatttgaatgcacatatgcaagacatagtgttaaatcatggtacggattgtagtcctggtactgtgacatcccaaggaaaggaaggctcaagcttgctggaacctggtaatggtatctgcactggggttacatgcggatccccttcagtgattagttgcgctgaatcgtttccccaaggtggtggaaatggcagcaatgatttacttgatcacacactatgtgggcaatctgaggatcctaaagaccgtggggcctcagctgatgctactcagagatcaaaacaatgctgtaccagaaacatgaaatctgctcctggttctgaggagactagtgcagcaggaggtgatagaagcttttcatttgaggtgggagctccacccaatgttgctgagaaagcacatagctctgtttggagtccttttcatttgaagagtactgagaaaatcttcaagctggaagttctttgaaggatactagtgatgatagtaagaaaacatctactatagatgcttgtaaagaacaactatcagaaaggaaagtggctgaaagttctgggggcagccccccagacaactctaatataggcggcagcattaagagcagaagttcgccaccgcagcagcatccaatccctgagtgttctgatttagtgaattttccattcacagaggcacagcatttgcagctacgcgcacaaatatttgtttatggagctcttatgtga

SEQ ID NO: 218494 - DNA, 1709 bp, Zea Mays
cggcctccgagaagcagcgcaggcgcagggcattccagaacgttcggcggcggcgaggcgacacgcccaccaccagtcagccgccccgccacagccatgcgcctccacgccggcgcacgcctcgcgctcctgctcgcccgccgctccctctcctcctccccccgtatcccgcgggtgcacacagagggatacggagcgaggcgccctcccggagctctcccttctatccgccgagcagcgcccgcaggtccttccacgggaccaggccggtggcggcaagggactactacgatgtgctcggcgtcagcaagagcgccagccaggcggagatcaaaaaggcctattatgggcttgcaaagaagctccatccagacacaaataaaggtgatgcggatgcagaacgcaagtttcaagaggttcaacgagcttatgagactctaaaggatgaacaaaaaagatcattatatgatcaggttggccctgatcagtatgagaaaactgcttctggcggaggcggaactggcttcgagggtggttttggaaatccatttgaggatatttttggtggtggcggtggcggtggtggaatgaatgatttctttaggaacatttttggggatagggactttagaggacgagatgttaaggttgcactcgaactatcatttatggaagcagttcaagggtgcagcaaaacggtcaccttccaaacgtctgtaacatgtgaaatctgtggtggagccggtgtgcctcctggaaccacacctgaaacatgtctatcttgcaggggttcaggatttatattcatgcaaaccgggcccttcaggatgcaatcaacctgcacaaaatgtggtggttctgggaaaactgtgaaggaattctgcaaggcatgcagaggaaacaaagttgtgcctggaaggaaatcagtccgccttgacatactgcctggtttggataatgaggataccataaaggtggttcgatcaggtggagaagacccagatggccgtccaggtgatctttatgtgaccctcgaggttcgtgaggatcctgttttccgaagagagaaaggtgatattcatgttgatgctgtcctgaatgtgactcaggcaattttgggagggacagttcaagtcccaactctcagtggagacgttgttctaaaggtcaagcccggtactcaacctggtcagaaggtagttctgagaggaaaagggatcaagacaagaaactcaccgcactacggagatcaatatgtccatttcaatgtcaacatccccgaaaatttgacgtctagacagcgggagctgatcgaggaattcgcgaaggaggagcaaggcgaagacgagaaggacgccaaggcagcagctggagcatcggggggatagccggttttaggagccacagtagtgccttttagctggtatttataccgtgaccatagacctgtctcaaattcgcagcgaaaaaaatatatagataggtctttgtttcggattttgtagctggaataaatggataatacgtctagaactgattttctgtcttctttttcgtgagtctgctaagcatgatcccttcctcgcacggtgcacctctccctcctcttctcgcttcctgcaggccaacccgacaggtcatcgatagcagcacaattatacaaagcggaagctaaaatcatggttatagttgttagctttaaacatata

SEQ ID NO: 218495 - DNA, 1731 bp, Zea Mays
cggcctccgagaagcagcgcaggcgcagggcattccagaacgttcggcggcggcgaggcgacacgcccaccaccagtcagccgccccgccacagccatgcgcctccacgccggcgcacgcctcgcgctcctgctcgcccgccgctccctctcctcctccccccgtatcccgcgggtgcacacagcttgtcgcgctccccgctctacagggatacggagcgaggcgccctcccggagctctcccttctatccgccgagcagcgcccgcaggtccttccacgggaccaggccggtggcggcaagggactactacgatgtgctcggcgtcagcaagagcgccagccaggcggagatcaaaaaggcctattatgggcttgcaaagaagctccatccagacacaaataaaggtgatgcggatgcagaacgcaagtttcaagaggttcaacgagcttatgagactctaaaggatgaacaaaaaagatcattatatgatcaggttggccctgatcagtatgagaaaactgcttctggcggaggcggaactggcttcgagggtggttttggaaatccatttgaggatatttttggtggtggcggtggcggtggtggaatgaatgatttctttaggaacatttttggggatagggactttagaggacgagatgttaaggttgcactcgaactatcatttatggaagcagttcaagggtgcagcaaaacggtcaccttccaaacgtctgtaacatgtgaaatctgtggtggagccggtgtgcctcctggaaccacacctgaaacatgtctatcttgcaggggttcaggatttatattcatgcaaaccgggcccttcaggatgcaatcaacctgcacaaaatgtggtggttctgggaaaactgtgaaggaattctgcaaggcatgcagaggaaacaaagttgtgcctggaaggaaatcagtccgccttgacatactgcctggtttggataatgaggataccataaaggtggttcgatcaggtggagaagacccagatggccgtccaggtgatctttatgtgaccctcgaggttcgtgaggatcctgttttccgaagagagaaaggtgatattcatgttgatgctgtcctgaatgtgactcaggcaattttgggagggacagttcaagtcccaactctcagtggagacgttgttctaaaggtcaagcccggtactcaacctggtcagaaggtagttctgagaggaaaagggatcaagacaagaaactcaccgcactacggagatcaatatgtccatttcaatgtcaacatccccgaaaatttgacgtctagacagcgggagctgatcgaggaattcgcgaaggaggagcaaggcgaagacgagaaggacgccaaggcagcagctggagcatcggggggatagccggttttaggagccacagtagtgccttttagctggtatttataccgtgaccatagacctgtctcaaattcgcagcgaaaaaaatatatagataggtctttgtttcggattttgtagctggaataaatggataatacgtctagaactgattttctgtcttctttttcgtgagtctgctaagcatgatcccttcctcgcacggtgcacctctccctcctcttctcgcttcctgcaggccaacccgacaggtcatcgatagcagcacaattatacaaagcggaagctaaaatcatggttatagttgttagctttaaacatata

SEQ ID NO: 218496 - DNA, 1676 bp, Zea Mays
cggcctccgagaagcagcgcaggcgcagggcattccagaacgttcggcggcggcgaggcgacacgcccaccaccagtcagccgccccgccacagccatgcgcctccacgccggcgcacgcctcgcgctcctgctcgcccgccgctccctctcctcctccccccgtatcccgcgggtgcacacagggatacggagcgaggcgccctcccggagctctcccttctatccgccgagcagcgcccgcaggtccttccacgggaccaggccggtggcggcaagggactactacgatgtgctcggcgtcagcaagagcgccagccaggcggagatcaaaaaggcctattatgggcttgcaaagaagctccatccagacacaaataaaggtgatgcggatgcagaacgcaagtttcaagaggttcaacgagcttatgagactctaaaggatgaacaaaaaagatcattatatgatcaggttggccctgatcagtatgagaaaactgcttctggcggaggcggaactggcttcgagggtggttttggaaatccatttgaggatatttttggtggtggcggtggcggtggtggaatgaatgatttctttaggaacatttttggggatagggactttagaggacgagatgttaagttcaagggtgcagcaaaacggtcaccttccaaacgtctgtaacatgtgaaatctgtggtggagccggtgtgcctcctggaaccacacctgaaacatgtctatcttgcaggggttcaggatttatattcatgcaaaccgggcccttcaggatgcaatcaacctgcacaaaatgtggtggttctgggaaaactgtgaaggaattctgcaaggcatgcagaggaaacaaagttgtgcctggaaggaaatcagtccgccttgacatactgcctggtttggataatgaggataccataaaggtggttcgatcaggtggagaagacccagatggccgtccaggtgatctttatgtgaccctcgaggttcgtgaggatcctgttttccgaagagagaaaggtgatattcatgttgatgctgtcctgaatgtgactcaggcaattttgggagggacagttcaagtcccaactctcagtggagacgttgttctaaaggtcaagcccggtactcaacctggtcagaaggtagttctgagaggaaaagggatcaagacaagaaactcaccgcactacggagatcaatatgtccatttcaatgtcaacatccccgaaaatttgacgtctagacagcgggagctgatcgaggaattcgcgaaggaggagcaaggcgaagacgagaaggacgccaaggcagcagctggagcatcggggggatagccggttttaggagccacagtagtgccttttagctggtatttataccgtgaccatagacctgtctcaaattcgcagcgaaaaaaatatatagataggtctttgtttcggattttgtagctggaataaatggataatacgtctagaactgattttctgtcttctttttcgtgagtctgctaagcatgatcccttcctcgcacggtgcacctctccctcctcttctcgcttcctgcaggccaacccgacaggtcatcgatagcagcacaattatacaaagcggaagctaaaatcatggttatagttgttagctttaaacatata

SEQ ID NO: 218497 - DNA, 1733 bp, Zea Mays
aagaggcccagcccagctgacaacaccggcctccgagaagcagcgcaggcgcagggcattccagaacgttcggcggcggcgaggcgacacgcccaccaccagtcagccgccccgccacagccatgcgcctccacgccggcgcacgcctcgcgctcctgctcgcccgccgctccctctcctcctccccccgtatcccgcgggtgcacacagggatacggagcgaggcgccctcccggagctctcccttctatccgccgagcagcgcccgcaggtccttccacgggaccaggccggtggcggcaagggactactacgatgtgctcggcgtcagcaagagcgccagccaggcggagatcaaaaaggcctattatgggcttgcaaagaagctccatccagacacaaataaaggtgatgcggatgcagaacgcaagtttcaagaggttcaacgagcttatgagactctaaaggatgaacaaaaaagatcattatatgatcaggttggccctgatcagtatgagaaaactgcttctggcggaggcggaactggcttcgagggtggttttggaaatccatttgaggatatttttggtggtggcggtggcggtggtggaatgaatgatttctttaggaacatttttggggatagggactttagaggacgagatgttaaggttgcactcgaactatcatttatggaagcagttcaagggtgcagcaaaacggtcaccttccaaacgtctgtaacatgtgaaatctgtggtggagccggtgtgcctcctggaaccacacctgaaacatgtctatcttgcaggggttcaggatttatattcatgcaaaccgggcccttcaggatgcaatcaacctgcacaaaatgtggtggttctgggaaaactgtgaaggaattctgcaaggcatgcagaggaaacaaagttgtgcctggaaggaaatcagtccgccttgacatactgcctggtttggataatgaggataccataaaggtggttcgatcaggtggagaagacccagatggccgtccaggtgatctttatgtgaccctcgaggttcgtgaggatcctgttttccgaagagagaaaggtgatattcatgttgatgctgtcctgaatgtgactcaggcaattttgggagggacagttcaagtcccaactctcagtggagacgttgttctaaaggtcaagcccggtactcaacctggtcagaaggtagttctgagaggaaaagggatcaagacaagaaactcaccgcactacggagatcaatatgtccatttcaatgtcaacatccccgaaaatttgacgtctagacagcgggagctgatcgaggaattcgcgaaggaggagcaaggcgaagacgagaaggacgccaaggcagcagctggagcatcggggggatagccggttttaggagccacagtagtgccttttagctggtatttataccgtgaccatagacctgtctcaaattcgcagcgaaaaaaatatatagataggtctttgtttcggattttgtagctggaataaatggataatacgtctagaactgattttctgtcttctttttcgtgagtctgctaagcatgatcccttcctcgcacggtgcacctctccctcctcttctcgcttcctgcaggccaacccgacaggtcatcgatagcagcacaattatacaaagcggaagctaaaatcatggttatagttgttagctttaaacatata

SEQ ID NO: 218498 - DNA, 1548 bp, Zea Mays
atgcccttggtggcgccgacattccaatgcagtgactactacacggagctgctcgtcgtctatagcgcgacggaaggatacatgatgcgatgtggtggcgctcaaacagaggcacgaccggcaggagcaagtgccacaccgacgtttggatggagcgagcaagcgtggcctggcgacctgctgatggcggcgaaggggatggcggcaggagcagttgtgggaacggaggcacggagagcaggagcaaatggcacgcctaagtccaaacggagcactctaaaggatgaacaaaaaagatcattatatgatcaggttggccctgatcagtatgagaaaactgcttctggcggaggcggaactggcttcgagggtggttttggaaatccatttgaggatatttttggtggtggcggtggcggtggtggaatgaatgatttctttaggaacatttttggggatagggactttagaggacgagatgttaaggttgcactcgaactatcatttatggaagcagttcaagggtgcagcaaaacggtcaccttccaaacgtctgtaacatgtgaaatctgtggtggagccggtgtgcctcctggaaccacacctgaaacatgtctatcttgcaggggttcaggatttatattcatgcaaaccgggcccttcaggatgcaatcaacctgcacaaaatgtggtggttctgggaaaactgtgaaggaattctgcaaggcatgcagaggaaacaaagttgtgcctggaaggaaatcagtccgccttgacatactgcctggtttggataatgaggataccataaaggtggttcgatcaggtggagaagacccagatggccgtccaggtgatctttatgtgaccctcgaggttcgtgaggatcctgttttccgaagagagaaaggtgatattcatgttgatgctgtcctgaatgtgactcaggcaattttgggagggacagttcaagtcccaactctcagtggagacgttgttctaaaggtcaagcccggtactcaacctggtcagaaggtagttctgagaggaaaagggatcaagacaagaaactcaccgcactacggagatcaatatgtccatttcaatgtcaacatccccgaaaatttgacgtctagacagcgggagctgatcgaggaattcgcgaaggaggagcaaggcgaagacgagaaggacgccaaggcagcagctggagcatcggggggatagccggttttaggagccacagtagtgccttttagctggtatttataccgtgaccatagacctgtctcaaattcgcagcgaaaaaaatatatagataggtctttgtttcggattttgtagctggaataaatggataatacgtctagaactgattttctgtcttctttttcgtgagtctgctaagcatgatcccttcctcgcacggtgcacctctccctcctcttctcgcttcctgcaggccaacccgacaggtcatcgatagcagcacaattatacaaagcggaagctaaaatcatggttatagttgttagctttaaacatata

SEQ ID NO: 218499 - DNA, 1836 bp, Zea Mays
taaaaaaaaaaacaacaaacacttctcgggttcctttcttcgtgcgcactccactttcgccggcgtcgccatggacgccaacgtcgtgcagcgctgcctcgaggccggcggccgcgacttcctcttccaccatacctcttcccctccctctccgacctccgcctctgccgctgcatcctcctccatcctccaatctctccccctccacgtgtccttcgaccgcgggtattacctcctcgtcaaggcgatccaggagctgcgtgcgcgcaaggacggccacgtcgttaccgtcggcatcggcggacccactggctcgggcaagaccagcttggctgagaaggtggcgtcggtgctagggtgcgtcgtgatcgtctccatggaggactaccgcacggcacctggtgtcgacgacggcatcagcgacgtcaatgccgtcgatttcgacgcacttgctcgcaacctccaggatcttgtgaagggtaaagatacaatggtgccactagttgattttcaagagaagaaacgcaccggatggagggaactgagaatttcttcatctggagtggtgattgtcgatggtgcgtatgctctgcattcaacactacgatcattgcttgatatccgagttgctgtggttggcggcgttcattttagcctgctttctaaagttcagcatgatattggagattcttgctcattggactatctaatcgacagtatatttccattgtttagaaagcatattgagccagacctgcatcatgcccaaattaggattgataacagctttgtctgctcatttcgagaaccgtactacaagctgaagtgcaaaaatgagtcatcagatggcaagaagttatattcttttgaacaaaataaagtggaaactgagaactttattgagatgtaccttaggccgccttttgcttctgaagaaatgaagattgatgattggattaaggttaggcaatgtggaataagatactatctatctctcggagaccaaaggattgttgacaagtacttcataatccgtccaaaagctgagtttgaggttggacgaacaactcttggaggattgttggccttggggtacaatgttgttgttagctttaagcgtacatgcacatctgtcaatatagatcaattactgatagctgcagagaccattgacactctaaatgagacctttttggtattaaaaggtccaagcagaaagattgttgcagcagaggcttcaaagcttggtataaagggaccatggatcacaaaatcatacttagaaatgatcttggagagcaaaggggttccacgacttaatacaccaccaccggtatcaagcaaactgctaactgaaagtcaagaaaagaaaattgctgcacctaaacctattcgtgtttctgctgaaaacattacaaatcttgatgacttgatgcaaccgtggacgagatccccgcccaagaagttggaacaagaacacgtattggcaaaatggcagtttatctcagattcttcttcaagaagtaacatccagctggctcctctgccagattcttatgacctggataggggccttctcctatcagttcaagcaattcaggcattgttggagaacagaggataccctatcattgttgggattggtggtcctagtggatcgggaaagacaagtttagctcagaagatggcaaatataattggctgtgaagttgtaagcttggaaagttattacaagcctgaacaagtgagagattataagtatgatgattatagctcattggatattgctttgctcactgaggagaatagaattggtggtaatagaatggatcatcc

SEQ ID NO: 218500 - DNA, 2734 bp, Zea Mays
taaaaaaaaaaacaacaaacacttctcgggttcctttcttcgtgcgcactccactttcgccggcgtcgccatggacgccaacgtcgtgcagcgctgcctcgaggccggcggccgcgacttcctcttccaccatacctcttcccctccctctccgacctccgcctctgccgctgcatcctcctccatcctccaatctctccccctccacgtgtccttcgaccgcgggtattacctcctcgtcaaggcgatccaggagctgcgtgcgcgcaaggacggccacgtcgttaccgtcggcatcggcggacccactggctcgggcaagaccagcttggctgagaaggtggcgtcggtgctagggtgcgtcgtgatcgtctccatggaggactaccgcacggcacctggtgtcgacgacggcatcagcgacgtcaatgccgtcgatttcgacgcacttgctcgcaacctccaggatcttgtgaagggtaaagatacaatggtgccactagttgattttcaagagaagaaacgcaccggatggagggaactgagaatttcttcatctggagtggtgattgtcgatggtgcgtatgctctgcattcaacactacgatcattgcttgatatccgagttgctgtggttggcggcgttcattttagcctgctttctaaagttcagcatgatattggagattcttgctcattggactatctaatcgacagtatatttccattgtttagaaagcatattgagccagacctgcatcatgcccaaattaggattgataacagctttgtctgctcatttcgagaaccgtactacaagctgaagtgcaaaaatgagtcatcagatggcaagaagttatattcttttgaacaaaataaagtggaaactgagaactttattgagatgtaccttaggccgccttttgcttctgaagaaatgaagattgatgattggattaaggttaggcaatgtggaataagatactatctatctctcggagaccaaaggattgttgacaagtacttcataatccgtccaaaagctgagtttgaggttggacgaacaactcttggaggattgttggccttggggtacaatgttgttgttagctttaagcgtacatgcacatctgtcaatatagatcaattactgatagctgcagagaccattgacactctaaatgagacctttttggtattaaaaggtccaagcagaaagattgttgcagcagaggcttcaaagcttggtataaagggaccatggatcacaaaatcatacttagaaatgatcttggagagcaaaggggttccacgacttaatacaccaccaccggtatcaagcaaactgctaactgaaagtcaagaaaagaaaattgctgcacctaaacctattcgtgtttctgctgaaaacattacaaatcttgatgacttgatgcaaccgtggacgagatccccgcccaagaagttggaacaagaacacgtattggcaaaatggcagtttatctcagattcttcttcaagaagtaacatccagctggctcctctgccagattcttatgacctggataggggccttctcctatcagttcaagcaattcaggcattgttggagaacagaggataccctatcattgttgggattggtggtcctagtggatcgggaaagacaagtttagctcagaagatggcaaatataattggctgtgaagttgtaagcttggaaagttattacaagcctgaacaagtgagagattataagtatgatgattatagctcattggatattgctttgctcactgaggtcatctttgaaggtgtgtacactttacatcctgctataaggaaatttctggatttgtggattgcagttgttggtggagttcattcacaccttattgcaagaatacagagagacaagaatcgtgctggcttttctatttctcagactgaaatcatgaccactgtgtttccactgtttcagcaatacattgaaccacatcttgtccatgctcatcttaagattcaaaacgattttgatcctgtgctctctcctgaaagctcactttttgtgttaaaaagtaaaaaacaggtatcctgccaagatatactgaaggtactagatgctagtaaagtctgcagttctgtccagaactttactgatgtgtacttacggcttcctggcataccatcaaatgcccagctgaccgaaggtgagtgtatccgggtcagaatttgtgaaggaagatttgcattgttgatacgagagcctataagggaaggaaattttattatccagccaaaggttgattttgatattagtgccagtactgttgcagggcttcttaagcttggttaccaagctgttgcatatattgaagcttctgcggtgatttaccaagatggaaaggttattatgttccttaaccagtgtagctcttttttttatttagagaaaaggatgcatacttgcctaccactaaatggacaaagtcttttttatttttgtaaaagtctccctactcctgtgctattatgccattattgcttgcttgtacaaagatttatcctttagtattattgctgagtatgcatgattaaggcttaaataacttaggaattgtgaattttgctggcacatttccaggtttggtttattatttgaatgcctttaatcctttattaagaggaaggttttaatgttttatcaaagcatcattacgtttttatcctgtag

SEQ ID NO: 218501 - DNA, 3622 bp, Zea Mays
taaaaaaaaaaacaacaaacacttctcgggttcctttcttcgtgcgcactccactttcgccggcgtcgccatggacgccaacgtcgtgcagcgctgcctcgaggccggcggccgcgacttcctcttccaccatacctcttcccctccctctccgacctccgcctctgccgctgcatcctcctccatcctccaatctctccccctccacgtgtccttcgaccgcgggtattacctcctcgtcaaggcgatccaggagctgcgtgcgcgcaaggacggccacgtcgttaccgtcggcatcggcggacccactggctcgggcaagaccagcttggctgagaaggtggcgtcggtgctagggtgcgtcgtgatcgtctccatggaggactaccgcacggcacctggtgtcgacgacggcatcagcgacgtcaatgccgtcgatttcgacgcacttgctcgcaacctccaggatcttgtgaagggtaaagatacaatggtgccactagttgattttcaagagaagaaacgcaccggatggagggaactgagaatttcttcatctggagtggtgattgtcgatggtgcgtatgctctgcattcaacactacgatcattgcttgatatccgagttgctgtggttggcggcgttcattttagcctgctttctaaagttcagcatgatattggagattcttgctcattggactatctaatcgacagtatatttccattgtttagaaagcatattgagccagacctgcatcatgcccaaattaggattgataacagctttgtctgctcatttcgagaaccgtactacaagctgaagtgcaaaaatgagtcatcagatggcaagaagttatattcttttgaacaaaataaagtggaaactgagaactttattgagatgtaccttaggccgccttttgcttctgaagaaatgaagattgatgattggattaaggttaggcaatgtggaataagatactatctatctctcggagaccaaaggattgttgacaagtacttcataatccgtccaaaagctgagtttgaggttggacgaacaactcttggaggattgttggccttggggtacaatgttgttgttagctttaagcgtacatgcacatctgtcaatatagatcaattactgatagctgcagagaccattgacactctaaatgagacctttttggtattaaaaggtccaagcagaaagattgttgcagcagaggcttcaaagcttggtataaagggaccatggatcacaaaatcatacttagaaatgatcttggagagcaaaggggttccacgacttaatacaccaccaccggtatcaagcaaactgctaactgaaagtcaagaaaagaaaattgctgcacctaaacctattcgtgtttctgctgaaaacattacaaatcttgatgacttgatgcaaccgtggacgagatccccgcccaagaagttggaacaagaacacgtattggcaaaatggcagtttatctcagattcttcttcaagaagtaacatccagctggctcctctgccagattcttatgacctggataggggccttctcctatcagttcaagcaattcaggcattgttggagaacagaggataccctatcattgttgggattggtggtcctagtggatcgggaaagacaagtttagctcagaagatggcaaatataattggctgtgaagttgtaagcttggaaagttattacaagcctgaacaagtgagagattataagtatgatgattatagctcattggatattgctttgctcactgagaacattatggacataaaaaagaggcataaagcggaagttccttgcttcgactttgaaaattttagccgaaaggggttcaaggagcttcaagtatccgaggaaagtggagtggtcatctttgaaggtgtgtacactttacatcctgctataaggaaatttctggatttgtggattgcagttgttggtggagttcattcacaccttattgcaagaatacagagagacaagaatcgtgctggcttttctatttctcagactgaaatcatgaccactgtgtttccactgtttcagcaatacattgaaccacatcttgtccatgctcatgttgcttaagattcaaaacgattttgatcctgtgctctctcctgaaagctcactttttgtgttaaaaagtaaaaaacaggtatcctgccaagatatactgaaggtactagatgctagtaaagtctgcagttctgtccagaactttactgatgtgtacttacggcttcctggcataccatcaaatgcccagctgaccgaaggtgagtgtatccgggtcagaatttgtgaaggaagatttgcattgttgatacgagagcctataagggaaggaaattttattatccagccaaaggttgattttgatattagtgccagtactgttgcagggcttcttaagcttggttaccaagctgttgcatatattgaagcttctgcggtgatttaccaagatggaaagattttaatagaagttgaccatctacaaggagtgtcgactccatatcttcaaattaaagggacaaataaagaaattgttacctctgctggttctgcactctgcttggatggttcatacacaacaaagagttatcttcaaattattttggagagcttaccagctgatggtaatgtatctattggtattcacaatcaacaagctgcaaggctgcaggaactggttgagttcatccagtcacagggagggagctttaattcagatttatcgtcaccaatacgagaaacttcctctacagatagtgtgattgatgatatgcagtccaggataaggaagcttgagagatggaatacgataaacatggttttgtggactatattattgtctgctcttgttggatattccctataccagaaaaaacgtcactagttttactgatagggtaggacgcatacctcattcatggcgtctgcagaactgacttgcacgcttcaggcacaaagttgtaagtgctagagaaaatgaaaagcagcatgtagatacaagatctaagacgtgagagatggcctgcgctcatgccatccctgatggcagtcttatttgtttgatcactcaatgtctgtaataatcttctcgtatgagatccatcaaaaaaatttgtgcagttaatgtgtatgaagcactaacgttgataatcttctcatatggtccatgggcgtttatgtattgtcatcaccacttaagtattctcatctccattaggccttgttagacactcgtatttgtctcgatccatgtgtattgaggtggattggaatgtaacttaaattaaattacatctcaatccatgacaatacacgtggattgaggtgtccaagtattcttcacgtggattgtttaatttatactctaattcactttagccacgtggattgagatgaatactaagtatccaaacaaagcactaaatatccaaacaaagccttaatagagtgataatcttctcgtctttataaggtcaagagataatcatgatccataagaacattaataggcatttagggttaaaggctattcgagagtttatacatatgagggggttg

SEQ ID NO: 218502 - DNA, 2501 bp, Zea Mays
ttgattagtgcccttacagtcatgtctattgagcaggatcttgtgaagggtaaagatacaatggtgccactagttgattttcaagagaagaaacgcaccggatggagggaactgagaatttcttcatctggagtggtgattgtcgatggtgcgtatgctctgcattcaacactacgatcattgcttgatatccgagttgctgtggttggcggcgttcattttagcctgctttctaaagttcagcatgatattggagattcttgctcattggactatctaatcgacagtatatttccattgtttagaaagcatattgagccagacctgcatcatgcccaaattaggattgataacagctttgtctgctcatttcgagaaccgtactacaagctgaagtgcaaaaatgagtcatcagatggcaagaagttatattcttttgaacaaaataaagtggaaactgagaactttattgagatgtaccttaggccgccttttgcttctgaagaaatgaagattgatgattggattaaggttaggcaatgtggaataagatactatctatctctcggagaccaaaggattgttgacaagtacttcataatccgtccaaaagctgagtttgaggttggacgaacaactcttggaggattgttggccttggggtacaatgttgttgttagctttaagcgtacatgcacatctgtcaatatagatcaattactgatagctgcagagaccattgacactctaaatgagacctttttggtattaaaaggtccaagcagaaagcagaggcttcaaagcttggtataaagggaccatggatcacaaaatcatacttagaaatgatcttggagagcaaaggggttccacgacttaatacaccaccaccggtatcaagcaaactgctaactgaaagtcaagaaaagaaaattgctgcacctaaacctattcgtgtttctgctgaaaacattacaaatcttgatgacttgatgcaaccgtggacgagatccccgcccaagaagttggaacaagaacacgtattggcaaaatggcagtttatctcagattcttcttcaagaagtaacatccagctggctcctctgccagattcttatgacctggataggggccttctcctatcagttcaagcaattcaggcattgttggagaacagaggataccctatcattgttgggattggtggtcctagtggatcgggaaagacaagtttagctcagaagatggcaaatataattggctgtgaagttgtaagcttggaaagttattacaagcctgaacaagtgagagattataagtatgatgattatagctcattggatattgctttgctcactgagaacattatggacataaaaaagaggcataaagcggaagttccttgcttcgactttgaaaattttagccgaaaggggttcaaggagcttcaagtatccgaggaaagtggagtggtcatctttgaaggtgtgtacactttacatcctgctataaggaaatttctggatttgtggattgcagttgttggtggagttcattcacaccttattgcaagaatacagagagacaagaatcgtgctggcttttctatttctcagactgaaatcatgaccactgtgtttccactgtttcagcaatacattgaaccacatcttgtccatgctcatcttaagattcaaaacgattttgatcctgtgctctctcctgaaagctcactttttgtgttaaaaagtaaaaaacaggtatcctgccaagatatactgaaggtactagatgctagtaaagtctgcagttctgtccagaactttactgatgtgtacttacggcttcctggcataccatcaaatgcccagctgaccgaaggtgagtgtatccgggtcagaatttgtgaaggaagatttgcattgttgatacgagaggtatgcacgcttattttgttttcattatgcttctttcattctttgacatgaatctataacacattgccctttctcttcccttcaatattttgctagcctataagggaaggaaattttattatccagccaaaggttgattttgatattagtgccagtactgttgcagggcttcttaagcttggttaccaagctgttgcatatattgaagcttctgcggtgatttaccaagatggaaaggttattatgttccttaaccagtgtagctcttttttttatttagagaaaaggatgcatacttgcctaccactaaatggacaaagtcttttttatttttgtaaaagtctccctactcctgtgctattatgccattattgcttgcttgtacaaagatttatcctttagtattattgctgagtatgcatgattaaggcttaaataacttaggaattgtgaattttgctggcacatttccaggtttggtttattatttgaatgcctttaatcctttattaagaggaaggttttaatgttttatcaaagcatcattacgtttttatcctgtag

SEQ ID NO: 218503 - DNA, 1977 bp, Zea Mays
gaaccttcttgccatggcgacgatgtctgcagcgtctcatcgctgctgtgcttcttccttgagagctttaaccgtgttatttgtgttggcagctcctgtttcagatgtagaggggcgacatcatcgtcatgtctgtccttatttctcctgcggtggtttaagcaatatatcgtatccattccgtcggcaaggtgatccatctgggtgcggtgtccaatcgtgtgagctggtttgcacggatacagacgccacaattcgcatcggcagtggaacatacaagccaatagagaacaacgatatatatgagccggtgtcttgcttgagcagttcttctttcatctacatggcatgccggtgcccaagaatacaagctatccagatgttgttaagttcatgaggaatggatttgcccttggatttactgtttcgattcctgaccccaacatcagagaatgtttcgctgagtttatgcgtactttccttaaggatccaagaagtagtacaggcatcaaggaactgattgtggacattcttagggtcgtcgacatattcttggcttgtgttatctatcaacttcaatcaactaataataatggtgtcacaactgttctcatcggcatcattgaaacgatacaatatgttagcggggtcctgaaatatacagcggttgtttgcaggttcgtattaatgccgctggcagtattcatcttcctagtctataaatactggaaaacaaggataacagtagatgcagtcgagaagttcttgcaaatgcagcagatgctcgttccaatgagatatgcatacacaaacatcattgctatcaccggccatttcagagacaagctcggacaaggtggttacggttctgtatacaagggggtgctacagccaggtgaagttcatgttgctatcaagatgttgggcaactccaactgtaatggagacgagttcatcagtgaggtcgccaccattggcaagatccaccatgtcaatattgtgcgcctcatcgggttttgctccgaggaaaatagcagggcacttatctacgagttcatgccccatggatctctcgataagtacatcttctcgtcggagaagagtttctcgtgggacaaactcaatgagatcgctctgggcattgctagaggtctcaactacttgcatcatgggtgtgatatgcagattgtacacttcgacatcaagccacacaacatccttctcgacaacaactttgttccaaaagttgctgattttgggcttgccaagctgttcccaaaagatgacaatttcgtgccactgagcgctatgcggggaacgattggctatatagctccagagatggtatctcgaagctttggtgttatctctagcaaatccgatgtgtacagctttgggatgctactattggagatgacgggcgggcgaaggaacgcagatcctcatgcaggaagctccagtcaagcatactacccatccttggtgtacagccagctgagccaaggagatgcgaacgagatcagtgaaggtgttgatatgcacgagttagagaagaagctatgtatcattgggctttggtgcatacagatgaagccgcaagatcggccgacgatgagcgaggtcatagagatgtttgaagctggtgtcgatggcatccaaatgcctccaaggccattcttttgtgatgacgagggtgatagttcttactctgcaatctctaaactggatacaatagaagagtagtagttgtagtaaaatacacttgtgtctatgtgatcttaatgtattagactactaataatgcaaggttgtcgtaagctaaggtactggttgtatacttttattgagagtgtggtaatgtgttttgatataaaatacctccatgaacctttttttacaaagaactcaagaacattgtttgcctacaagcacaagatcagagtcctagccgttgtatcttccaaagggctgcacttc

SEQ ID NO: 218504 - DNA, 2281 bp, Zea Mays
ccactcccaggcacaacagccacccgcgaccccaagtcccgatcggccgccgatcccgatcccgatcccgaccccacctccctggctccacagcacccctgctccacacacacggccgccagcaagccgccggccctaggccctaccgtcgcagcgtcgcctgcttgactatctgcctccagccctccagcaagacttcagtcgcctgccccagcctggctgccgccgccctccagcaaggcagcaaacgccggcctccggccgcccgtccctaggccagaggccacccctaggccgctaggcttccaccgccgacgcccacagaaaccgtaggcgccaccaggccaccacgagatccctgccgtgacggagaatggaggccgccgcggccgtcctccccacgctggtgccctccgggagcgcggtggtggtgctcctcgcctacctcgggtatctcgccgccgctggagccatcctcccagggaagctcgtcgacggagccctactcccggactcctctcgcctccactatcgctgcaacggtttgctctcgctcctgctgctgctgggactctcggcgttcggtgtctacatggggtggatgtctcccacggttgtagctgacatgggactcgaacttctgtcagtgacctttatttttagtgtcattgtttcttttgcactctacattgccggcatcaagtccggccacaaaagttcttctttgagaccacatgttagtgggagcttcatgcaagattggtggtttggagtgcaacttaatcctcattttatggaagttgacctcaaattcttctttgtgagggcaggaatgatggcatggttatttattaacctctctttgtttgcaaagagctactttgctggttcagccaatctttcggtcattctctaccaatttttttgtgcgtggtatatcattgattacttcgtccatgaagaattcatgacctcaacgtgggacattattgctgaaagactgggtttcatgctggtgtttggtgatctagttttcatccctttcaccttcactattcaggtatcctacattcctgcaaatgttgacccatggtgctagctattgaataccttatttttgagaaaaaacatagaataccttattaccttaggcacactatcctaccctaacattgatttgattttggcgtttcctaattgtcagatttgtggctcagatcactgcttctcttacattaaaacagtaggctgagaattaagctaatcaacaagtatgatttgtttgtcaggggtggtggcttttgaagaacaaagtagagctgtcccttttgtctggtctagctaacttatgcatctttcttattgggtactcttggtttttctccagaatatcaaagctatagcaatttgatatatacctgtttcttgcattgtaactttgttgtctacatgctataccatgtggcatgtggtactcagctacctagtgttccgaggagctaacaagcaaaaacatgtgttcaagaaggaccccaaagctcctatatggggaaaacctcccaaagttgtcgggggaaagctactagcatctggttactggggcatcgcaaggcactgcaattatctcggagacctgctgctagcactttcgttcagcttgccctgtggagtgagttccgtggtcccatacttctaccccacgtacctgctcattctactggtcttgagggaaaggcgcgatgaggcgaggtgctcgcagaagtacagggagatctgggcagagtactgcaagctcgtgccgtggaggatcctgccttatgtgtactgaagagacggtagaaaccaaggcagctcatggccctgggccagctgtaaaccttattttgtttgcccttaaccagttggtgaatgttgatgtagcactcggtaaactgtgaccgtgcaaacttttgttattgttggtccatacatgtttggaatcgtgaatcagaccgcctcacttggtggcatattattccctttagcgcttgcttgggagctaggacccgagaggattgaaggggttaaaattttcttgttattcaatattgaatattaaggaaattttagtgactttaatcctctccggtatccttgctctcaaataagcccttagttatgtataatctaaatattatgttattgttcttcaaacattagatacatctaagaaatttattcatacaatctaatatgttgaagtcttgtattttatttactaaaactccttaagatatagctt

SEQ ID NO: 218505 - DNA, 1907 bp, Zea Mays
caacagccacccgcgaccccaagtcccgatcggccgccgatcccgatcccgatcccgaccccacctccctggctccacagcacccctgctccacacacacggccgccagcaagccgccggccctaggccctaccgtcgcagcgtcgcctgcttgactatctgcctccagccctccagcaagacttcagtcgcctgccccagcctggctgccgccgccctccagcaaggcagcaaacgccggcctccggccgcccgtccctaggccagaggccacccctaggccgctaggcttccaccgccgacgcccacagaaaccgtaggcgccaccaggccaccacgagatccctgccgtgacggagaatggaggccgccgcggccgtcctccccacgctggtgccctccgggagcgcggtggtggtgctcctcgcctacctcgggtatctcgccgccgctggagccatcctcccagggaagctcgtcgacggagccctactcccggactcctctcgcctccactatcgctgcaacggtttgctctcgctcctgctgctgctgggactctcggcgttcggtgtctacatggggtggatgtctcccacggttgtagctgacatgggactcgaacttctgtcagtgacctttatttttagtgtcattgtttcttttgcactctacattgccggcatcaagtccggccacaaaagttcttctttgagaccacatgttagtgggagcttcatgcaagattggtggtttggagtgcaacttaatcctcattttatggaagttgacctcaaattcttctttgtgagggcaggaatgatggcatggttatttattaacctctctttgtttgcaaagagctactttgctggttcagccaatctttcggtcattctctaccaatttttttgtgcgtggtatatcattgattacttcgtccatgaagaattcatgacctcaacgtaagtatatcacatgctctcattggcaaataacttactatccctgaacaaaatatgttgagatattctgtgggatgattaaagatgatgaacatactattctcctgaacaaaatatcgttgagacctcttccaggtgggacattattgctgaaagactgggtttcatgctggtgtttggtgatctagttttcatccctttcaccttcactattcaggtatcctacattcctgcaaatgttgacccatggtgctagctattgaataccttatttttgagaaaaaacatagaataccttattaccttaggcacactatcctaccctaacattgatttgattttggcgtttcctaattgtcagatttgtggctcagatcactgcttctcttacattaaaacagtaggctgagaattaagctaatcaacaagtatgatttgtttgtcaggggtggtggcttttgaagaacaaagtagagctgtcccttttgtctggtctagctaacttatgcatctttcttattggctacctagtgttccgaggagctaacaagcaaaaacatgtgttcaagaaggaccccaaagctcctatatggggaaaacctcccaaagttgtcgggggaaagctactagcatctggttactggtaaggacaatttatgccaatgaccctctgttaatcacattattatcattgtagcttgtatgatgcttcctattgaccctgccaacattgatgaacggtagcctgttcagagtataaaagaacttagagccatacaataatgtttttttagatgatggtgacatgaaaatgtagaaccaaatgctggtccacaatccacagaataattaagggatttttctgtagttaaaaaaatagtgcacccacgtagtgtctacggcagattcaaagcatagcagtttgtgatttgtgggtgtggt

SEQ ID NO: 218506 - DNA, 2242 bp, Zea Mays
caacagccacccgcgaccccaagtcccgatcggccgccgatcccgatcccgatcccgaccccacctccctggctccacagcacccctgctccacacacacggccgccagcaagccgccggccctaggccctaccgtcgcagcgtcgcctgcttgactatctgcctccagccctccagcaagacttcagtcgcctgccccagcctggctgccgccgccctccagcaaggcagcaaacgccggcctccggccgcccgtccctaggccagaggccacccctaggccgctaggcttccaccgccgacgcccacagaaaccgtaggcgccaccaggccaccacgagatccctgccgtgacggagaatggaggccgccgcggccgtcctccccacgctggtgccctccgggagcgcggtggtggtgctcctcgcctacctcgggtatctcgccgccgctggagccatcctcccagggaagctcgtcgacggagccctactcccggactcctctcgcctccactatcgctgcaacggtttgctctcgctcctgctgctgctgggactctcggcgttcggtgtctacatggggtggatgtctcccacggttgtagctgacatgggactcgaacttctgtcagtgacctttatttttagtgtcattgtttcttttgcactctacattgccggcatcaagtccggccacaaaagttcttctttgagaccacatgtggtttggagtgcaacttaatcctcattttatggaagttgacctcaaattcttctttgtgagggcaggaatgatggcatggttatttattaacctctctttgtttgcaaagagctactttgctggttcagccaatctttcggtcattctctaccaatttttttgtgcgtggtatatcattgattacttcgtccatgaagaattcatgacctcaacgtgggacattattgctgaaagactgggtttcatgctggtgtttggtgatctagttttcatccctttcaccttcactattcaggtatcctacattcctgcaaatgttgacccatggtgctagctattgaataccttatttttgagaaaaaacatagaataccttattaccttaggcacactatcctaccctaacattgatttgattttggcgtttcctaattgtcagatttgtggctcagatcactgcttctcttacattaaaacagtaggctgagaattaagctaatcaacaagtatgatttgtttgtcaggggtggtggcttttgaagaacaaagtagagctgtcccttttgtctggtctagctaacttatgcatctttcttattgggtactcttggtttttctccagaatatcaaagctatagcaatttgatatatacctgtttcttgcattgtaactttgttgtctacatgctataccatgtggcatgtggtactcagctacctagtgttccgaggagctaacaagcaaaaacatgtgttcaagaaggaccccaaagctcctatatggggaaaacctcccaaagttgtcgggggaaagctactagcatctggttactggggcatcgcaaggcactgcaattatctcggagacctgctgctagcactttcgttcagcttgccctgtggagtgagttccgtggtcccatacttctaccccacgtacctgctcattctactggtcttgagggaaaggcgcgatgaggcgaggtgctcgcagaagtacagggagatctgggcagagtactgcaagctcgtgccgtggaggatcctgccttatgtgtactgaagagacggtagaaaccaaggcagctcatggccctgggccagctgtaaaccttattttgtttgcccttaaccagttggtgaatgttgatgtagcactcggtaaactgtgaccgtgcaaacttttgttattgttggtccatacatgtttggaatcgtgaatcagaccgcctcacttggtggcatattattccctttagcgcttgcttgggagctaggacccgagaggattgaaggggttaaaattttcttgttattcaatattgaatattaaggaaattttagtgactttaatcctctccggtatccttgctctcaaataagcccttagttatgtataatctaaatattatgttattgttcttcaaacattagatacatctaagaaatttattcatacaatctaatatgttgaagtcttgtattttatttactaaaactccttaagatatagctt

SEQ ID NO: 218507 - DNA, 1968 bp, Zea Mays
caacagccacccgcgaccccaagtcccgatcggccgccgatcccgatcccgatcccgaccccacctccctggctccacagcacccctgctccacacacacggccgccagcaagccgccggccctaggccctaccgtcgcagcgtcgcctgcttgactatctgcctccagccctccagcaagacttcagtcgcctgccccagcctggctgccgccgccctccagcaaggcagcaaacgccggcctccggccgcccgtccctaggccagaggccacccctaggccgctaggcttccaccgccgacgcccacagaaaccgtaggcgccaccaggccaccacgagatccctgccgtgacggagaatggaggccgccgcggccgtcctccccacgctggtgccctccgggagcgcggtggtgtctcgtcgctcatcgctcgcgaccgttgttcctctggtggtggtgctcctcgcctacctcgggtatctcgccgccgctggagccatcctcccagggaagctcgtcgacggagccctactcccggactcctctcgcctccactatcgctgcaacggtttgctctcgctcctgctgctgctgggactctcggcgttcggtgtctacatggggtggatgtctcccacggttgtagctgacatgggactcgaacttctgtcagtgacctttatttttagtgtcattgtttcttttgcactctacattgccggcatcaagtccggccacaaaagttcttctttgagaccacatgttagtgggagcttcatgcaagattggtggtttggagtgcaacttaatcctcattttatggaagttgacctcaaattcttctttgtgagggcaggaatgatggcatggttatttattaacctctctttgtttgcaaagagctactttgctggttcagccaatctttcggtcattctctaccaatttttttgtgcgtggtatatcattgattacttcgtccatgaagaattcatgacctcaacgtgggacattattgctgaaagactgggtttcatgctggtgtttggtgatctagttttcatccctttcaccttcactattcaggggtggtggcttttgaagaacaaagtagagctgtcccttttgtctggtctagctaacttatgcatctttcttattggctacctagtgttccgaggagctaacaagcaaaaacatgtgttcaagaaggaccccaaagctcctatatggggaaaacctcccaaagttgtcgggggaaagctactagcatctggttactggggcatcgcaaggcactgcaattatctcggagacctgctgctagcactttcgttcagcttgccctgtggagtgagttccgtggtcccatacttctaccccacgtacctgctcattctactggtcttgagggaaaggcgcgatgaggcgaggtgctcgcagaagtacagggagatctgggcagagtactgcaagctcgtgccgtggaggatcctgccttatgtgtactgaagagacggtagaaaccaaggcagctcatggccctgggccagctgtaaaccttattttgtttgcccttaaccagttggtgaatgttgatgtagcactcggtaaactgtgaccgtgcaaacttttgttattgttggtccatacatgtttggaatcgtgaatcagaccgcctcacttggtggcatattattccctttagcgcttgcttgggagctaggacccgagaggattgaaggggttaaaattttcttgttattcaatattgaatattaaggaaattttagtgactttaatcctctccggtatccttgctctcaaataagcccttagttatgtataatctaaatattatgttattgttcttcaaacattagatacatctaagaaatttattcatacaatctaatatgttgaagtcttgtattttatttactaaaactccttaagatatagctt

SEQ ID NO: 218508 - DNA, 2485 bp, Zea Mays
cggggggcatcgggccaaaccaaaagcacggacaccaaccaaaggccaactcatgaacaccaacaactagtgtagtgtgtagttgtgtgcacgctggcttggtccccgtagcagagaaccccacccccataaaagctcctctccattggccgaacgccgagagcaccactccctccctccggctcccaaccccagcacagcgcagcagcagtcctctctcctctcactctactcctccagctccccacccctctcccaaaacctcagttcaatcccaggtttcaaatccgccaccttttggacacacaccacacttgcctacccccagagctgagctagctagctgctctctctctctcttttcacctaagcgagaacagagcccaagaggcctcaaaagaaccactgcacttcctccgcatagctcgtcgccctctctctcctatcagtcctcccagctccagctaccacagcagccctctcgcttaaaggaggagggagaagagggcggggcgagcaatgtcggagcagcagcagccattgccgcagcctcggagcagcatgcgggaggctctggagaaggaggacaaggagaaggcggcggctgctgcggcggccaaggagaaggcggccgtccccaagaacggcaacggcaacggcggcaagaatggcggcggcgccggcagcggcaacggcggagcgcccccgcagtccggggaggagacggcccgcgagatccaggtggtcagggaggcgtaccgccgcgagacggccgcgccggcctacgtcatacccgaggagccgccggccgtggtcgagctcgtcggctggtacatctacggcttctgctcctacttcatcacccacctgctgctgccggtcctcttcccggccatcatcacgcaggtcgccttccccaactccgacttcacgcccgaccccaagtacaccctcaagggcgtcacctgctccgtccacgagatgtccatgtaccagaggcttaccaagcactccattgtgatcgatggatcccggatgtcaccattgggctggagtggactgtcgtgggcaatcggcatcctcatcgtggcgccgctcctcacccagaccgctcaccatctcgaccgtggccagtaccagtcgctgatcctcattgccgccacgtccttcgggtccttcttctgcctgctaacaggcttcttcaagacggtctgggtgttcctgttctacatcctcttcatcgctggctcgatcatcgtcgctgaggcggtgcacacccgcaaccttgggctgatgatccgtggcctggctgcgcatgactcgggcaagcaccttgtccttcgccgccgcgctgctgccagccagctcagcctgtactgcactgccataggaggcattggagctgccctcatggcagctttcatgtaccacatgctgcggcgcactgaccagctcactggcctctgggtcgtgtccatcttctgtggccttatctggttcatcggcatctgccatggcctcttcacaaacaggcccagcagctcgtcacccaccaccgcattcgagcccaacttcttcaccaagctcagctacagcatgaccctcctccgttacccgcaggccattggcagcctggttgcggtgttcctgtcctctttcgccacaatgtgcatcttcaccagcggcacgctctatgctatcggtggtgtctgcatcaagccggtgctcgtgcttgcgctatggatcctctactttctgttccccttgatctcgctcccgctcctccacccgatccagatcataatccgcgcggacgccgtgcgcatgcagctgctcgggttcataatctgcctgttcgtgtccggtgccgggttctacttcaagagccacaggtggagggctgcccacatcatcgtcatcgccctggtccagagcaccgccaatggcatactgtacgcgttcggccgcatcctgctcctcgatgcctcgccgccggggaaggagggtgcgttctcggtctggtacgcgtttgttcgtgtcaccggtgccatgatcggcttcgctgcctcctccgctggccctgggcgcgcgggagggtcctttgctgctgcgttcctcgggagcttcctgggcatcatcgtgctgatcttcggcaacgtcagcaacatcggggcgctgaaggcggccgggcacctcaaggggatggacgacgagaagaggatgggcggtctcgggatggagaagggcgagggcatgggtagcgccgtcgctgattctggcgagagcagggggagggtatgatgatgactattcgtgacagtgaattcctgggaggtgggggagaaaaggattgcgtcctgtggaggttgtgcttgtgagaaggatttgttctctcttttttttcttgtttctttggccgtgtttcagtgacactgttgatggatcccagtgcttcgcccgtttgatgcatcatggtggtggaggg

SEQ ID NO: 218509 - DNA, 1941 bp, Zea Mays
caccggctataaatggagccacaccccctagtttctatctgctctccctcttttcgcgcctctagaatttgtcacctatcacaacagcttctcaggtttttgtcccgtgagaatggaatctttatttctaggcttgtgtcataacaagccaaaaaaatcggtggcaaccgcaatagttctggaagactatatttgcacgcagggtgatcttgccctcatcgattttattaaggaaattctttgtgaaccaagggtagaagtcgtgcttattgatgatgcctttgttgaaaggaagtcgatggaatgtttatttaagccgaatgcatatcttggtgacgaggttatagactgttacataaatttaataaaagctcaaaagcatctaaagtgccgatctagaggttgtgtccacatagaaaatgctttccagatcaattttctgaagcgagatggtgatgttgaaattaaaacagaggagctatatccaattaaagacatgtcacaaatatgtagcgttgaacgaagggttttactttacctagaccatgacatggtgtttattctgataaacatccgagagacacactggtaccttgtcgtgatcaatgcaagaaatatggagatacaagtgctcgattcacttggtacttcacaagaccgcaaagacctcactgactctattaaaggactccaaagacaaattggtatgacatctcaacgtaaggagttaaaagaccacaggtggccagacctccaagttgcttcttggccgctcagagaaatagaaatggcatatgcaaagcagacatatagctctttatgtggcctctttcttttgaactatatcgaatactggacatgggatgaattgtctgataattttacccaggatgacatgtcacactttagggaaacaatggctgctatattactatcttcagacctgaacaagagaaaggggtgtctgttatacaattatgaaaaagaagttgacactggaaactcatctgatgttgagatattagacatcccaacaaatcctaagaagagaaaactactccacgtgcttgatgaccgctgaaagggaattagggttacacctagttcctatataattttggtggttgaattgcccaacacaaataattggactaactagtttgcccaagtgtgtagattatacaggtgtaaaaggttcaccctcagccaataaaaggaccaagttttggattcaataaaggagcaaaggggcaaccgaaggcacccctggtctggcgcaccggactgtccggtgtgccaccggacagtaaacagtacctgtccggtgcaccaggggactcagactcaaactcgccaccttcgggaatttccagggcgactcggctataattcaccggactgtccggtgtacaccggacagtgtccggtgcgccaagggaggtcagcctcaggaactcgccagcttcgggaaaagccaacggctcgtccgctataattcaccggactgtccggtgtgcaccggactgtccggtgcgactccggagcaacggtcatctccgcgccaacggctctctgccgcgcatttaatgcgcgctctgcgcgcgcagaagtcagaatcgcccatgctggcacaccagacagcaaacagtacctgtccggtgtgcaccggacatccgggcgggcccacaagtcagaagctccaacggtcagaatccaacggcaatgatgacgtggcagggggcaccggactgtccggtgtgcaccggactgtccggtgcgccatcgaacagacaggattcccaacggccacatttagtggttggggctataaatacccccccaccattcattgtatccaagttttccacttctcaactactacaagagctctagcattcaattctagacacactaaagagatcaaatcctctccaattccac

SEQ ID NO: 218510 - DNA, 450 bp, Zea Mays
ctctgggcctactcgtcatggtggagctgtcgtccatgtcgcggaaggaaaggaggaaaccccgccaaaacccccgccgcgtcttccttccttccactcccgtcctcccgacccctgtccgcctcgcttgcaaaatgcaaaccctagttcgttcgtctctccctgcttcatcgtgggcgggtgcaggcagctgttgaagtggggattgacattgatgatggctctactcttttgaagctggcatcaaaagttgattccatcatagaatctcttgagaatgataagcagaaggttggttctgccagtggcggcttgaagtatggatatagtgctggtaagtacgaggacttgatcgcttcgctggtggaactattggccccactaagatatcggcgcttgggtttctgggacacgctgcaccgctactgctgttgggggcgtggttgttga

SEQ ID NO: 218511 - DNA, 924 bp, Zea Mays
aacctggtgtgagaacgagcaacttgctgagagtgtgttgaagggaaaaccatcaaagcccaaatatgggatactgctgggcaagagaggtaccgtgcaatcacaagtgcgtactacagaggagctgtgggtgcacttctagtctacgacatcacgaagaagcagacattcgaaaacatacagaggtggcttcgtgagctccgcgaccacgccgactccaacattgtgatcatgatggttggtaacaagtccgacctgaaccacctgaggtcggttgcagaggaagacgggcaggcattggcagagaaggaaggcctatccttcctcgagacatccgccctcgaagcgctcaatgtcgagaaggcgttccagaccgtcctctctgatattcaccaaatcataagcaagaaggcacttgcagcccaagaggcagcaggcagtgggcctccaggtcaaggaaccaccatcaacatcgcagacccatctgccaacacgaagagagggtgctgctcttcataagtaggtgcaaacaaagacatgctgctgcttctgcgaaaagaaaaccccccggtggatcatacaacacttttgttatgtagttgaccccttttggcctgtaactctggtgggttgtaatcacaattcatactcctgcaaagaaattctcctctcgggtagatacgatgtgtagtttcgagattttggtagaggccaatgtttggctggcagacttcgggtggagtccagcctcgtgttttctttcaatgttcttctacctcggtagtcttctgctggaaaaaaaaacatgatcagatacgttcttgtatttctacctgagtttgttgtattgtctccggtatattatatatacactaaaaactttgattcctgtgctacaacatgtatccgtgttgcttgtttgcg

SEQ ID NO: 218512 - DNA, 2575 bp, Zea Mays
atgtatgtatctgcgcatttgccatttctggttacgctttcctctccggcctttccatcatcgccaccatttcgcacctcctccacaccggcaaacaacttcacgtcgcatgatctcgcgggagcgctcgaggatatgcaagtggcggccgctgcggcgtcaatgcgcggcaccgagacggttggcgcgaagtctgctgcgcggcggttgagccgcgtgctggtcgggcgccgccgccgggccgccgtgctgctcctcgcgctggcttacgcggctgcgatgctcatgctcaccattggcggcagcgaggggtctggatccagcggcgtggtggcgggtgtgctaaggcggggcgcgcaatcggcgccccccgggtcggtgtaccgcagccacctcgtgttcgaacggctgctcccggaaatgcgcgccttcgcctcccgcccgaacccgttagtgacatctcaatacaaaaagtttggaaagcaatgggaaccttgtatcagcaaggggttgatacactcagagctaccgccttcaaatggtttcctcatagttgaggcaaatggtggcttgaatcaacaacgcatttcaatttgtgatgctattgccgtggccaaaattcttaatgcaactcttgtgacaccagcatttcatttgaatagcgtttggcgtgattctaggtaaaagtttatgtttacataataatcagagatgtatttcgagtaactgaattattgtatataccttcgtccttttcctttcttggaaactagctttgtaaactattggtttactatactaagttgggaaacctacttctgttattagtctccttttgcaagtgtttttctggttaatctttcataacgagactggagtgaataagttaaatggattatgacccctatcgcatgcagccttttttgtatgcacactagcatttttttgttgctgctagcctgctacctttgagattatatttgctcttacgtagttatgtattttgacaacatagttttagtcattgttaagtactcctataagctcccacatatcctatcaggtgcatttccttttagcatataaaattttcccttaatcgtttaaatatgctgattctacatgtcccatgccattgggaattaaaactgtaatacctaaaatatatgttagtttacttctcactgtttcatgaggatgtcttttcaagttttcagcaaatttggtgatatctttgacgaagatcacttcattgagtcacttagaaaatatgtaagggttgtaaaagatcttcctgaagatgtttttctgcgattcaaccataatatcagcataataccaaacatgagaaccaaagctttctcacccccaagttactacttacaacatgtgcttccaaagctgttggagctaggggctgtgcgtattgcccctttctcaaatagactggctcattcagttcctatgaatatccaggcattgagatgtttgacaaactataaggcattaagattttctgaaccaataagaattcttgcagataatatggttgaccgaatgatcaagaggagttttttaagtggcgggaagtacgtctcggttcatcttcgctttgaagaggacatggtagctttttcatgctgtaattatgatggtggctcgacggagaataatgcaatggaaaatgctcgcgaaaggagctggagagggaaattccaccgacctggtcgagtgataaatcctgaggctaaccgaaggaatgggagatgccctttgacacctttggaggttgcaatatttgttccttgcaatcttgctttttcctgaattgcttgagcccatgccatgtttgaggttctgctgtctactaatatacaattacatcacagacagagagcgcccggtcatattggcagatcatttctagattgtcttgtcttactccttgaatagaacaattatcctcacctaatttataagattggacttcatctctgataaaaaattaggggaactgtatttgcttcgttttataaggtatcatgtaacttatattttcttactagttcagtttatacaaggtcggaatgatgctgcgaggaatgggatttgacaacactacttccctttatgttgcatccggtaaaatatataacgctgaaaagtacatgactcctcttcgacggttgtttccatttctacaaacaaaacacgctctagttacacctgaggagcttgcacagttcaagggacattcatcaagacttgcagcactggactatactatctgtcttcatagcgaagtgtttgtgatgacacaaggaagcaatttccctcactttctgatggggcacagacgttatatgtatggaggacatgcaaagacaataaaaccagataagcggaagctagttcaactctttgacaatccaaatatcaggtaacaaggtaatgaaggccgaattcaggagacaaaatttgaagacatgacctcagataaatagcgtctaaagccatcaaaatatctcccttgatgatactctagcaagatttatagaagtggtcagtaaagcca

SEQ ID NO: 218513 - DNA, 1620 bp, Zea Mays
atgtatgtatctgcgcatttgccatttctggttacgctttcctctccggcctttccatcatcgccaccatttcgcacctcctccacaccggcaaacaacttcacgtcgcatgatctcgcgggagcgctcgaggatatgcaagtggcggccgctgcggcgtcaatgcgcggcaccgagacggttggcgcgaagtctgctgcgcggcggttgagccgcgtgctggtcgggcgccgccgccgggccgccgtgctgctcctcgcgctggcttacgcggctgcgatgctcatgctcaccattggcggcagcgaggggtctggatccagcggcgtggtggcgggtgtgctaaggcggggcgcgcaatcggcgccccccgggtcggtgtaccgcagccacctcgtgttcgaacggctgctcccggaaatgcgcgccttcgcctcccgcccgaacccgttagtgacatctcaatacaaaaagtttggaaagcaatgggaaccttgtatcagcaaggggttgatacactcagagctaccgccttcaaatggtttcctcatagttgaggcaaatggtggcttgaatcaacaacgcatttcaatttgtgatgctattgccgtggccaaaattcttaatgcaactcttgtgacaccagcatttcatttgaatagcgtttggcgtgattctagcaaatttggtgatatctttgacgaagatcacttcattgagtcacttagaaaatatgtaagggttgtaaaagatcttcctgaagatgtttttctgcgattcaaccataatatcagcataataccaaacatgagaaccaaagctttctcacccccaagttactacttacaacatgtgcttccaaagctgttggagctaggataatatggttgaccgaatgatcaagaggagttttttaagtggcgggaagtacgtctcggttcatcttcgctttgaagaggacatggtagctttttcatgctgtaattatgatggtggctcgacggagaataatgcaatggaaaatgctcgcgaaaggagctggagagggaaattccaccgacctggtcgagtgataaatcctgaggctaaccgaaggaatgggagatgccctttgacacctttggaggtcggaatgatgctgcgaggaatgggatttgacaacactacttccctttatgttgcatccggtaaaatatataacgctgaaaagtacatgactcctcttcgacggttgtttccatttctacaaacaaaacacgctctagttacacctgaggagcttgcacagttcaagggacattcatcaagacttgcagcactggactatactatctgtcttcatagcgaagtgtttgtgatgacacaaggaagcaatttccctcactttctgatggggcacagacgttatatgtatggaggacatgcaaagacaataaaaccagataagcggaagctagttcaactctttgacaatccaaatatcaggtaacaaggtaatgaaggccgaattcaggagacaaaatttgaagacatgacctcagataaatagcgtctaaagccatcaaaatatctcccttgatgatactctagcaagatttatagaagtggtcagtaaagcca

SEQ ID NO: 218514 - DNA, 2656 bp, Zea Mays
atgtatgtatctgcgcatttgccatttctggttacgctttcctctccggcctttccatcatcgccaccatttcgcacctcctccacaccggcaaacaacttcacgtcgcatgatctcgcgggagcgctcgaggatatgcaagtggcggccgctgcggcgtcaatgcgcggcaccgagacggttggcgcgaagtctgctgcgcggcggttgagccgcgtgctggtcgggcgccgccgccgggccgccgtgctgctcctcgcgctggcttacgcggctgcgatgctcatgctcaccattggcggcagcgaggggtctggatccagcggcgtggtggcgggtgtgctaaggcggggcgcgcaatcggcgccccccgggtcggtgtaccgcagccacctcgtgttcgaacggctgctcccggaaatgcgcgccttcgcctcccgcccgaacccgttagtgacatctcaatacaaaaagtttggaaagcaatgggaaccttgtatcagcaaggggttgatacactcagagctaccgccttcaaatggtttcctcatagttgaggcaaatggtggcttgaatcaacaacgcatttcaatttgtgatgctattgccgtggccaaaattcttaatgcaactcttgtgacaccagcatttcatttgaatagcgtttggcgtgattctaggtaaaagtttatgtttacataataatcagagatgtatttcgagtaactgaattattgtatataccttcgtccttttcctttcttggaaactagctttgtaaactattggtttactatactaagttgggaaacctacttctgttattagtctccttttgcaagtgtttttctggttaatctttcataacgagactggagtgaataagttaaatggattatgacccctatcgcatgcagccttttttgtatgcacactagcatttttttgttgctgctagcctgctacctttgagattatatttgctcttacgtagttatgtattttgacaacatagttttagtcattgttaagtactcctataagctcccacatatcctatcaggtgcatttccttttagcatataaaattttcccttaatcgtttaaatatgctgattctacatgtcccatgccattgggaattaaaactgtaatacctaaaatatatgttagtttacttctcactgtttcatgaggatgtcttttcaagttttcagcaaatttggtgatatctttgacgaagatcacttcattgagtcacttagaaaatatgtaagggttgtaaaagatcttcctgaagatgtttttctgcgattcaaccataatatcagcataataccaaacatgagaaccaaagctttctcacccccaagttactacttacaacatgtgcttccaaagctgttggagctaggggctgtgcgtattgcccctttctcaaatagactggctcattcagttcctatgaatatccaggcattgagatgtttgacaaactataaggcattaagattttctgaaccaataagaattcttgcagataatatggttgaccgaatgatcaagaggagttttttaagtggcgggaagtacgtctcggttcatcttcgctttgaagaggttttactaaagtttatcttgtgtggactaatattactacttttctcaagttgtgatgagttatatgtctaggacatggtagctttttcatgctgtaattatgatggtggctcgacggagaataatgcaatggaaaatgctcgcgaaaggagctggagagggaaattccaccgacctggtcgagtgataaatcctgaggctaaccgaaggaatgggagatgccctttgacacctttggagtttatacaaggtcggaatgatgctgcgaggaatgggatttgacaacactacttccctttatgttgcatccggtaaaatatataacgctgaaaagtacatgactcctcttcgacggttgtttccatttctacaaacaaaacacgctctagttacacctgaggagcttgcacagttcaagggacattcatcaagacttgcagcactggactatactatctgtcttcatagcgaagtgtttgtgatgacacaaggaagcaatttccctcactttctgatggggcacagacgttatatgtatggaggacatgcaaagacaataaaaccagataagcggaagctagttcaactctttgacaatccaaatatcagatgggatcgattcaagcaccacatgcaggacatgcgtcggcacagtgagatgaaaggtttcgcattaaggaaaccacaggaatccatatacacccttcctatgcctgactgcatgtgtcagcaagctgaagcacgatcaagggacacggcaaggagctaggcatgttccacccttcttctaacttgtaagcaggcacattaagcaaaggaaaaataaatattggtttgagcgtagaagagaatatagagatttcaaattatatggcccttgatatgaatcccttcctcaaataatagaggttcatcagtgagtatttgtatatgtgtgaagaaggtactccgcaatctattgtacttgtacattgtgctggataacttacaaagattttttcttcttatgagattaatctccagcgtgagctcaatc

SEQ ID NO: 218515 - DNA, 1869 bp, Zea Mays
atgtatgtatctgcgcatttgccatttctggttacgctttcctctccggcctttccatcatcgccaccatttcgcacctcctccacaccggcaaacaacttcacgtcgcatgatctcgcgggagcgctcgaggatatgcaagtggcggccgctgcggcgtcaatgcgcggcaccgagacggttggcgcgaagtctgctgcgcggcggttgagccgcgtgctggtcgggcgccgccgccgggccgccgtgctgctcctcgcgctggcttacgcggctgcgatgctcatgctcaccattggcggcagcgaggggtctggatccagcggcgtggtggcgggtgtgctaaggcggggcgcgcaatcggcgccccccgggtcggtgtaccgcagccacctcgtgttcgaacggctgctcccggaaatgcgcgccttcgcctcccgcccgaacccgttagtgacatctcaatacaaaaagtttggaaagcaatgggaaccttgtatcagcaaggggttgatacactcagagctaccgccttcaaatggtttcctcatagttgaggcaaatggtggcttgaatcaacaacgcatttcaatttgtgatgctattgccgtggccaaaattcttaatgcaactcttgtgacaccagcatttcatttgaatagcgtttggcgtgattctagcaaatttggtgatatctttgacgaagatcacttcattgagtcacttagaaaatatgtaagggttgtaaaagatcttcctgaagatgtttttctgcgattcaaccataatatcagcataataccaaacatgagaaccaaagctttctcacccccaagttactacttacaacatgtgcttccaaagctgttggagctaggggctgtgcgtattgcccctttctcaaatagactggctcattcagttcctatgaatatccaggcattgagatgtttgacaaactataaggcattaagattttctgaaccaataagaattcttgcagataatatggttgaccgaatgatcaagaggagttttttaagtggcgggaagtacgtctcggttcatcttcgctttgaagaggtcggaatgatgctgcgaggaatgggatttgacaacactacttccctttatgttgcatccggtaaaatatataacgctgaaaagtacatgactcctcttcgacggttgtttccatttctacaaacaaaacacgctctagttacacctgaggagcttgcacagttcaagggacattcatcaagacttgcagcactggactatactatctgtcttcatagcgaagtgtttgtgatgacacaaggaagcaatttccctcactttctgatggggcacagacgttatatgtatggaggacatgcaaagacaataaaaccagataagcggaagctagttcaactctttgacaatccaaatatcagatgggatcgattcaagcaccacatgcaggacatgcgtcggcacagtgagatgaaaggtttcgcattaaggaaaccacaggaatccatatacacccttcctatgcctgactgcatgtgtcagcaagctgaagcacgatcaagggacacggcaaggagctaggcatgttccacccttcttctaacttgtaagcaggcacattaagcaaaggaaaaataaatattggtttgagcgtagaagagaatatagagatttcaaattatatggcccttgatatgaatcccttcctcaaataatagaggttcatcagtgagtatttgtatatgtgtgaagaaggtactccgcaatctattgtacttgtacattgtgctggataacttacaaagattttttcttcttatgagattaatctccagcgtgagctcaatc

SEQ ID NO: 218516 - DNA, 1479 bp, Zea Mays
ctcaattttatcattatttgcatgcactgataaaatccatcgatttgtgatgctattgccgtggccaaaattcttaatgcaactcttgtgacaccagcatttcatttgaatagcgtttggcgtgattctagcaaatttggtgatatctttgacgaagatcacttcattgagtcacttagaaaatatgtaagggttgtaaaagatcttcctgaagatgtttttctgcgattcaaccataatatcagcataataccaaacatgagaaccaaagctttctcacccccaagttactacttacaacatgtgcttccaaagctgttggagctaggggctgtgcgtattgcccctttctcaaatagactggctcattcagttcctatgaatatccaggcattgagatgtttgacaaactataaggcattaagattttctgaaccaataagaattcttgcagataatatggttgaccgaatgatcaagaggagttttttaagtggcgggaattgtgatgagttatatgtctaggacatggtagctttttcatgctgtaattatgatggtggctcgacggagaataatgcaatggaaaatgctcgcgaaaggagctggagagggaaattccaccgacctggtcgagtgataaatcctgaggctaaccgaaggaatgggagatgccctttgacacctttggaggtcggaatgatgctgcgaggaatgggatttgacaacactacttccctttatgttgcatccggtaaaatatataacgctgaaaagtacatgactcctcttcgacggttgtttccatttctacaaacaaaacacgctctagttacacctgaggagcttgcacagttcaagggacattcatcaagacttgcagcactggactatactatctgtcttcatagcgaagtgtttgtgatgacacaaggaagcaatttccctcactttctgatggggcacagacgttatatgtatggaggacatgcaaagacaataaaaccagataagcggaagctagttcaactctttgacaatccaaatatcagatgggatcgattcaagcaccacatgcaggacatgcgtcggcacagtgagatgaaaggtttcgcattaaggaaaccacaggaatccatatacacccttcctatgcctgactgcatgtgtcagcaagctgaagcacgatcaagggacacggcaaggagctaggcatgttccacccttcttctaacttgtaagcaggcacattaagcaaaggaaaaataaatattggtttgagcgtagaagagaatatagagatttcaaattatatggcccttgatatgaatcccttcctcaaataatagaggttcatcagtgagtatttgtatatgtgtgaagaaggtactccgcaatctattgtacttgtacattgtgctggataacttacaaagattttttcttcttatgagattaatctccagcgtgagctcaatc

SEQ ID NO: 218517 - DNA, 773 bp, Zea Mays
caaacaagcccaaagtctagtgaacgtgtagttcatatccaactgttcgtccaatacttttctgtccaattcaaactgtcagtgttattaaataagatggctaatcatgaatagtcatgattagtttgccttattggtccgtggaacttgattaagcacttcaatacaattagatcgactagaaacctatttgtcccactaaccatgatttcagttgtctgattagtaacctgtggacgactaactggaaggcccaaaggtgaggaaaagatgtctgggctctcgcctaaacagttgtgctaagtaatttggcccatcagcatcaggttttcagtatgaacggtttctggactggattcttgactccatgcccatactgccccatgtccgccttgtcgagcccatgccgctgactattgttctcatgtgactggctggctcctgtcctcacgctgccagtggttctcgtcctagcaccaaccgcatcagctctcaccagatccgttcatcatttcatccccatgcctccggtgaattcgttcgtcctcatgcctctgctggatttgtttgtcctcatacatccgtttgttgtgtttttggtgaggggctgtggtgaccctgagagcgagtttgagagtctgaggagggactgggaggtgctgtgtagtgataagctgggcctgagtctcgagttgggttcatttgcagctggagtaatgatatcaacaacagaccttgcgcaacatactcttgaacaagtttgttctttctgc

SEQ ID NO: 218518 - DNA, 2311 bp, Zea Mays
attgacttatctcacagactcacacacaagtgcacaactgaactacagcttcttcaaccctgatgacttcaggccggaggacgacgcgcaggtcgtcgatggcaggatcgagctgctcggcgacgagttcagagggcgtgccagggggcgggtgtggcacaagcagccggtgcagctatgggacggcaccaccggcgaggctgccagcttcaccgcgaacttcagcttcagcatcgagtcagtggctggcaagggcgcggcaagcgctgggcacggcatgacgttcttcctcgcgccgtacacgccaaacttgccgcaggagtcctacgacggctgcctcggtctgttcgatgagagccaggcgcttaactactccaagttcaacgcgtccggcgactcgaggttcgtcgccgtggagttcgacatccgcaaggacatctgggacccgagcagccagcacatcggcatcgacatcaacagcatggactcccgcggcgactacacggtcttgccagacggcagcctcgtcgacgccggcgtgatgtccgcgacagtcgtctacgacaaccgcacgcgcagtcttcgcgtcaccctgatggtcggaagcgtcacttacacgtccgtagccaccgtggacttgagaagcttgctgccggagaaagtcgcagttggtttctcggcggcgacaggcgacgagtacaacgcaaaccacacggtgctttcgttctctttcgcctcgacgttggcaaccaagaacagcacctccatgcctgtgactgtgacctcgtccaccaagaaggccaccctgcaactcggcgctggagcggccgccgcagcgttgctggttttcctgctcgtcgccaccgtggcgctgctactagttcggcggtcaagcagaaggggcaagaaaccatacgatgacgagcagctaaccacagacggcgacgactccctcgacgccgtcgatgacagccacttcgagtccagcacggggccaaaacctatcccgtacgcccaactcgcggcggcgacgaaggacttcgcggcggagggaaaactggggcagggcgggtcggggtcggtgtaccgcggccacctgaaagagtccggcctcgatgtcgccatcaaggtgttctctcggggggcgtccatggagggacggaaggagtaccgggccgaggtcaccgtcatcagccggctgcggcatcggaacctggtgcagctcatcggctggtgccatggccggaggcggctccagctggtctacgaattggtcagcaatggcagcctcgatgaccacctctacagcacagaggtgacactgacatggccgacgagataccagataattcttggattgtcttccgccgtgctgtaccttcaccaagagtgggaccagtgtgtcgtccatggcgacatcaaaccgagcaacatcatgctggacgagtccttcaacgccaagctcggcgacttcgggctggcacggctcatcgaccacggaatgagcctgcagaccatgactgccgtcgctggcacgccagggtacctggacccggagtgcgtcatcaccggcaaggcctcccccgagtccgacgtgtacagcttcggcatcgtgctgcttgaggtcgcctgcgggcgccggccgatggcgccgccagcgagcacgggcgagggcaaggacggccaggtgttccggttggtggagtgggcttgggacatgcgcggccggggcgccgctctagacgccgcggacgagcggcttggtggagccttcgacccgtgggagatggaacgcgtggtctccgtcgggctctggtgcgcgcacccggacccaaagatgcgaccgcggatccgccaggctgccgaggcactgcggtcgagaagcttcaggatgccgctcctgccgcccaagatgccggtcgccgtgtacctgcagccgttcggtccctccaccctgcacttcagcgacaccaccacctccgtcgggtcttctgttaccgtgccgtacacttcgaccacgagccgtgcgacgacggcgacggggacggggatgtctaactccagctcgccgccggcggtcactcaacacttgagcccaagagcataggtcaaatgtacaactgtacggcgtacgtcggtatgtgtgtagtgtaattttgttaaaacaaaatacacttaaaagctaggcaaaatttcctaatgtatttttgagaattatgtgcactcatcgcatgagactttcaattgtcctgctacacctagcttttaaaagaataaaatatgattatggtgtatcttggatacaacttgc

SEQ ID NO: 218519 - DNA, 1070 bp, Zea Mays
gcagggcataaacactaaatataagaggaatatttccatcgttatctctgattaaacgagcttaaaaggtttcaatgcgcggccgagcacagtatatataccagataattcttggattgtcttccgccgtgctgtaccttcaccaagagtgggaccagtgtgtcgtccatggcgacatcaaaccgagcaacatcatgctggacgagtccttcaacgccaagctcggcgacttcgggctggcacggctcatcgaccacggaatgagcctgcagaccatgactgccgtcgctggcacgccagggtacctggacccggagtgcgtcatcaccggcaaggcctcccccgagtccgacgtgtacagcttcggcatcgtgctgcttgaggtcgcctgcgggcgccggccgatggcgccgccagcgagcacgggcgagggcaaggacggccaggtgttccggttggtggagtgggcttgggacatgcgcggccggggcgccgctctagacgccgcggacgagcggcttggtggagccttcgacccgtgggagatggaacgcgtggtctccgtcgggctctggtgcgcgcacccggacccaaagatgcgaccgcggatccgccaggctgccgaggcactgcggtcgagaagcttcaggatgccgctcctgccgcccaagatgccggtcgccgtgtacctgcagccgttcggtccctccaccctgcacttcagcgacaccaccacctccgtcgggtcttctgttaccgtgccgtacacttcgaccacgagccgtgcgacgacggcgacggggacggggatgtctaactccagctcgccgccggcggtcactcaacacttgagcccaagagcataggtcaaatgtacaactgtacggcgtacgtcggtatgtgtgtagtgtaattttgttaaaacaaaatacacttaaaagctaggcaaaatttcctaatgtatttttgagaattatgtgcactcatcgcatgagactttcaattgtcctgctacacctagcttttaaaagaataaaatatgattatggtgtatcttggatacaacttgc

SEQ ID NO: 218520 - DNA, 1412 bp, Zea Mays
gtttttttgtcagttatgatctctgttgggttctctctaggcgaataattacctccgaagaaactgttgtgtctgttctatcatctataacagggaagtatcgcacaggtttgtcacctgatgctctatcagtcatagaaaaccgtgaaaaggaggagtctgaggaacttagaaaatctgcttatcttcaagttgaaacggctttatccttacctggaaggcttagtggttctgtggaatggaggaaagcaaggtcagagttgggccaagcagattcactaagttgctcatcctgccctattcggaagtgtgtggatggtcatgtttcaaatatatatgatgctctttctgcttttctttcacatttttttgacaaaaaaatccctaaagaaagaattattgaagcttttgaggcattgaagactttgatgctaactcttaaaagttccaactttaagagcagaagtgctacattagaccagaaagcacaccatctatttgaggagatatttccttccattgaaagattgttatctgctatttcactgaaagcagagttgggaactgctggataccaatctgtgaccgtgtctggaaatccagtacactcatccttagcgttaccagtagcactggatgcagttaatgagatattgagtaattataagaataatacctttttcacagaaggcaatcatttcccaagagggaacagagtatgctcaggttcagtccttgcaagcagggaacaacttccaataggaattgcaacagcagcttttgacggcattcactcctccaaatgggaagagcctgatggagccaaaggatgttggctgatttatacaatgcaagatggcaaaagttgcgagttggagtcatatgatttgatgtcagctaatgatgctccagagagggatccaatggactgggttcttgaagggagcgcagacggaggctccacctggaatatacttgatgctcggaattcagaaatgttcgagagccgtttcctgaggaaaacatttacagtggataagagatataaggcaaatgctttcaggtttaggtttctacgcgtaagagattcccattctaatccaaggtttcagataggatcaattgatctatatgggaaaaccatatgaactccccccggagctgtgtttcacttttcggctttctgaactgctcggtctcacgagcctgtgtagtatcataaattcataatattgtaatgcgagcatttactgtggacgcaacgctctcttcagtatgaatagatactgaataattaagagcatgatatatattgtttgcgcgcgcgattgagttctgaaatataagtgaagtccctcgacatgatcaacgatcctgttttcttgaactcacagtcaggctcattattttcg

SEQ ID NO: 218521 - DNA, 962 bp, Zea Mays
cccactgcttatggatgcacctagatccatgcgaaggagtctatgataatcccttactgtacgagaaagggtggaacaagaagttaaattatgttattgcgatttctaaagatggagtacgggacgtaacaaaacgctacaccagaaagtggcatgaggttctctctaggcgaataattacctccgaagaaactgttgtgtctgttctatcatctataacagggaagtatcgcacagaaggcaatcatttcccaagagggaacagagtatgctcaggttcagtccttgcaagcagggaacaacttccaataggaattgcaacagcagcttttgacggcattcactcctccaaatgggaagagcctgatggagccaaaggatgttggctgatttatacaatgcaagatggcaaaagttgcgagttggagtcatatgatttgatgtcagctaatgatgctccagagagggatccaatggactgggttcttgaagggagcgcagacggaggctccacctggaatatacttgatgctcggaattcagaaatgttcgagagccgtttcctgaggaaaacatttacagtggataagagatataaggcaaatgctttcaggtttaggtttctacgcgtaagagattcccattctaatccaaggtttcagataggatcaattgatctatatgggaaaaccatatgaactccccccggagctgtgtttcacttttcggctttctgaactgctcggtctcacgagcctgtgtagtatcataaattcataatattgtaatgcgagcatttactgtggacgcaacgctctcttcagtatgaatagatactgaataattaagagcatgatatatattgtttgcgcgcgcgattgagttctgaaatataagtgaagtccctcgacatgatcaacgatcctgttttcttgaactcacagtcaggctcattattttcg

SEQ ID NO: 218522 - DNA, 916 bp, Zea Mays
gtcagttgaacagacccactgcttgtggaacaagaagttaaattatgttattgcgatttctaaagatggagtacgggacgtaacaaaacgctacaccagaaagtggcatgaggttctctctaggcgaataattacctccgaagaaactgttgtgtctgttctatcatctataacagggaagtatcgcacagaaggcaatcatttcccaagagggaacagagtatgctcaggttcagtccttgcaagcagggaacaacttccaataggaattgcaacagcagcttttgacggcattcactcctccaaatgggaagagcctgatggagccaaaggatgttggctgatttatacaatgcaagatggcaaaagttgcgagttggagtcatatgatttgatgtcagctaatgatgctccagagagggatccaatggactgggttcttgaagggagcgcagacggaggctccacctggaatatacttgatgctcggaattcagaaatgttcgagagccgtttcctgaggaaaacatttacagtggataagagatataaggcaaatgctttcaggtttaggtttctacgcgtaagagattcccattctaatccaaggtttcagataggatcaattgatctatatgggaaaaccatatgaactccccccggagctgtgtttcacttttcggctttctgaactgctcggtctcacgagcctgtgtagtatcataaattcataatattgtaatgcgagcatttactgtggacgcaacgctctcttcagtatgaatagatactgaataattaagagcatgatatatattgtttgcgcgcgcgattgagttctgaaatataagtgaagtccctcgacatgatcaacgatcctgttttcttgaactcacagtcaggctcattattttcg

SEQ ID NO: 218523 - DNA, 1173 bp, Zea Mays
atggtgtcttccacgcgcgtgtggcacaacggtctcggtaacacacaaagctctgagcgtgcatttaatgcgtgcgacgctaccatgatacaatgtgccttggtaacgtgcggggcggtcatagaggcctgtcacaagcctgccaatgctctgtgcttggtcagaattctggatttcactgatcacgtgtggacagaatgtttttcaaacttgtatggaagatggatgcacctagatccatgcgaaggagtctatgataatcccttactgtacgagaaagggtggaacaagaagttaaattatgttattgcgatttctaaagatggagtacgggacgtaacaaaacgctacaccagaaagtggcatgaggttctctctaggcgaataattacctccgaagaaactgttgtgtctgttctatcatctataacagggaagtatcgcacagaaggcaatcatttcccaagagggaacagagtatgctcaggttcagtccttgcaagcagggaacaacttccaataggaattgcaacagcagcttttgacggcattcactcctccaaatgggaagagcctgatggagccaaaggatgttggctgatttatacaatgcaagatggcaaaagttgcgagttggagtcatatgatttgatgtcagctaatgatgctccagagagggatccaatggactgggttcttgaagggagcgcagacggaggctccacctggaatatacttgatgctcggaattcagaaatgttcgagagccgtttcctgaggaaaacatttacagtggataagagatataaggcaaatgctttcaggtttaggtttctacgcgtaagagattcccattctaatccaaggtttcagataggatcaattgatctatatgggaaaaccatatgaactccccccggagctgtgtttcacttttcggctttctgaactgctcggtctcacgagcctgtgtagtatcataaattcataatattgtaatgcgagcatttactgtggacgcaacgctctcttcagtatgaatagatactgaataattaagagcatgatatatattgtttgcgcgcgcgattgagttctgaaatataagtgaagtccctcgacatgatcaacgatcctgttttcttgaactcacagtcaggctcattattttcg

SEQ ID NO: 218524 - DNA, 2506 bp, Zea Mays
agtcgcgcgcatcttttccagtcgcgcccatctaactacgggtagactcggcaggacggcagcacaggtccacgcgggcgcggaggcaacgctatggtggctcgccgcttcgtggtccggcatggccccgcagccggaggatcagccgaggcggcggaggagcaacagcacgaggtggagtacgacacggagcacggcctcgacgtcctccgcctccagatcttttccctcaccgccgtcccgcccgacctccagaagatcgtggtggaggcggatgggtcggtggtggacgacggcaccgacctggaagccgtctctgagcgcctgcgcctccttgctatcggcgaggagggggaggacgacggggcagcggccagggcgcaggagaagtccgacgaggaattcgcacggatgcttcagggagcaacctggtggtatcattctatgttgaggctgtttcaatgtcaccacacttcaccaatttggccaccagtcaccacagtttaggaaaagcaaaatgtgccaatactgggcggaagaagaggcacttctcctacaacagtacaatatacaaaatgatggtggagatgtgtttagacaaagagttgagccttacatgcaccaggttctgatgtatgaagattcagtgggacaagaggcagcacaaaagacagttccgatatgcgaactggaggagaaggcattagtttcactggccaaggaagggaatttcaatccttcgaaagatgaagagaagcatgcctttctgctgcaattgcttttttggtttaagcaatcattcagatgggttaatgcagcaccttgtgacagctgtgggccgtgagacatccaatgttggaatgggcaccccacttacctcagaaatcaaatttggcgcttcacgtgttgagatgtatagattctggatttcactgatcacgtgtggacagaatgtttttcaaacttgtatggaagatggatgcacctagatccatgcgaaggagtctatgataatcccttactgtacgagaaagggtggaacaagaagttaaattatgttattgcgatttctaaagatggagtacgggacgtaacaaaacgctacaccagaaagtggcatgaggttctctctaggcgaataattacctccgaagaaactgttgtgtctgttctatcatctataacagggaagtatcgcacaggtttgtcacctgatgctctatcagtcatagaaaaccgtgaaaaggaggagtctgaggaacttagaaaatctgcttatcttcaagttgaaacggctttatccttacctggaaggcttagtggttctgtggaatggaggaaagcaaggtcagagttgggccaagcagattcactaagttgctcatcctgccctattcggaagtgtgtggatggtcatgtttcaaatatatatgatgctctttctgcttttctttcacatttttttgacaaaaaaatccctaaagaaagaattattgaagcttttgaggcattgaagactttgatgctaactcttaaaagttccaactttaagagcagaagtgctacattagaccagaaagcacaccatctatttgaggagatatttccttccattgaaagattgttatctgctatttcactgaaagcagagttgggaactgctggataccaatctgtgaccgtgtctggaaatccagtacactcatccttagcgttaccagtagcactggatgcagttaatgagatattgagtaattataagaataatacctttttcacagaaggcaatcatttcccaagagggaacagagtatgctcaggttcagtccttgcaagcagggaacaacttccaataggaattgcaacagcagcttttgacggcattcactcctccaaatgggaagagcctgatggagccaaaggatgttggctgatttatacaatgcaagatggcaaaagttgcgagttggagtcatatgatttgatgtcagctaatgatgctccagagagggatccaatggactgggttcttgaagggagcgcagacggaggctccacctggaatatacttgatgctcggaattcagaaatgttcgagagccgtttcctgaggaaaacatttacagtggataagagatataaggcaaatgctttcaggtttaggtttctacgcgtaagagattcccattctaatccaaggtttcagataggatcaattgatctatatgggaaaaccatatgaactccccccggagctgtgtttcacttttcggctttctgaactgctcggtctcacgagcctgtgtagtatcataaattcataatattgtaatgcgagcatttactgtggacgcaacgctctcttcagtatgaatagatactgaataattaagagcatgatatatattgtttgcgcgcgcgattgagttctgaaatataagtgaagtccctcgacatgatcaacgatcctgttttcttgaactcacagtcaggctcattattttcg

SEQ ID NO: 218525 - DNA, 2394 bp, Zea Mays
agtcgcgcgcatcttttccagtcgcgcccatctaactacgggtagactcggcaggacggcagcacaggtccacgcgggcgcggaggcaacgctatggtggctcgccgcttcgtggtccggcatggccccgcagccggaggatcagccgaggcggcggaggagcaacagcacgaggtggagtacgacacggagcacggcctcgacgtcctccgcctccagatcttttccctcaccgccgtcccgcccgacctccagaagatcgtggtggaggcggatgggtcggtggtggacgacggcaccgacctggaagccgtctctgagcgcctgcgcctccttgctatcggcgaggagggggaggacgacggggcagcggccagggcgcaggagaagtccgacgaggaattcgcacggatgcttcaggcggaagaagaggcacttctcctacaacagtacaatatacaaaatgatggtggagatgtgtttagacaaagagttgagccttacatgcaccaggttctgatgtatgaagattcagtgggacaagaggcagcacaaaagacagttccgatatgcgaactggaggagaaggcattagtttcactggccaaggaagggaatttcaatccttcgaaagatgaagagaagcatgcctttctgctgcaattgcttttttggtttaagcaatcattcagatgggttaatgcagcaccttgtgacagctgtgggccgtgagacatccaatgttggaatgggcaccccacttacctcagaaatcaaatttggcgcttcacgtgttgagatgtatagattctggatttcactgatcacgtgtggacagaatgtttttcaaacttgtatggaagatggatgcacctagatccatgcgaaggagtctatgataatcccttactgtacgagaaagggtggaacaagaagttaaattatgttattgcgatttctaaagatggagtacgggacgtaacaaaacgctacaccagaaagtggcatgaggttctctctaggcgaataattacctccgaagaaactgttgtgtctgttctatcatctataacagggaagtatcgcacaggtttgtcacctgatgctctatcagtcatagaaaaccgtgaaaaggaggagtctgaggaacttagaaaatctgcttatcttcaagttgaaacggctttatccttacctggaaggcttagtggttctgtggaatggaggaaagcaaggtcagagttgggccaagcagattcactaagttgctcatcctgccctattcggaagtgtgtggatggtcatgtttcaaatatatatgatgctctttctgcttttctttcacatttttttgacaaaaaaatccctaaagaaagaattattgaagcttttgaggcattgaagactttgatgctaactcttaaaagttccaactttaagagcagaagtgctacattagaccagaaagcacaccatctatttgaggagatatttccttccattgaaagattgttatctgctatttcactgaaagcagagttgggaactgctggataccaatctgtgaccgtgtctggaaatccagtacactcatccttagcgttaccagtagcactggatgcagttaatgagatattgagtaattataagaataatacctttttcacagaaggcaatcatttcccaagagggaacagagtatgctcaggttcagtccttgcaagcagggaacaacttccaataggaattgcaacagcagcttttgacggcattcactcctccaaatgggaagagcctgatggagccaaaggatgttggctgatttatacaatgcaagatggcaaaagttgcgagttggagtcatatgatttgatgtcagctaatgatgctccagagagggatccaatggactgggttcttgaagggagcgcagacggaggctccacctggaatatacttgatgctcggaattcagaaatgttcgagagccgtttcctgaggaaaacatttacagtggataagagatataaggcaaatgctttcaggtttaggtttctacgcgtaagagattcccattctaatccaaggtttcagataggatcaattgatctatatgggaaaaccatatgaactccccccggagctgtgtttcacttttcggctttctgaactgctcggtctcacgagcctgtgtagtatcataaattcataatattgtaatgcgagcatttactgtggacgcaacgctctcttcagtatgaatagatactgaataattaagagcatgatatatattgtttgcgcgcgcgattgagttctgaaatataagtgaagtccctcgacatgatcaacgatcctgttttcttgaactcacagtcaggctcattattttcg

SEQ ID NO: 218526 - DNA, 1903 bp, Zea Mays
atggagttggaatataaggaaattcaatctgttgcagcagagaataagtctgtaattggcagaccagcagaatttgcacttgtcgatgctgatggcactacagcattcctgcagaaggccttaaagttcatcgaagattatggaaagaatgagttctccccagaagaggatgcacatgttatcggtgactgtattaagtgcattcttcgagagatgccatcttctccaattccggcaccatgttgcactgccctggaactgacaagacaaaaagactcgatgctatgaatagagtgatatatgaagtattcccagaaccaaatcgtcaattgttgcagaggattctcaaaatgatgcagattgttggatcacacaaagctgtaaataggatgtcttcatctgctttggcagcttgcatggcaccgcttcttctccgtcctcttcttcttggtgaatgtgaaattgatagtgaattcagtatggctggggatggttcattccagttgcttcaagctgctgctgctgccaaccatgcccaagctattgttattattatgcttgaggaatatgatcagatatttgatacaatgacatccctgaagattatgatggctcctctggttctggtgaagatgttgaagaagatttgaatgatgatactgaacactcttatggcatgaaggtcgaatgtgatagtaacattaggattgataatgcaaatgataaggcaagaaaaggcttgccaacagaggaggatggctgttccagtgataacgacaaggctcatattacgaagcttgaaaacaagaagactcatctccaatctaaacttacggaggaggagaaagaaaatacagtcctccaggcaaatttagaaaaacgaaaagaagcattacacaagcgccgtgtagcacttgaaaaagaagtggaaaatttacgagaccagctactgaaggagagaagtttgagggcttctctggagtctgggctaatgaatatgcgaagaggacaagtgtccttcccctcaacgatagacaccaagactaaggctgatcttgaggaagttgctgccgttgaagctgatattatgaacttgaagcaaaaggtttctgatcttcggggacaactcaacaaccaagttcagttgagttccacctcgttatgtgaatcatgcaacaacaagcgatccataaatgcagacaagcttgtcgaaggtgaacaaaacgctgccctttctccacagattgcctcagtcgaagcaccacctattgtagggtcttattctgtacctgacatgttctgggctacaaaccaaatggttcagaagatgttgtattcaaagggtgagattgcgaaggatggccaagacggatcacttacatcaagatggaactttgcacagagaccacactcaaatagtccagtcatgagcagggttcaaggttccgatgcctattcaagtactaaaaccgaggaatctggaggcgcaccttcctctgcattagcgaagctgactacccgactcaactttttgaaagaaagaagggccttgcttgccagtgagatgcaaaacttagatctgggccgctcccaggcccagaggcatacagctcctccgaaagctgagactccaactgagaagtagaatcgttttactgcatcgttgttaggccacaagctcaggcattcatgtcttcaccctgatgattcatatgtcaagttttttagcgacaccgacgaacaacctggtttgtactattttatctccaaataaacaatactcctactctgggacaaagccaaagtgcgtttgcaaattatttgtcggtctgtctggtactctggtttgtacatcaacttcacttacgatcaagctaagtaaaaataccgtaccatgtgtatc

SEQ ID NO: 218527 - DNA, 1762 bp, Zea Mays
atggagttggaatataaggaaattcaatctgttgcagcagagaataagtctgtaattggcagaccagcagaatttgcacttgtcgatgctgatggcactacagcattcctgcagaaggccttaaagttcatcgaagattatggaaagaatgagttctccccagaagaggatgcacatgttatcggtgactgtattaagtgcattcttcgagagatgccatcttctccaattccggcaccatgttgcactgccctggttagagcttaccgaactgacaagacaaaaagactcgatgctatgaatagagtgatatatgaagtattcccagaaccaaatcgtcaattgttgcagagacaatgacatccctgaagattatgatggctcctctggttctggtgaagatgttgaagaagatttgaatgatgatactgaacactcttatggcatgaaggtcgaatgtgatagtaacattaggattgataatgcaaatgataaggcaagaaaaggcttgccaacagaggaggatggctgttccagtgataacgacaaggctcatattacgaagcttgaaaacaagaagactcatctccaatctaaacttacggaggaggagaaagaaaatacagtcctccaggcaaatttagaaaaacgaaaagaagcattacacaagcgccgtgtagcacttgaaaaagaagtggaaaatttacgagaccagctactgaaggagagaagtttgagggcttctctggagtctgggctaatgaatatgcgaagaggacaagtgtccttcccctcaacgatagacaccaagactaaggctgatcttgaggaagttgctgccgttgaagctgatattatgaacttgaagcaaaaggtttctgatcttcggggacaactcaacaaccaagttcagttgagttccacctcgttatgtgaatcatgcaacaacaagcgatccataaatgcagacaagcttgtcgaaggtgaacaaaacgctgccctttctccacagattgcctcagtcgaagcaccacctattgtagggtcttattctgtacctgacatgttctgggctacaaaccaaatggttcagaagatgttgtattcaaagggtgagattgcgaaggatggccaagacggatcacttacatcaagatggaactttgcacagagaccacactcaaatagtccagtcatgagcagggttcaaggttccgatgcctattcaagtactaaaaccgaggaatctggaggcgcaccttcctctgcattagcgaagctgactacccgactcaactttttgaaagaaagaagggccttgcttgccagtgagatgcaaaacttagatctgggccgctcccaggcccagaggcatacagctcctccgaaagctgagactccaactgagaagtagaatcgttttactgcatcgttgttaggccacaagctcaggtaggattgcaggcagtaacagaaaacttcgattcgacaatgcacagagactatctagctatagagtaacttgatttgtacatcgcacaggcattcatgtcttcaccctgatgattcatatgtcaagttttttagcgacaccgacgaacaacctggtttgtactattttatctccaaataaacaatactcctactctgggacaaagccaaagtgcgtttgcaaattatttgtcggtctgtctggtactctggtttgtacatcaacttcacttacgatcaagctaagtaaaaataccgtaccatgtgtatc

SEQ ID NO: 218528 - DNA, 2687 bp, Zea Mays
ggaggaggaggagggagaggggatcgagaggaacgcgcgcgaacagaagagaggaaggaagaggaggtggcaggctcggttccgcgcgcgccgacgtgagattccgggccgcacgtgcccgcagtgtgatagatatcatcttgaggtcttcataagtcagcaacctagagcagaaaatgtcagctccggaattcaggacttcttaccagcaatcccctgagaatgtcggtcaactcaaggtctgccaatgtgggtcgggcgactccaattttcagatcacaaataaatccgacggtggcgaaaattcaccaacaacttgtccaaactgtcaggtccttaagagtggaaatttactgctttcatctaaagggattggctggacagtatggaaaaagcgttggtttattcttacaaggacatcattagtgttcttcaggagcgatcctaatgttccccctcccagaggaagtgaaccaattgttacacttggtggaattgacttgaataacactgcaagtatgatagtcaaagaagaaaggaaacttataacagtcgtgtttcctgatggccgtgacggacgcactttcacccttaaggcagaaactacagaagacctaaatgagtggagaagtgcattggagaatgctctggctcaggcacccagtgttgtgaatacagcgggacaacttccagtagtcagcactgacataacagaacctgttgaagctgctgttgaacaattgcattcttcgagagatgccatcttctccaattccggcaccatgttgcactgccctggttagagcttaccgaactgacaagacaaaaagactcgatgctatgaatagagtgatatatgaagtattcccagaaccaaatcgtcaattgttgcagaggattctcaaaatgatgcagattgttggatcacacaaagctgtaaataggatgtcttcatctgctttggcagcttgcatggcaccgcttcttctccgtcctcttcttcttggtgaatgtgaaattgatagtgaattcagtatggctggggatggttcattccagttgcttcaagctgctgctgctgccaaccatgcccaagctattgttattattatgcttgaggaatatgatcagatatttgatgtacctgcttttccctggacgtgcttttctttgcaagcttgttctatttgaacccatactgtattgttatggattttaatccaacaattacctgtttaggatattgaagacggttcgtactcttcagatgcttataccgagtctgacattgacaaggaatattctacagacaatgacatccctgaagattatgatggctcctctggttctggtgaagatgttgaagaagatttgaatgatgatactgaacactcttatggcatgaaggtcgaatgtgatagtaacattaggattgataatgcaaatgataaggcaagaaaaggcttgccaacagaggaggatggctgttccagtgataacgacaaggctcatattacgaagcttgaaaacaagaagactcatctccaatctaaacttacggaggaggagaaagaaaatacagtcctccaggcaaatttagaaaaacgaaaagaagcattacacaagcgccgtgtagcacttgaaaaagaagtggaaaatttacgagaccagctactgaaggagagaagtttgagggcttctctggagtctgggctaatgaatatgcgaagaggacaagtgtccttcccctcaacgatagacaccaagactaaggctgatcttgaggaagttgctgccgttgaagctgatattatgaacttgaagcaaaaggtttctgatcttcggggacaactcaacaaccaagttcagttgagttccacctcgttatgtgaatcatgcaacaacaagcgatccataaatgcagacaagcttgtcgaattgcctcagtcgaagcaccacctattgtagggtcttattctgtacctgacatgttctgggctacaaaccaaatggttcagaagatgttgtattcaaagggtgagattgcgaaggatggccaagacggatcacttacatcaagatggaactttgcacagagaccacactcaaatagtccagtcatgagcagggttcaaggttccgatgcctattcaagtactaaaaccgaggaatctggaggcgcaccttcctctgcattagcgaagctgactacccgactcaactttttgaaagaaagaagggccttgcttgccagtgagatgcaaaacttagatctgggccgctcccaggcccagaggcatacagctcctccgaaagctgagactccaactgagaagtagaatcgttttactgcatcgttgttaggccacaagctcaggtaggattgcaggcagtaacagaaaacttcgattcgacaatgcacagagactatctagctatagagtaacttgatttgtacatcgcacaggcattcatgtcttcaccctgatgattcatatgtcaagttttttagcgacaccgacgaacaacctggtttgtactattttatctccaaataaacaatactcctactctgggacaaagccaaagtgcgtttgcaaattatttgtcggtctgtctggtactctggtttgtacatcaacttcacttacgatcaagctaagtaaaaataccgtaccatgtgtatc

SEQ ID NO: 218529 - DNA, 2710 bp, Zea Mays
ggaggaggaggagggagaggggatcgagaggaacgcgcgcgaacagaagagaggaaggaagaggaggtggcaggctcggttccgcgcgcgccgacgtgagattccgggccgcacgtgcccgcagtgtgatagatatcatcttgaggtcttcataagtcagcaacctagagcagaaaatgtcagctccggaattcaggacttcttaccagcaatcccctgagaatgtcggtcaactcaaggtctgccaatgtgggtcgggcgactccaattttcagatcacaaataaatccgacggtggcgaaaattcaccaacaacttgtccaaactgtcaggtccttaagagtggaaatttactgctttcatctaaagggattggctggacagtatggaaaaagcgttggtttattcttacaaggacatcattagtgttcttcaggagcgatcctaatgttccccctcccagaggaagtgaaccaattgttacacttggtggaattgacttgaataacactgcaagtatgatagtcaaagaagaaaggaaacttataacagtcgtgtttcctgatggccgtgacggacgcactttcacccttaaggcagaaactacagaagacctaaatgagtggagaagtgcattggagaatgctctggctcaggcacccagtgttgtgaatacagcgggacaacttccagtagtcagcactgacataacagaacctgttgaagctgctgttgaacaatcagagaataagtctgtaattggcagaccagcagaatttgcacttgtcgatgctgatggcactacagcattcctgcagaaggccttaaagttcatcgaagattatggaaagaatgagttctccccagaagaggatgcacatgttatcggtgactgtattaagtgcattcttcgagagatgccatcttctccaattccggcaccatgttgcactgccctggttagagcttaccgaactgacaagacaaaaagactcgatgctatgaatagagtgatatatgaagtattcccagaaccaaatcgtcaattgttgcagaggattctcaaaatgatgcagattgttggatcacacaaagctgtaaataggatgtcttcatctgctttggcagcttgcatggcaccgcttcttctccgtcctcttcttcttggtgaatgtgaaattgatagtgaattcagtatggctggggatggttcattccagttgcttcaagctgctgctgctgccaaccatgcccaagctattgttattattatgcttgaggaatatgatcagatatttgatgtacctgcttttccctggacgatattgaagacggttcgtactcttcagatgcttataccgagtctgacattgacaaggaatattctacagacaatgacatccctgaagattatgatggctcctctggttctggtgaagatgttgaagaagatttgaatgatgatactgaacactcttatggcatgaaggtcgaatgtgatagtaacattaggattgataatgcaaatgataaggcaagaaaaggcttgccaacagaggaggatggctgttccagtgataacgacaaggctcatattacgaagcttgaaaacaagaagactcatctccaatctaaacttacggaggaggagaaagaaaatacagtcctccaggcaaatttagaaaaacgaaaagaagcattacacaagcgccgtgtagcacttgaaaaagaagtggaaaatttacgagaccagctactgaaggagagaagtttgagggcttctctggagtctgggctaatgaatatgcgaagaggacaagtgtccttcccctcaacgatagacaccaagactaaggctgatcttgaggaagttgctgccgttgaagctgatattatgaacttgaagcaaaaggtttctgatcttcggggacaactcaacaaccaagttcagttgagttccacctcgttatgtgaatcatgcaacaacaagcgatccataaatgcagacaagcttgtcgaaggtgaacaaaacgctgccctttctccacagattgcctcagtcgaagcaccacctattgtagggtcttattctgtacctgacatgttctgggctacaaaccaaatggttcagaagatgttgtattcaaagggtgagattgcgaaggatggccaagacggatcacttacatcaagatggaactttgcacagagaccacactcaaatagtccagtcatgagcagggttcaaggttccgatgcctattcaagtactaaaaccgaggaatctggaggcgcaccttcctctgcattagcgaagctgactacccgactcaactttttgaaagaaagaagggccttgcttgccagtgagatgcaaaacttagatctgggccgctcccaggcccagaggcatacagctcctccgaaagctgagactccaactgagaagtagaatcgttttactgcatcgttgttaggccacaagctcaggcattcatgtcttcaccctgatgattcatatgtcaagttttttagcgacaccgacgaacaacctggtttgtactattttatctccaaataaacaatactcctactctgggacaaagccaaagtgcgtttgcaaattatttgtcggtctgtctggtactctggtttgtacatcaacttcacttacgatcaagctaagtaaaaataccgtaccatgtgtatc

SEQ ID NO: 218530 - DNA, 912 bp, Zea Mays
gaggaacgcgcgcgaacagaagagaggaaggaagaggaggtggcaggctcggttccgcgcgcgccgacgtgagattccgggccgcacgtgcccgcagtgtgatagatatcatcttgaggtcttcataagtcagcaacctagagcagaaaatgtcagctccggaattcaggacttcttaccagcaagtatcatcttcgcagtcccctgagaatgtcggtcaactcaaggtctgccaatgtgggtcgggcgactccaattttcagatcacaaataaatccgacggtggcgaaaattcaccaacaacttgtccaaactgtcaggtccttaagagtggaaatttactgctttcatctaaagggattggctggacagtatggaaaaagcgttggtttattcttacaaggacatcattagtgttcttcaggagcgatcctaatgttccccctcccagaggaagtgaaccaattgttacacttggtggaattgacttgaataacactgcaagtatgatagtcaaagaagaaaggaaacttataacagtcgtgtttcctgatggccgtgacggacgcactttcacccttaaggcagaaactacagaagacctaaatgagtggagaagtgcattggagaatgctctggctcaggcacccagtgttgtgaatacagcgggacaacttccagtagtcagcactgacataacagaacctgttgaagctgctgttgaacaatcagagaataagtctgtaattggcagaccagcagaatttgcacttgtcgatgctgatggcactacagcattcctgcagaaggccttaaagttcatcgaagattatggtgttaaggtcgaaggaattcttcgtcagtctgctgatgttgaagaagtcaaacgcagggttcaggattacgaaaagg

SEQ ID NO: 218531 - DNA, 899 bp, Zea Mays
aggggatcgagaggaacgcgcgcgaacagaagagaggaaggaagaggaggtggcaggctcggttccgcgcgcgccgacgtgagattccgggccgcacgtgcccgcagatatcatcttgaggtcttcataagtcagcaacctagagcagaaaatgtcagctccggaattcaggacttcttaccagcaatcccctgagaatgtcggtcaactcaaggtctgccaatgtgggtcgggcgactccaattttcagatcacaaataaatccgacggtggcgaaaattcaccaacaacttgtccaaactgtcaggtccttaagagtggaaatttactgctttcatctaaagggattggctggacagtatggaaaaagcgttggtttattcttacaaggacatcattagtgttcttcaggagcgatcctaatgttccccctcccagaggaagtgaaccaattgttacacttggtggaattgacttgaataacactgcaagtatgatagtcaaagaagaaaggaaacttataacagtcgtgtttcctgatggccgtgacggacgcactttcacccttaaggcagaaactacagaagacctaaatgagtggagaagtgcattggagaatgctctggctcaggcacccagtgttgtgaatacagcgggacaacttccagtagtcagcactgacataacagaacctgttgaagctgctgttgaacaatcagagaataagtctgtaattggcagaccagcagaatttgcacttgtcgatgctgatggcactacagcattcctgcagaaggccttaaagttcatcgaagattatggtgttaaggtcgaaggaattcttcgtcagtctgctgatgttgaagaagtcaaacgcagggttcaggattacgaaaagg

SEQ ID NO: 218532 - DNA, 953 bp, Zea Mays
ggaaatagaaccgggagactggagcggaggcgggaggaggaggagggagaggggatcgagaggaacgcgcgcgaacagaagagaggaaggaagaggaggtggcaggctcggttccgcgcgcgccgacgtgagattccgggccgcacgtgcccgcagtgtgatagatatcatcttgaggtcttcataagtcagcaacctagagcagaaaatgtcagctccggaattcaggacttcttaccagcaatcccctgagaatgtcggtcaactcaaggtctgccaatgtgggtcgggcgactccaattttcagatcacaaataaatccgacggtggcgaaaattcaccaacaacttgtccaaactgtcaggtccttaagagtggaaatttactgctttcatctaaagggattggctggacagtatggaaaaagcgttggtttattcttacaaggacatcattagtgttcttcaggagcgatcctaatgttccccctcccagaggaagtgaaccaattgttacacttggtggaattgacttgaataacactgcaagtatgatagtcaaagaagaaaggaaacttataacagtcgtgtttcctgatggccgtgacggacgcactttcacccttaaggcagaaactacagaagacctaaatgagtggagaagtgcattggagaatgctctggctcaggcacccagtgttgtgaatacagcgggacaacttccagtagtcagcactgacataacagaacctgttgaagctgctgttgaacaatagaataagtctgtaattggcagaccagcagaatttgcacttgtcgatgctgatggcactacagcattcctgcagaaggccttaaagttcatcgaagattatggtgttaaggtcgaaggaattcttcgtcagtctgctgatgttgaagaagtcaaacgcagggttcaggattacgaaaagg

SEQ ID NO: 218533 - DNA, 998 bp, Zea Mays
gtgagggacgaggccgagcggtgtgaggaaatagaaccgggagactggagcggaggcgggaggaggaggagggagaggggatcgagaggaacgcgcgcgaacagaagagaggaaggaagaggaggtggcaggctcggttccgcgcgcgccgacgtgagattccgggccgcacgtgcccgcagtgtgatagatatcatcttgaggtcttcataagtcagcaacctagagcagaaaatgtcagctccggaattcaggacttcttaccagcaatcccctgagaatgtcggtcaactcaaggtctgccaatgtgggtcgggcgactccaattttcagatcacaaataaatccgacggtggcgaaaattcaccaacaacttgtccaaactgtcaggtccttaagagtggaaatttactgctttcatctaaaggtgttatttcttgctgggattggctggacagtatggaaaaagcgttggtttattcttacaaggacatcattagtgttcttcaggagcgatcctaatgttccccctcccagaggaagtgaaccaattgttacacttggtggaattgacttgaataacactgcaagtatgatagtcaaagaagaaaggaaacttataacagtcgtgtttcctgatggccgtgacggacgcactttcacccttaaggcagaaactacagaagacctaaatgagtggagaagtgcattggagaatgctctggctcaggcacccagtgttgtgaatacagcgggacaacttccagtagtcagcactgacataacagaacctgttgaagctgctgttgaacaatcagagaataagtctgtaattggcagaccagcagaatttgcacttgtcgatgctgatggcactacagcattcctgcagaaggccttaaagttcatcgaagattatggtgttaaggtcgaaggaattcttcgtcagtctgctgatgttgaagaagtcaaacgcagggttcaggattacgaaaagg

SEQ ID NO: 218534 - DNA, 623 bp, Zea Mays
ctgcccgaacctctcgggtgtagaccataccaggcccccgctcccctcccctcccttggcgacggcatgccgtggtggatccgcgtgcgtcaacaatctgccgctcgcgatccgcacgcgccgtccctacgaatcccggccgccgacgtcgatcccgcgccgcgcgccatcgagatcttgctccacggcacgctccacgccaccatcttcgaggccgagtcgctctccaacccgcaccgcgccactggcggcgcccccaagttcatccgtaagagatggaggagtctggattcgccatcaccagcatcaatggaaggatcaacagggctgtttgggggccactaatcaggaccatcgtcactgctagggaggatgctaccattcgcatatgggactcagaggaggatgaggagcgagaacgggtgtgccagaagcaaggccaccagcgcgaaggcgaccatggtggcgtagttgacgcagaattggattttgggaaaaagcttccatcattcttcttcattcaaaagaggatggctttttcagatgatggaaagatgaaggttgactatgaacttggatacaacgtccatctccactaatctcagcgctagggtgcagaggct

SEQ ID NO: 218535 - DNA, 4291 bp, Zea Mays
atggacagaaagccagccggtaaaaatagcttcaggcaacaggagaagcagaaaaaaaatgagaggttggactggaatgacctggtcctggctgggccttttgtccttcattcacattcccaaactgctccatcactttataccgccgtctcatctcgtgctcgtggtgtccgtgttcctcctcttggcggggccggccagaaaagcttgctggacggttggctccggaaaccggatgcgtctcaggtcaggcgcctgatttttacttgggttcccatggttcgtttccacagcgcaaaccacctcccagcttttagtcagtatagtctgctggagcccatggaggtgcagctggcgacggagcaaccgggggacccgttcctgccgctgcggtgggagagcacgggcgaccagtggtggtacgccacgcccatcgactgggcggcggccaacggccactacgacctcgtccgggagctcctgcgcctggaccccaacctcctcgtcaagctcacctcgctccgccgcatccgccgcctcgagtccgtctgggacgacgacgcgcgcctcgacgccgccgccaggaaccgcgccgccgtcgcccgccgcctgctgctcgactgcgagcccgataacgacaagcagcccccatcccgcggaggcggaggcgacgccgccaaccgcctcctccgcgccggctacggcggatggctcctctacacggcggccgcggccggggacgagaggttcgcgcgggagctgctcgcggcgcagccgctgctcgtcttcggcgagggggagtacggcgtcaccgacatcctgtacgccggcgcgaggagcggacgccccgaggtgttccgcctcctgttcgacgcggtgctgtccgcggcgccggcgtgcccggtcgggggtgacgacggcgagtttaggcgcgagatgatgaaccgcgccgtgcacgccgcggcgaggggaggcagccttgccgtgctcagggacctcctgcgcggctgctccgacgccgcggcatacagggacgcgcagggatcaacgatcttgcacgccgcggctgcaaagggccaagttgagcgaactgtgtagatgaccaagggaacacggcgctgcatatagcagccttccgaggccatgtccaagtggtcgaggctctcatcaccgcatctccgtctcttatatcagcaacaaacgaagccggcgacacgttccttcacatggcactgactggcttcgggactcccgagttccaaaggcttgatcgccagacggagctcattaggcaattagcgagtggagcaatcgtggatatcagcagcagcactattatcaacgcgcagaatgacgacgggaagacagctcttcacttggccgtggtttgcaacctgcattcggacgtcgttaagctcctgatgagcgtgccttgtattgacctcaacatctgcgacaaggacggcatgactcctctggatctactcaggaagcagccacggacgacggcgtcagagatactgatcaaacaactgatcctggccggtgggttcacaagctcaagggaccacgagactaggtcggctatcgcttctcagctgaagatgcactccattgtaggaagcccggggacatcgttcaagataccagacggcgagatcttctttctccacgctgctggagtcgacgtgtcgggcggcatcggcgaaggaggagcagcagtaccgttttcctccgttattgctagggctgacgtcctgcatggacccaaactgaagaggctcaactctttccaagacgcggcgaagcatatcaaggtcctattcagatggcctcgccgcggatggaacaagtcaggcagcggcggccgaaagggtctggacgacgacgatgcctcgtctgtggactctgccaagacctggagccacgaggagaccccgacaccgctgaggcagaggtattccaggatcggctcgctgttcaacaagcggacctacgcagcaggcagggcttcacctagcgaagcagtgaagaagggtggagtggtacagccagctggttctactctactttcgacatctctgtcgtcgtcgtcggcgtccttggttgacaggttcgaatctgttcatcaggacaacgatcagtctccttatgtcagtaggttgatcaggcacacacctaagaaatctggatctctcaacagtagacttatgaaccagtccttgcgcctcagggcctaagataggcagcaacatcgacaaggcttcttgcttccctcactagctagctggttacattttacagcttcactggtagcagacacagataattctaaatatctagccgccctgccacagcagcagtcatggctagagcttcatggaatatgaactatgagaaggttcttgttgacatcttgcacgagcacaatcatgtgaagtaccggggccagaatggttgggcaccagaaggttggcgttctatgacacaaatgttcaatgagaagtgcccgttggctaagtttacaaaggcacagatccaggaaaaagaaaaggaacttaaggcaaactataaggtgctgaaggaagcccgcaagcaaagtggtgttggatggaatgaggccatgggtatgatcattgctgaaccaccaatatgggcaaatataattgttagtaatccaaaggtcaagaaatttcagtcaaggccattccctttgtataatcagttgtcagcactctatgatggcagttgtgccaccggtgatctcaattttacatcaactcagcaacatacatcatcccgacaacaattacatattcaagctgaagttgaagctgaagctatgagctctttcaggattgatgatgacctcggggttaaccctgatttgaaccaaatctcttcaaatttgcatgggttgggatcttcaagtacccgtgttgagattggtggacatgaccgcaccccggcatcttcagaacagcgagcggagagtcatggaaggaagcgtaagcaaagtcagattgctggggttcttgaggaatatttggattacaaaaggcaacataatgataagttgcttgatgtggtaaatcagattgatcaacaagctgagggatgtaacaagaaggaagaatattgtattggaaagtgtgttcgtgtgttagagtcgatggaagatataactgaagaggagatggcagcggcaatgggtgtgtttaagtgcgaggagaacagagaaatatttctgaacagccagaggccacgtgtccgattgttgtggcttagaaacgagatccacaagcagatgtccaccaatctcaatattttcagatgtccaccaagcctttagtttcctgggaggcaatggatggagctctgcgacaataaatacaagatgttcaaaagaacgttattgttgtgttaacattttgggcataccaagtacttttttttgttatgagtctgtcaaacatatgttaaatttgtcactaatttcttatgagctatttctgtggtcaaagaaagttgtttatttaagtggcatgaatcaaaaaatcttaggagacttctgtttgattttgtttatttttaaaagaaagttgcttcagcgtacaaattttgaggggcatattgttgtttttgcgtacaaatttctgtttgattttgttgatttttattttttctattttacttgtgatttgatgatgatcacacttctagcagctgccgatgtgtggctccagagggcagcagggcagctgacccatggggcaccaaaggatgtcagggcagcgcagccccgctgggcaatgcccacccagggaattcgtatgacaggaatttgccccctccggtgctagctcccctgtgttttattggccccggtcaccaaaggatgtcttaggtgccgtggaagcccctgaacctgaactgtccgtcggcgtcgaggcggccccgcgcgtcggacatccactcgctcctgaggtcgatgagcctctggccggcgtcgttgacggtgccgtcggcgttgacgagcgcggcgtcctgcctccacatgtggccctgcatgaacccccagagcacgacgccctgcaccgccgggtgcgcgaacgcctcgcgcaggaccacctcgaggtcgtcggcgcggagcgcgtcgtcgggctcgcagacgtcgacctccgtgaaccagacgggcaggccggtggcggcgtagaccgtgtcgagcgcgtcgcagatgacctcgccgacggggtgggtgacgtggccctgcatcccgacgccgccgacc

SEQ ID NO: 218536 - DNA, 4978 bp, Zea Mays
atggacagaaagccagccggtaaaaatagcttcaggcaacaggagaagcagaaaaaaaatgagaggttggactggaatgacctggtcctggctgggccttttgtccttcattcacattcccaaactgctccatcactttataccgccgtctcatctcgtgctcgtggtgtccgtgttcctcctcttggcggggccggccagaaaagcttgctggacggttggctccggaaaccggatgcgtctcaggtcaggcgcctgatttttacttgggttcccatggttcgtttccacagcgcaaaccacctcccagcttttagtcagtatagtctgctggagcccatggaggtgcagctggcgacggagcaaccgggggacccgttcctgccgctgcggtgggagagcacgggcgaccagtggtggtacgccacgcccatcgactgggcggcggccaacggccactacgacctcgtccgggagctcctgcgcctggaccccaacctcctcgtcaagctcacctcgctccgccgcatccgccgcctcgagtccgtctgggacgacgacgcgcgcctcgacgccgccgccaggaaccgcgccgccgtcgcccgccgcctgctgctcgactgcgagcccgataacgacaagcagcccccatcccgcggaggcggaggcgacgccgccaaccgcctcctccgcgccggctacggcggatggctcctctacacggcggccgcggccggggacgagaggttcgcgcgggagctgctcgcggcgcagccgctgctcgtcttcggcgagggggagtacggcgtcaccgacatcctgtacgccggcgcgaggagcggacgccccgaggtgttccgcctcctgttcgacgcggtgctgtccgcggcgccggcgtgcccggtcgggggtgacgacggcgagtttaggcgcgagatgatgaaccgcgccgtgcacgccgcggcgaggggaggcagccttgccgtgctcagggacctcctgcgcggctgctccgacgccgcggcatacagggacgcgcagggatcaacgatcttgcacgccgcggctgcaaagggccaagttgaggtatgtcttgcagtttttttccttgtcagctttattctttcaagatggatggacgtcgtcatccgcagcaccatgcaatgtatgtcccgtctgtttaacattttcagtgcttgatttgaaattatccgtacggtttgatctatatagactagtaattctgtacaaacatatgttgcctttcacttgcttctacttgcaatatgactgaacattttagccaggttgtcagcttgttagaaaagttctattttgcatagtttaattgagtgaacaaaacatgttgagcattaaagttgattcaagccaatactgcttctctgatctataatctaagaattgttcatccctgttttgtttgactttattcccactttggcccttagagttgattcggtgcacatgcttgcttgccattgccaggttgttagttgatcatgcgaatatggattaaacttgtggaatgactcgattaatctaatggttgtacctgttgttgttggcattcacatattatcttttaacaccggattggagcttcataaaatgttgtctgccatcaaaatttcacagcaaaagggtacttaaggtttgcttggtagcacgtgaattaaattgatgcctttggcgatggaaatttccattgacatccctagtcattagtacatttatgttgctgtcatggaaccatttgtagtttgttatgttcactgattgaaggatgatcattcgagatggctctttattatgattagaagggttaaaagtattttccttcattctgtatttctgttgctccaaagttagaccttgggatgggtcctgtgctcaattttctatgtacacacagtttacaaagtactactaaactaaatttatgaacaaaaaaaatactgtacgctgcaggttgtgaaggatctgattgcatctttcgatatagcgaactgtgtagatgaccaagggaacacggcgctgcatatagcagccttccgaggccatgtccaagtggtcgaggctctcatcaccgcatctccgtctcttatatcagcaacaaacgaagccggcgacacgttccttcacatggcactgactggcttcgggactcccgagttccaaaggcttgatcgccagacggagctcattaggcaattagcgagtggagcaatcgtggatatcagcagcagcactattatcaacgcgcagaatgacgacgggaagacagctcttcacttggccgtggtttgcaacctgcattcggacgtcgttaagctcctgatgagcgtgccttgtattgacctcaacatctgcgacaaggacggcatgactcctctggatctactcaggaagcagccacggacgacggcgtcagagatactgatcaaacaactgatcctggccggtgggttcacaagctcaagggaccacgagactaggtcggctatcgcttctcagctgaagatgcactccattgtaggaagcccggggacatcgttcaagataccagacggcgagatcttctttctccacgctgctggagtcgacgtgtcgggcggcatcggcgaaggaggagcagcagtaccgttttcctccgttattgctagggctgacgtcctgcatggacccaaactgaagaggctcaactctttccaagacgcggcgaagcatatcaaggtcctattcagatggcctcgccgcggatggaacaagtcaggcagcggcggccgaaagggtctggacgacgacgatgcctcgtctgtggactctgccaagacctggagccacgaggagaccccgacaccgctgaggcagaggtattccaggatcggctcgctgttcaacaagcggacctacgcagcaggcagggcttcacctagcgaagcagtgaagaagggtggagtggtacagccagctggttctactctactttcgacatctctgtcgtcgtcgtcggcgtccttggttgacagtcatggctagagcttcatggaatatgaactatgagaaggttcttgttgacatcttgcacgagcacaatcatgtgaagtaccggggccagaatggttgggcaccagaaggttggcgttctatgacacaaatgttcaatgagaagtgcccgttggctaagtttacaaaggcacagatccaggaaaaagaaaaggaacttaaggcaaactataaggtgctgaaggaagcccgcaagcaaagtggtgttggatggaatgaggccatgggtatgatcattgctgaaccaccaatatgggcaaatataattgttagtaatccaaaggtcaagaaatttcagtcaaggccattccctttgtataatcagttgtcagcactctatgatggcagttgtgccaccggtgatctcaattttacatcaactcagcaacatacatcatcccgacaacaattacatattcaagctgaagttgaagctgaagctatgagctctttcaggattgatgatgacctcggggttaaccctgatttgaaccaaatctcttcaaatttgcatgggttgggatcttcaagtacccgtgttgagattggtggacatgaccgcaccccggcatcttcagaacagcgagcggagagtcatggaaggaagcgtaagcaaagtcagattgctggggttcttgaggaatatttggattacaaaaggcaacataatgataagttgcttgatgtggtaaatcagattgatcaacaagctgagggatgtaacaagaaggaagaatattgtattggaaagtgtgttcgtgtgttagagtcgatggaagatataactgaagaggagatggcagcggcaatgggtgtgtttaagtgcgaggagaacagagaaatatttctgaacagccagaggccacgtgtccgattgttgtggcttagaaacgagatccacaagcagatgtccaccaatctcaatattttcagatgtccaccaagcctttagtttcctgggaggcaatggatggagctctgcgacaataaatacaagatgttcaaaagaacgttattgttgtgttaacattttgggcataccaagtacttttttttgttatgagtctgtcaaacatatgttaaatttgtcactaatttcttatgagctatttctgtggtcaaagaaagttgtttatttaagtggcatgaatcaaaaaatcttaggagacttctgtttgattttgtttatttttaaaagaaagttgcttcagcgtacaaattttgaggggcatattgttgtttttgcgtacaaatttctgtttgattttgttgatttttattttttctattttacttgtgatttgatgatgatcacacttctagcagctgccgatgtgtggctccagagggcagcagggcagctgacccatggggcaccaaaggatgtcagggcagcgcagccccgctgggcaatgcccacccagggaattcgtatgacaggaatttgccccctccggtgctagctcccctgtgttttattggccccggtcaccaaaggatgtcttaggtgccgtggaagcccctgaacctgaactgtccgtcggcgtcgaggcggccccgcgcgtcggacatccactcgctcctgaggtcgatgagcctctggccggcgtcgttgacggtgccgtcggcgttgacgagcgcggcgtcctgcctccacatgtggccctgcatgaacccccagagcacgacgccctgcaccgccgggtgcgcgaacgcctcgcgcaggaccacctcgaggtcgtcggcgcggagcgcgtcgtcgggctcgcagacgtcgacctccgtgaaccagacgggcaggccggtggcggcgtagaccgtgtcgagcgcgtcgcagatgacctcgccgacggggtgggtgacgtggccctgcatcccgacgccgccgacc

SEQ ID NO: 218537 - DNA, 1058 bp, Zea Mays
cgaagaagctactgacgcacatcgatacattctcaaacaggccagctgcgtctacgaatgcctttccgttccggcaattcgtcaagcacctcggtgatgtggcgtggtcaagctcaagtagcagcacgaacaggtccacactgctaccctagctgcctcacacgcaccttcagtttcagttgcacatatacagaggatgtaggtgggaggagaggggaggggagaagatggagcgtgtccatcacctcgtacagtctcactaccggcgtctgccccacgtgccttcccatctctctggcacacgtcgtcattgttcaccacgtggaaatcgcccaggcctagggcaaaagggggaaggagcaccatgacacgacctcttctgggcccagcgtgagttattgccctcggctgcagccaccatgaccatctccgtgtcggcgagccaggacaacaactccttcgacctcgaatttgtggtgcccggcgacgagagtgccggtccaacgccgaagaggattgcgtggagcgcccggggcagccaacgttgtggccatggatgcgtcggcagtggaggccaaggctggagtgttgccaccgacgtcgctgttccgctcggccaccaggttctgcgtctcgcttctcaagctgatgaatcccaagacctcagtagcggccgaggccggggctacgcaagcgccgagtgaggtcacgggaaatctgaagacaagcttggagaagtacctgtgatctcaagtctaaggaaagttgtgcccttgatcactcttctttacctaataatgttcatgttaatcactatgacatgctcaggttaatttgatgggacctaataggtttccctagtattgcttatcccatagcttgcaaacaaatgaactattgggtagatttgctattgttttacctggttttgggaaattaattatatatatgatcatgttctaataatattgttggtttatttattgttcatgataagattattgtattaattggaacatggagaaccacccgggaaaacagtgctaccacaagggtgg

SEQ ID NO: 218538 - DNA, 4460 bp, Zea Mays
atcatcagtttctctctagtagaattgagatccctcctaccacatccgttccccttcccttccctcctctcgcgcgccggctccacgcagatccaggagatatgcctcgctatgatgaccgctatggaggcacgcgcttgtatgttggcagattggccactcgtactcgttcccgcgatttagaacatctgtttggcagatatggaaggtttttcggtttttaccggaggtctttggtggaagggtgcccttggtggacttggtgaccatttggtgaagggtgcccttggtgtaatgttattgactgttttagtggaagttccaagttggtgatgcatttgagtacttgacacatgacgtgacggcttactgtttgtggcaaccctttgcgcagaatacgagaagtggagttgaagcgtgactatgcatttattgagttcagtgatcatcgcgatgctgatgaggctcgataccagctagatggcagggatgttgatgggagtcgtattgttgttgagtttgctaaaggggtcccacgtggttcaggtggctcacgtgaatatatggggagaggccctccaccaggtacaggtcgttgtttcaactgtggagttgatggtcactgggcaagagactgtaaagctggtgactggaaaaacaaatgctaccgttgtggagaaaggggccatatagaaagaaattgccagaacagtcctaggagtctcaggcgagagagaagttactcacggtccccatctccccgccgtggacggggccgcagtcgaagctatagcaggagcaggagccggagtcggagctatagtcgatcaagatccctgtctagatctcctaggggaggtcgtcgtgaccgtgacgataggagatcaaggagtcctagctatagcaggagccccatgcgatctgcctcgccaccagtaaaggaaaaggagcgcagccccgcacctgatggaagcaggagcccaaggagtcgcagcccccaggatcaggtgatgagcccaccaccaaaggataatggcgaaggcaatggctcagaccgtggcggcagccccagagggagggagaacagcaggagctgcagccgcagccgcagtccatctggtagtaaccgcagccctgcggccaatggacgtagccggagtcctggaggtgagcggagcccgagtcctggaggtgagcggagcccgagtcctagaggtgagcggagcccgagtcctagggctgaccgtagcccaagccccaatggcaatggtaacaatgatgctgctgctgatgtcgatgctgatgctgctgcccgcagtggctcccccactggaagcaagtcaccctgagcgctggcggtcccagattgtggtggtgcttctcaatgcaatgggcaatcgtattgctattttttgctaccatatcgaagacacaatagctacatcattttcttctctgaaacaaggactttattttgcttgctttgagatatgactcttaccctctcatggataatatatatatgatatgatgccactggtgcttgcttgcatctgaataagtgaatgctcgcatgttgaggtttgcctgatgagtgctgagggctgaggccgtgagtcaaaacaacccgatactgcatttagaaattgcggttgatgcgcgacttgtgctgccgctgttgctggttcttgctgccaaccgcacggtaacagagcgctggtgagaccgtgatcgtcctggaagacttcttgctgctcacatggactgggtggagtaacggtgaccggtacaacgacccttgtttgatcctctcttttttttcctttttacgatatgttcggtgacatggtttccgacaccttcaccatctttgtagcgtgtctttcagcggccaactccgactcgcgtgctccagctccaggcagctccactcctatgcttcttctacatatataagtaaacgcgccaagccacgccacgctctgccatcccaacccgaccacctgccgaccgaggtctccgcagcgacacgccaccaccagagcgcgccgagctcgtgcacccagcaaggagcaaaggaccaacaaccgactgacgcggatggccaccccgggccacgccgtcgcggtcgacatcgacgagccagcctcctgcggcaacggcgaggcggcggcggccacgccgctgccccagccgacggtgccgtacgtgctccgcttcaccgacctgtcctacagcataaggaagcgcggcagcgggctaggctgcctgccttcgcgctggcccagcaaccgcctggcgtccttggacgcgccggcgtcgtccgcgaccgccgccagcgccacccggaacaccaagacgctgctggacggcatctccggggaggcccgggagcgggagctgttcgcggtgatgggcgcgagcgggtcgggcaagtcgacgctgctggacgcgctggcggggcgcatcgcgcgggacagcctccgcggcggcggggccacgctgaacggggagccgctgcagggccggcggctgcgcgccatctccgcgtacgtgatgcaggacgacttgctgtacccgatgctgacggtgcgcgagacgctgctgttcgccgccgagttccgcctgccccgcgcgctgcccgcggaccgcaagcgcgcgcgcgtcgacgcgctcgtcgaccagctcggcctcgcccgcgccgccgacaccatcatcggcgacgaggcccaccgcggggtgtcgggcggcgagcgccgccgcgtgtccatcggcaccgacatcatccacgaccccatcctgctgttcctcgacgagcccacctcgggcctcgactccgccagcgccttcatggtcgtgcaggtgctccgccgcatcgcgcgcagcggcagcgtcgtcatcatgaccgtccaccagcccagcgcgcgcatcctcgccatcctcgacaggctgctcctgctctcgcgggggcgcaccgtgtacgccggcacgcccgcggggctcaagcccttcttcgccgacttcggcgcgcccatcccggacaacgagaacccggccgagttcgcgctcgacaccatccgcgagtacgagcgctgccccgacggcgccgccccgctcgccgacttcaacgtcaagtggcagaacggcagcagttccacttccacctttgacaacaacaacgacgacgacaacgatagcagcagcaagctcatgccgctggagctcgccatcgccgagagcgtgtcccgcgggaagctggtggccgggagcgcggtcaccgcgtcgtcggtgccaacgttcgccaacccgccgtggaccgaggtgtgggtgctcatcaagcgctccttcaccaacacgggccgcatgccggagctcttcgtcatgcgcctcggcaccatcatggtcaccggcttcatcctggccaccatcttctggcgcctcgacgacacgcccaagggcgtgcaggagcgcctgggcttcttcgccatggccatgtccaccatgttctacgtgtgcgccgacgcgctgccggtgttcgtgcaggagcgccacatctacctccgcgagaccgcgcacaacgcctaccgccgcatctcctacgtgctggccaacgccgtggtcgcgttcccgccgctggtgttcctgtcgctggcgttcgcggtcaccacgttctgggcggtggggctcgcgggcggcgccccctcgttcctcttcttcgtgctcatcatcctcgcctccttctgggcgggcagcggcttcgtcaccttcctctccgctgtggtgccgcacgtcatgctgggctacacggtggtcgtcgccatcctcgcctacttcctcctcttctcgggcttcttcatcaaccgcgacaggatcccggactactggatctggttccactacctgtcgctggtcaagtacccgtaccaggcggtgctgcagaacgagttcagggacgcctcgcgctgcttctcgcgcggcgtcgagatgttcgagggcacgcccatagggcacatgacggagcccgtcaagctcaaggtgctgcaggccatcagcaggacgctggggtccaacatgacggccacaacctgcgtcaccaccggcgccgacgtgctggcgcagcaggccgtcacggacattggcaaatggaaatgcctgctggttactgtggcctgggggttcttcttcagggcactcttctacgtcgtcttgctcgttggcagcaagaataagaggaagtaaaattagtatacacaatgtatacggcgtatacataacatatacatatgtgtcaatgtgtgacggtgaaacaaatgtataggtcgacatgtgaaattattgttttgtttttaagaattgccgtattttttttcaaacatgcgtttacctagagtactgaattatatttgaattctttgcagttattcaacggcgtcatgctttcaatagatatacatatatgt

SEQ ID NO: 218539 - DNA, 2392 bp, Zea Mays
atgccggctaggggagaggggaggccggcgaaggagagggtagaccaggtggtcggggtcggcacccggggcgacaacacgtggatcctggcgtgggtgcccagcgacgatggccaccagggtgagttggaaaaggaagctattaacaatggtacttctccggggcaagcccatgacattgacataccgccaccacggcctaaaagaaaggctaacagtccatatcctcgaaaaagtggtctcagctctgagacaccaaccaaagaacttccaagtgacaagtcaacaaaaccaaatatgcccttgagcaatgagaatgtactaatggcaggtgatgcatctcttcagaaatttcaaaggaaggagttgtctggaaaagaaagttgctcggaagttcttaatctcttccgtgatgccccatctccatcattttcttcagttaacaaaagctcttcaaatcatggtgcaccgattgaggcaagtaaaacaaaaatccgagatatgaccattatggaaaatagttctcttaaccccaacatgcaagaggatgtaaaggaaatcaatgatcaggagatggaaaggcttaatggtacccaaatcagctctaaatgtgaacactctcatgagggatatttggacatctcaatgcaacaaatgaagctaaagccagagtctgtggagacaacatatgtggacaaacaaaccgcaagagcttcacactccctagcggagagaactgggacaactagcattccggtcactgcaactgaagaaactcattctgttctaacaagtgatcaagtgggaatcaatggaagcatgaacccatccatccatccaatgtttcctgcagatccaaaatttgatagcagtgccacaccacagccttttcctcataattatgctgcctttgctccaatgatgcagtgcaactgcaaccaagatacccacagatcattggtcaacatgtcatccaccttctccagcatgcttgtttccacgttgttgtcaaaccctgccatccatgcagctgccaggctcgcagcatcatactggccagcagctgaaggtaacactccgattgatccgaatcaagaaaatcttgcagatggtgttcaaggaaggagcatagggtctcctccaagcatggcttctattgtagcagctacagttgctgcagcatctgcatgttgatgttccacgaccttcagagaaagatagagattgcccagctgaaaatgcacagaaggaatgccaagaagctcgaaaacagggacagtttgaaggtttcagagttgccgcttcttcagagtatgatgggagtggaaaaggcgaggtgtctgtccacacagagttaaagatatctcctgtccagaatgctgatgccacgtctgccgcaggagctgacacgactgatgcattcatgaataagaaaaagcaggaccgctcttcatgcggttctaacacaccttcaagtagtgatgtagatgtggacaatgtccctgagaaagagggcaatggtaatgagaaggcgaagcaagcctcctgcagcaactcttcagctggtgacactaaccaccgcagatttagaagcagtggaagcacgagtgattcatggaaggaagtttccgaagagggtcgtctggctttccatgcgctgttcagtagagaaaagcttccgcaaagcttttctcccccacaagcagaaggctcgaaggaagttggcaaggaggaggaagatgaagtcaccacagtggcagttgacctcaacaagagtaccacaagcattgatcatgacctcgacacaattggcttcaaaccatacaagagatgttctgtggaagcgaaggagaatagggtgccggctagcgacgaggttggtaccaagaggattcgtcttgatagtgaagcatcaacatgagcgatttctacatggttaccgctcggacttcctctgccgccatgaagtttatgacaaagttgtatttacatctaaactagtataggacttaaagaccttgcaatgcaatgcttcatgaaactgttgtgtgctgtattttagtacttgtgaagcagcccggtagactgcttttaaacctttatctcgtagactctgatttaagcatcaagcaactattgaactttatatttttggcgggaaggaaaataattattttttgatttattttgcagggtcatgcatttacatagcactcttgatgcaaaagtttatttcgtaaagttgtagtggaatatgctgagtgagaaggtgaactatttatgactaatatcgtccctgtcctagctaatcgccctactcgactaataatcctcgccccttctcctctatctcgctccactaataatttgaaagtattgttccctgtaattc

SEQ ID NO: 218540 - DNA, 2161 bp, Zea Mays
atgccggctaggggagaggggaggccggcgaaggagagggtagaccaggtggtcggggtcggcacccggggcgacaacacgtggatcctggcgtgggtgcccagcgacgatggccaccagggtgagttggaaaaggaagctattaacaatggtacttctccggggcaagcccatgacattgacataccgccaccacggcctaaaagaaaggctaacagtccatatcctcgaaaaagtggtctcagctctgagacaccaaccaaagaacttccaagtgacaagtcaacaaaaccaaatatgcccttgagcaatgagaatgtactaatggcaggtgatgcatctcttcagaaatttcaaaggaaggagttgtctggaaaagaaagttgctcggaagttcttaatctcttccgtgatgccccatctccatcattttcttcagttaacaaaagctcttcaaatcatggtgcaccgattgaggcaagtaaaacaaaaatccgagatatgaccattatggaaaatagttctcttaaccccaacatgcaagaggatgtaaaggaaatcaatgatcaggagatggaaaggcttaatggtacccaaatcagctctaaatgtgaacactctcatgagggatatttggacatctcaatgcaacaaatgaagctaaagccagagtctgtggagacaacatatgtggacaaacaaaccgcaagagcttcacactccctagcggagagaactgggacaactagcattccggtcactgcaactgaagaaactcattctgttctaacaagtgatcaagtgggaatcaatggaagcatgaacccatccatccatccaatgtttcctgcagatccaaaatttgatagcagtgccacaccacagccttttcctcataattatgctgcctttgctccaatgatgcagtgcaactgcaaccaagatacccacagatcattggtcaacatgtcatccaccttctccagcatgcttgtttccacgttgttgtcaaaccctgccatccatgcagctgccaggctcgcagcatcatactggccagcagctgaaggtaacactccgattgatccgaatcaagaaaatcttgcagatggtgttcaaggaaggagcatagggtctcctccaagcatggcttctattgtagcagctacagttgctgcagcatctgcatggtgggcaacacaaggtcttctccctttcttcgccccacccatggctttttcatttgtgccagctcccagtgctgccttccccacagttgatgttccacgaccttcagagaaagatagagattgcccagctgaaaatgcacagaaggaatgccaagaagctcgaaaacagggacagtttgaaggtttcagagttgccgcttcttcagagtatgatgggagtggaaaaggcgaggtgtctgtccacacagagttaaagatatctcctgtccagaatgctgatgccacgtctgccgcaggagctgacacgactgatgcattcatgaataagaaaaagcaggaccgctcttcatgcggttctaacacaccttcaagtagtgatgtagatgtggacaatgtccctgagaaagagggcaatggtaatgagaaggcgaagcaagcctcctgcagcaactcttcagctggtgacactaaccaccgcagatttagaagcagtggaagcacgagtgattcatggaaggaagtttccgaagagggtcgtctggctttccatgcgctgttcagtagagaaaagcttccgcaaagcttttctcccccacaagcagaaggctcgaaggaagttggcaaggaggaggaagatgaagtcaccacagtggcagttgacctcaacaagagtaccacaagcattgatcatgacctcgacacaattggcttcaaaccatacaagagatgttctgtggaagcgaaggagaatagggtgccggctagcgacgagggtcatgcatttacatagcactcttgatgcaaaagtttatttcgtaaagttgtagtggaatatgctgagtgagaaggtgaactatttatgactaatatcgtccctgtcctagctaatcgccctactcgactaataatcctcgccccttctcctctatctcgctccactaataatttgaaagtattgttccctgtaattc

SEQ ID NO: 218541 - DNA, 3255 bp, Zea Mays
ggttattactgcggtgggcaacggaaacagaactttattttagactgatagatggataaatggcgactgcatcaatgattttgcccctgatgtcgtttccaaggttgataaacttattgtctccactagaacagtggcccaggctcttggaggacagcaatggatcagtgacatcttgacacttctttcctggacggggatccgacaatttttgctgatttgggatgatgtaagcaatattgtgttaacacaggaggcggatattcacacctggctgcatacttcctctgagtaaggacaattggatcaatttaagtaggtctgggcacacaaatttgaactattaacgcattgggagtgcttgtgtgttagaggtctaggaggagctatgaggtactacttccgtcaggtccagcgtttggttggagatatggaaggaggagctctcttgtttatagatgacctcaactccaagtgacaaagtgaacagctgttgaacttcccgtctatttctgtttctttttgctggatttggagatggaggtgaattcctctggtgaggaaacggtgataaaggtaaggaagccatacacaataaccaagcagcgggagcggtggacagaggctgagcacaaacggttccttgaagccttgaaactttatggcagagcatggcagcgcatagaagagcatgttgggacaaagacggccgtgcagatcagaagtcacgctcaaaagttcttcaccaagttggaaaaggaagctattaacaatggtacttctccggggcaagcccatgacattgacataccgccaccacggcctaaaagaaaggctaacagtccatatcctcgaaaaagtggtctcagctctgagacaccaaccaaagaacttccaagtgacaagtcaacaaaaccaaatatgcccttgagcaatgagaatgtactaatggcaggtgatgcatctcttcagaaatttcaaaggaaggagttgtctggaaaagaaagttgctcggaagttcttaatctcttccgtgatgccccatctccatcattttcttcagttaacaaaagctcttcaaatcatggtgcaccgattgaggcaagtaaaacaaaaatccgagatatgaccattatggaaaatagttctcttaaccccaacatgcaagaggatgtaaaggaaatcaatgatcaggagatggaaaggcttaatggtacccaaatcagctctaaatgtgaacactctcatgagggatatttggacatctcaatgcaacaaatgaagctaaagccagagtctgtggagacaacatatgtggacaaacaaaccgcaagagcttcacactccctagcggagagaactgggacaactagcattccggtcactgcaactgaagaaactcattctgttctaacaagtgatcaagtgggaatcaatggaagcatgaacccatccatccatccaatgtttcctgcagatccaaaatttgatagcagtgccacaccacagccttttcctcataattatgctgcctttgctccaatgatgcagtgcaactgcaaccaagatacccacagatcattggtcaacatgtcatccaccttctccagcatgcttgtttccacgttgttgtcaaaccctgccatccatgcagctgccaggctcgcagcatcatactggccagcagctgaaggtaacactccgattgatccgaatcaagaaaatcttgcagatggtgttcaaggaaggagcatagggtctcctccaagcatggcttctattgtagcagctacagttgctgcagcatctgcatggtgggcaacacaaggtcttctccctttcttcgccccacccatggctttttcatttgtgccagctcccagtgctgccttccccacagttgatgttccacgaccttcagagaaagatagagattgcccagctgaaaatgcacagaaggaatgccaagaagctcgaaaacagggacagtttgaaggtttcagagttgccgcttcttcagagtatgatgggagtggaaaaggcgaggtgtctgtccacacagagttaaagatatctcctgtccagaatgctgatgccacgtctgccgcaggagctgacacgactgatgcattcatgaataagaaaaagcaggaccgctcttcatgcggttctaacacaccttcaagtagtgatgtagatgtggacaatgtccctgagaaagagggcaatggtaatgagaaggcgaagcaagcctcctgcagcaactcttcagctggtgacactaaccaccgcagatttagaagcagtggaagcacgagtgattcatggaaggaagtttccgaagaggttgtaatctaccaacactatgccaattcactctgcccaaacctttgagcatgccgcactgcctttctaattcactttttttgttggcagggtcgtctggctttccatgcgctgttcagtagagaaaagcttccgcaaagcttttctcccccacaagcagaaggctcgaaggaagttggcaaggaggaggaagatgaagtcaccacagtggcagttgacctcaacaagagtaccacaagcattgatcatgacctcgacacaattggtgagccaagggcttcctttcccaatgaactgtcgcccctgaagctgaaattgcgccgaacaggcttcaaaccatacaagagatgttctgtggaagcgaaggagaatagggtgccggctagcgacgaggttggtaccaagaggattcgtcttgatagtgaagcatcaacatgagcgatttctacatggttaccgctcggacttcctctgccgccatgaagtttatgacaaagttgtatttacatctaaactagtataggacttaaagaccttgcaatgcaatgcttcatgaaactgttgtgtgctgtattttagtacttgtgaagcagcccggtagactgcttttaaacctttatctcgtagactctgatttaagcatcaagcaactattgaactttatatttttggcgggaaggaaaataattattttttgatttattttgcagggtcatgcatttacatagcactcttgatgcaaaagtttatttcgtaaagttgtagtggaatatgctgagtgagaaggtgaactatttatgactaatatcgtccctgtcctagctaatcgccctactcgactaataatcctcgccccttctcctctatctcgctccactaataatttgaaagtattgttccctgtaattc

SEQ ID NO: 218542 - DNA, 2924 bp, Zea Mays
gatttctcgcggcgctcgccgcgagagcgacccccacaggtcgccgcccctccgcggcccgcgcagcgcacagcatacagtcagcacacgcagcagctgccaccacagcgaacagcaaagcacctccgactcggagtcgcggcgagagccgagaaccttctcattcatcttcctcttctatccatcctgcctgcctgcttgcctccgtattccagctagatctccgggcagccgattgaccgagaagtttgtggttgtggcggcggcggagagggaaacggggagcgggagggcggcgcggatgccactgctgcgccggcgccggcggggccggtgatgcccgccgtggcggtcgcttgaggccgccgtgcgtgggaggtggacgggggagcgaggcggtgcggaccgaggttgcgttgggttggattcgattgggctgcgtctgctgaggtctaggaggagctatgaggtactacttccgtcaggtccagcgtttggttggagatatggaaggaggagctctcttgtttatagatgacctcaactccaagtgacaaagtgaacagctgttgaacttcccgtctatttctgtttctttttgctggatttggagatggaggtgaattcctctggtgaggaaacggtgataaaggtaaggaagccatacacaataaccaagcagcgggagcggtggacagaggctgagcacaaacggttccttgaagccttgaaactttatggcagagcatggcagcgcatagaagagcatgttgggacaaagacggccgtgcagatcagaagtcacgctcaaaagttcttcaccaagttggaaaaggaagctattaacaatggtacttctccggggcaagcccatgacattgacataccgccaccacggcctaaaagaaaggctaacagtccatatcctcgaaaaagtggtctcagctctgagacaccaaccaaagaacttccaagtgacaagtcaacaaaaccaaatatgcccttgagcaatgagaatgtactaatggcaggtgatgcatctcttcagaaatttcaaaggaaggagttgtctggaaaagaaagttgctcggaagttcttaatctcttccgtgatgccccatctccatcattttcttcagttaacaaaagctcttcaaatcatggtgcaccgattgaggcaagtaaaacaaaaatccgagatatgaccattatggaaaatagttctcttaaccccaacatgcaagaggatgtaaaggaaatcaatgatcaggagatggaaaggcttaatggtacccaaatcagctctaaatgtgaacactctcatgagggatatttggacatctcaatgcaacaaatgaagctaaagccagagtctgtggagacaacatatgtggacaaacaaaccgcaagagcttcacactccctagcggagagaactgggacaactagcattccggtcactgcaactgaagaaactcattctgttctaacaagtgatcaagtgggaatcaatggaagcatgaacccatccatccatccaatgtttcctgcagatccaaaatttgatagcagtgccacaccacagccttttcctcataattatgctgcctttgctccaatgatgcagtgcaactgcaaccaagatacccacagatcattggtcaacatgtcatccaccttctccagcatgcttgtttccacgttgttgtcaaaccctgccatccatgcagctgccaggctcgcagcatcatactggccagcagctgaaggtaacactccgattgatccgaatcaagaaaatcttgcagatggtgttcaaggaaggagcatagggtctcctccaagcatggcttctattgtagcagctacagttgctgcagcatctgcatggtgggcaacacaaggtcttctccctttcttcgccccacccatggctttttcatttgtgccagctcccagtgctgccttccccacagttgatgttccacgaccttcagagaaagatagagattgcccagctgaaaatgcacagaaggaatgccaagaagctcgaaaacagggacagtttgaaggtttcagagttgccgcttcttcagagtatgatgggagtggaaaaggcgaggtgtctgtccacacagagttaaagatatctcctgtccagaatgctgatgccacgtctgccgcaggagctgacacgactgatgcattcatgaataagaaaaagcaggaccgctcttcatgcggttctaacacaccttcaagtagtgatgtagatgtggacaatgtccctgagaaagagggcaatggtaatgagaaggcgaagcaagcctcctgcagcaactcttcagctggtgacactaaccaccgcagatttagaagcagtggaagcacgagtgattcatggaaggaagtttccgaagagggtcgtctggctttccatgcgctgttcagtagagaaaagcttccgcaaagcttttctcccccacaagcagaaggctcgaaggaagttggcaaggaggaggaagatgaagtcaccacagtggcagttgacctcaacaagagtaccacaagcattgatcatgacctcgacacaattggtgagccaagggcttcctttcccaatgaactgtcgcccctgaagctgaaattgcgccgaacaggcttcaaaccatacaagagatgttctgtggaagcgaaggagaatagggtgccggctagcgacgagggtcatgcatttacatagcactcttgatgcaaaagtttatttcgtaaagttgtagtggaatatgctgagtgagaaggtgaactatttatgactaatatcgtccctgtcctagctaatcgccctactcgactaataatcctcgccccttctcctctatctcgctccactaataatttgaaagtattgttccctgtaattc

SEQ ID NO: 218543 - DNA, 3085 bp, Zea Mays
cgggaatgcgggagggcgtgctcgatagatttcaggggccggagctcgagtaaaccacgagaaaagatagtggctgagatttctcgcggcgctcgccgcgagagcgacccccacaggtcgccgcccctccgcggcccgcgcagcgcacagcatacagtcagcacacgcagcagctgccaccacagcgaacagcaaagcacctccgactcggagtcgcggcgagagccgagaaccttctcattcatcttcctcttctatccatcctgcctgcctgcttgcctccgtattccagctagatctccgggcagccgattgaccgagaagtttgtggttgtggcggcggcggagagggaaacggggagcgggagggcggcgcggatgccactgctgcgccggcgccggcggggccggtgatgcccgccgtggcggtcgcttgaggccgccgtgcgtgggaggtggacgggggagcgaggcggtgcggaccgaggttgcgttgggttggattcgattgggctgcgtctgctgagagtaaggacaattggatcaatttaagtaggtctgggcacacaaatttgaactattaacgcattgggagtgcttgtgtgttagaggtctaggaggagctatgaggtactacttccgtcaggtccagcgtttggttggagatatggaaggaggagctctcttgtttatagatgacctcaactccaagtgacaaagtgaacagctgttgaacttcccgtctatttctgtttctttttgctggatttggagatggaggtgaattcctctggtgaggaaacggtgataaaggtaaggaagccatacacaataaccaagcagcgggagcggtggacagaggctgagcacaaacggttccttgaagccttgaaactttatggcagagcatggcagcgcatagaagagcatgttgggacaaagacggccgtgcagatcagaagtcacgctcaaaagttcttcaccaagttggaaaaggaagctattaacaatggtacttctccggggcaagcccatgacattgacataccgccaccacggcctaaaagaaaggctaacagtccatatcctcgaaaaagtggtctcagctctgagacaccaaccaaagaacttccaagtgacaagtcaacaaaaccaaatatgcccttgagcaatgagaatgtactaatggcaggtgatgcatctcttcagaaatttcaaaggaaggagttgtctggaaaagaaagttgctcggaagttcttaatctcttccgtgatgccccatctccatcattttcttcagttaacaaaagctcttcaaatcatggtgcaccgattgaggcaagtaaaacaaaaatccgagatatgaccattatggaaaatagttctcttaaccccaacatgcaagaggatgtaaaggaaatcaatgatcaggagatggaaaggcttaatggtacccaaatcagctctaaatgtgaacactctcatgagggatatttggacatctcaatgcaacaaatgaagctaaagccagagtctgtggagacaacatatgtggacaaacaaaccgcaagagcttcacactccctagcggagagaactgggacaactagcattccggtcactgcaactgaagaaactcattctgttctaacaagtgatcaagtgggaatcaatggaagcatgaacccatccatccatccaatgtttcctgcagatccaaaatttgatagcagtgccacaccacagccttttcctcataattatgctgcctttgctccaatgatgcagtgcaactgcaaccaagatacccacagatcattggtcaacatgtcatccaccttctccagcatgcttgtttccacgttgttgtcaaaccctgccatccatgcagctgccaggctcgcagcatcatactggccagcagctgaaggtaacactccgattgatccgaatcaagaaaatcttgcagatggtgttcaaggaaggagcatagggtctcctccaagcatggcttctattgtagcagctacagttgctgcagcatctgcatggtgggcaacacaaggtcttctccctttcttcgccccacccatggctttttcatttgtgccagctcccagtgctgccttccccacagttgatgttccacgaccttcagagaaagatagagattgcccagctgaaaatgcacagaaggaatgccaagaagctcgaaaacagggacagtttgaaggtttcagagttgccgcttcttcagagtatgatgggagtggaaaaggcgaggtgtctgtccacacagagttaaagatatctcctgtccagaatgctgatgccacgtctgccgcaggagctgacacgactgatgcattcatgaataagaaaaagcaggaccgctcttcatgcggttctaacacaccttcaagtagtgatgtagatgtggacaatgtccctgagaaagagggcaatggtaatgagaaggcgaagcaagcctcctgcagcaactcttcagctggtgacactaaccaccgcagatttagaagcagtggaagcacgagtgattcatggaaggaagtttccgaagagggtcgtctggctttccatgcgctgttcagtagagaaaagcttccgcaaagcttttctcccccacaagcagaaggctcgaaggaagttggcaaggaggaggaagatgaagtcaccacagtggcagttgacctcaacaagagtaccacaagcattgatcatgacctcgacacaattggtgagccaagggcttcctttcccaatgaactgtcgcccctgaagctgaaattgcgccgaacaggcttcaaaccatacaagagatgttctgtggaagcgaaggagaatagggtgccggctagcgacgagggtcatgcatttacatagcactcttgatgcaaaagtttatttcgtaaagttgtagtggaatatgctgagtgagaaggtgaactatttatgactaatatcgtccctgtcctagctaatcgccctactcgactaataatcctcgccccttctcctctatctcgctccactaataatttgaaagtattgttccctgtaattc

SEQ ID NO: 218544 - DNA, 3180 bp, Zea Mays
gcctcatctccctagcaaaccaagaacaaaagccatccatccgttttgctccgtagagcgagagcgagacagacggttggggaagagtcaggcgagccagcagcagcagcttgctctgccgacgttacaattccgggaatgcgggagggcgtgctcgatagatttcaggggccggagctcgagtaaaccacgagaaaagatagtggctgagatttctcgcggcgctcgccgcgagagcgacccccacaggtcgccgcccctccgcggcccgcgcagcgcacagcatacagtcagcacacgcagcagctgccaccacagcgaacagcaaagcacctccgactcggagtcgcggcgagagccgagaaccttctcattcatcttcctcttctatccatcctgcctgcctgcttgcctccgtattccagctagatctccgggcagccgattgaccgagaagtttgtggttgtggcggcggcggagagggaaacggggagcgggagggcggcgcggatgccactgctgcgccggcgccggcggggccggtgatgcccgccgtggcggtcgcttgaggccgccgtgcgtgggaggtggacgggggagcgaggcggtgcggaccgaggttgcgttgggttggattcgattgggctgcgtctgctgagagtaaggacaattggatcaatttaagtaggtctgggcacacaaatttgaactattaacgcattgggagtgcttgtgtgttagaggtctaggaggagctatgaggtactacttccgtcaggtccagcgtttggttggagatatggaaggaggagctctcttgtttatagatgacctcaactccaagtgacaaagtgaacagctgttgaacttcccgtctatttctgtttctttttgctggatttggagatggaggtgaattcctctggtgaggaaacggtgataaaggtaaggaagccatacacaataaccaagcagcgggagcggtggacagaggctgagcacaaacggttccttgaagccttgaaactttatggcagagcatggcagcgcatagaagagcatgttgggacaaagacggccgtgcagatcagaagtcacgctcaaaagttcttcaccaagttggaaaaggaagctattaacaatggtacttctccggggcaagcccatgacattgacataccgccaccacggcctaaaagaaaggctaacagtccatatcctcgaaaaagtggtctcagctctgagacaccaaccaaagaacttccaagtgacaagtcaacaaaaccaaatatgcccttgagcaatgagaatgtactaatggcaggtgatgcatctcttcagaaatttcaaaggaaggagttgtctggaaaagaaagttgctcggaagttcttaatctcttccgtgatgccccatctccatcattttcttcagttaacaaaagctcttcaaatcatggtgcaccgattgaggcaagtaaaacaaaaatccgagatatgaccattatggaaaatagttctcttaaccccaacatgcaagaggatgtaaaggaaatcaatgatcaggagatggaaaggcttaatggtacccaaatcagctctaaatgtgaacactctcatgagggatatttggacatctcaatgcaacaaatgaagctaaagccagagtctgtggagacaacatatgtggacaaacaaaccgcaagagcttcacactccctagcggagagaactgggacaactagcattccggtcactgcaactgaagaaactcattctgttctaacaagtgatcaagtgggaatcaatggaagcatgaacccatccatccatccaatgtttcctgcagatccaaaatttgatagcagtgccacaccacagccttttcctcataattatgctgcctttgctccaatgatgcagtgcaactgcaaccaagatacccacagatcattggtcaacatgtcatccaccttctccagcatgcttgtttccacgttgttgtcaaaccctgccatccatgcagctgccaggctcgcagcatcatactggccagcagctgaaggtaacactccgattgatccgaatcaagaaaatcttgcagatggtgttcaaggaaggagcatagggtctcctccaagcatggcttctattgtagcagctacagttgctgcagcatctgcatggtgggcaacacaaggtcttctccctttcttcgccccacccatggctttttcatttgtgccagctcccagtgctgccttccccacagttgatgttccacgaccttcagagaaagatagagattgcccagctgaaaatgcacagaaggaatgccaagaagctcgaaaacagggacagtttgaaggtttcagagttgccgcttcttcagagtatgatgggagtggaaaaggcgaggtgtctgtccacacagagttaaagatatctcctgtccagaatgctgatgccacgtctgccgcaggagctgacacgactgatgcattcatgaataagaaaaagcaggaccgctcttcatgcggttctaacacaccttcaagtagtgatgtagatgtggacaatgtccctgagaaagagggcaatggtaatgagaaggcgaagcaagcctcctgcagcaactcttcagctggtgacactaaccaccgcagatttagaagcagtggaagcacgagtgattcatggaaggaagtttccgaagaggttgtaatctaccaacactatgccaattcactctgcccaaacctttgagcatgccgcactgcctttctaattcactttttttgttggcagggtcgtctggctttccatgcgctgttcagtagagaaaagcttccgcaaagcttttctcccccacaagcagaaggctcgaaggaagttggcaaggaggaggaagatgaagtcaccacagtggcagttgacctcaacaagagtaccacaagcattgatcatgacctcgacacaattgggtcatgcatttacatagcactcttgatgcaaaagtttatttcgtaaagttgtagtggaatatgctgagtgagaaggtgaactatttatgactaatatcgtccctgtcctagctaatcgccctactcgactaataatcctcgccccttctcctctatctcgctccactaataatttgaaagtattgttccctgtaattc

SEQ ID NO: 218545 - DNA, 652 bp, Zea Mays
gctaccatcccactttcgctttgggtgaaagataaagaaaaagaactttggctaatgagggtcgtcgcaggaattcagtgagaacacaaagaatgtgctcttgtcatgtgcattcatacacttggaaaagaaggagttcatcaagcagtttgctgagatttcatcaataaaccaacgaattttgttattcggtccagcaggttctgagatttatcaggaaacattggtaaaggcacttgcgaaacattttggtgctagacttcttgtcgtggattcacttttgctaccttggatccctgatggtaatgatcttggtggtttgtgcgaggaagatcatggcttcttctgctctgctgaatcacttcgcccagacttttctgctggtgaagaagttgagaggctagctatgaccgagctaatagaggtcatttcagaagagaacaaatctggacctctgattgtgttacttaaggatgtagagaaatcattcattggagttaccgagtcactttcatcttcacggagcaaatttgaatcgcttccatctggtgttcttattataggatcccacactcagatggacagccgcaaagaaaagatttgtaatgttagaatcttagaatttccatcacttgccattcctcaaatataa

SEQ ID NO: 218546 - DNA, 414 bp, Zea Mays
gtccccttcctctcccctaggagatctctgtttcccatctgcacttccgagttccaggcttccaaccgctgtggaattttggctaccatcccactttcgctttgggtgaaagataaagaaaaagaactttggctaatgagggtcgtcgcaggaattcagtgagaacacaaagaatgtgctcttgtcatgtgcattcatacacttggaaaagaaggagttcatcaagcagtttgctgagatttcatcaataaaccaacgaattttgttattcggtccagcaggttctgagatttatcaggaaacattggtaaaggcacttgcgaaacattttggtgctagacttcttgtcgtggattcacttttgctaccttgggggaccaagttatggttatcgaggcagagtgatgcttgctt

SEQ ID NO: 218547 - DNA, 699 bp, Zea Mays
aaatttctctgcccccgcgcggctgcattgttttccctgtcgagaccgcgcgcgtgcgcctgaagctaaacctcgccgcgcgcgcccgccgccacaacctcaccggcgccacgcctccaccccgcgcccaccccgccgcccctcgccgtgtgcccccgtcgctgcacccgccctgcctccagcagcagaacgaaagggatctctggtccccgagccctggctcgtccccttccgattccaatctggtctcgccgagcctggcgacgagggagagatggggaagaaccaggcgtacaaggcaatgcagtgggcgcggctggggtcctcgtccgacgcgctgggcaccgccgacgccctcgaagacggcatggatgggatgaaacaaggaattattaatccaagtgatattgatgttacctttgaggattttccttattatgtcagtgagaacacaaagaatgtgctcttgtcatgtgcattcatacacttggaaaagaaggagttcatcaagcagtttgctgagatttcatcaataaaccaacgaattttgttattcggtccagcaggttctgagatttatcaggaaacattggtaaaggcacttgcgaaacattttggtgctagacttcttgtcgtggattcacttttgctaccttgggggaccaagttatggttatcgaggcagagtgatgcttgctt

SEQ ID NO: 218548 - DNA, 9240 bp, Zea Mays
catttatgcgttggaggaagatttttatcaacatataccctaggtatcgggtcgtggatacccgttggcatctctatccagaagagacccaattgcccagggccgccgccgcgccgacctcgccgtcgcgcgctttgcttctcttgcccccctgcccgtggcctccgccccaattccagcgggacagcctcgatgagccgccaggatcgtcaccagtggcctcgccctaaccacggatacgaccctcgcgccgccgccgccgccgcgcaatggtatggcgccgcttcgatgctgtttcccgaccccggcgcggcggcgctgcacgggataaacccctacggcttcgcccctaaccctttcttcaataacttcctcccccagaactccgctgccctagctgcctaccaactgcagcagcagcaggctcatcacttcgcctcccatgcctaccaccaagcccctaccggtaacaccatgcaccgctctaccaaacccgccgccgctgccaaacctgcgccgccaccgggcaaccagcaggccgtgctggaccgggctcaagaggcggcgaggaaggctcgggaggagctcgtgaagggtggggacggcgtcacggcgtggaaggtggcgcaggcggtgctggtggcgctcaaggctgattcgtgggactccctcggcgtccagccccaggatgtgcctctcctgcgggatctcttcctaatcgagggcaaggtgaacgcattcatccattgctatgttgcagcaagaaaaattgtaacggtttatgatctggaggttgagatatgcaagaatgagggggttgtgcaatttgaagagctgggattgggacctttccttcagcacccgcttgttgcacattattttttagtgccagctgatttgtctgtggtgcctaagctttgtagcgaggaaattatcaataccctgctgaaatttgtggacaaatctaagaaaaaaatcacaattgaagattttttgaaccatcttgcagagaaaaaatcagtctctgggaaggaaaaacttggtgtgcgggtacaaagcttggggttgcatatttccttactacgacaggccaagcaaacagaagtgtctgctgcgaagcttcgagcaaatatgagtggatctggtaatagtagtcaggagaaggatttgttgaaaaatgcaagtttccatactcacaagaaggctttggacaagaggttcatttctttaactaatcgtataaaagagttaccaggcatcaataagcatatccattttgattcgaccgatgatgaaactaatagttgtactggttctgaggatggtaaatctgatggcaatgagaatgagaatgaatgttctattcttgacaaaaaggatggtgataagcgtgtgaatagctgcccatatccgtcaaaaactgaagaactggaaaggcttggtttgaaatctgaaattaataaaaggcaatctttagagaatagcaagccaagagacagtgggaaaaaggggaaagtaagtgaaaaaagaaaatatgaagaaatcgggagtcctagctgttcgttcaagcagcctaagaagcagcaaaagttgcaaaaacatgaagcatcaccgaaatgtttcctaagtataggtaagctggaaaattttgtaacaacatggaaggaaacatgtcgtgaacatccagttcaacaggttttggaaatgttagcaaattactatgggagaacgatatcagggaagaggagaattagaaatttcttctcacagtacccaggcattggccttctcaatgttgctgttaaatcaatgggatgtggtctgctggatagcatttacgatgtgatacagcttgctgatgagaatgatgtagcttcaagccctcctcctaacaccaccactgaagttatggaaattgagcctccaagtaaagaaaatacaggtagcactaatggagcccatgagaagagtgaagacaacatgactgcacatggtgttgctattgatgatgtcatcaggaggatttcagaatatattgaatccaacagtaaaatctctggtgatgtggctttgcaagtgagggcacttaatgattgtgaaacatgggtaactactcaattttcagcaaatcaattcagtgctcttggccatgggacattccttgagtttttggacaaacattgtcaccagttccgaactgctttgagtagtttctttaaggagggtccttctaattcttcatctctggaagtttctgtactgcagcagcaaattgaatttttactctgtcaagctgagagtaattggctggaagatagtgacttttcagaggatagttttgttatgcttcttaaaaagcaatttccaacaataagctttaatattgtgcaagacaaatctgatggtggagtttctggctttattgaggggcagaagaaagacatacggacatatagtttaaaattttccatctctttgttggagaaacgatggtctggaactttgccaagtagacatgggaatgttgatgaactggggaacattgtcgctgaacaatcttgttaccataccacagtttgctcacgagaggcaattaattgtttactgagggctcctatgctgtctgatctgcatctttggtcccattgggattcgctatttgctcctacactgggctcctttgtacattggttgctgaatactggtccaattcaagagctcgcatgcattgcgaccacagatggtaggtttattagagtagattcatcagccacagttgaccagtttctggaagctattatccatcgatcaccacttcaagtggcagtgaaactgctttcacttctatacatttacaatggttctatgaacaccccaatgtcattgctaaaatgttatgcacagcgagcaataaagctcatagtagataacaacaatgatttgatgaatgctaaatctgaaaacaaaatatttatgcctgatgagccccaaaacctaagtagtgaaagctctacttgttttgctgatcagtgtcaagaaagctctcaggcgtctcctggaaggttgatcaggtctgatagcttgccaaacattaataacactgttcatttgatcacaaaatttgtacttgattgtcttgatcatctaccttcagaattccgtagtcttgcagcagacatactattggcaggatttcgggttgttactaagaactggcatgcagttatgttgcatgaagccactgaaaacgggcagctttgcatgcttcatgatattggtttgtcacttggagttgtagaatgggttgaagattgccataggttgtgtttaactgatgaagttcatgtgcagacagaaatgcattcttctgccaagcttgcaacacctgcctctgtgggagccacccatgaagattctaacatgcatatttctagtgatgttaatatgatggataagagaaaacaattgtttcctgtcataaatgatcgggctggtatagataaggaagacaataagatgttaaatcctgctggaactgaggcagatgttgcagaactacatactaccagcagatcttctatgatggaagaaacaagtcttgaggaagcatctcttgttattgagactatacgccgtgaagagtttggtctggatcaggcactaagtgacactgagaatagcttgttaaagaagcagcatgctcgacttggcagagcattgcattgcctttcacaagaattatattcccaggattctcatctacttcttgagctggtacagaatgctgacgacaatacatatcctgaggatgttgaagcaacattagcattcattctccaagaggatggtattgctgttctaaacaatgagaggggcttctctgctgagaacattagagcactctgtgatattggtaactcgacaaagaaaggatcaaaccagggttatattggaaataaaggcattggatttaaatcagttttccgggtaactgatgctccggagatccattcaaatggtttccatgtgaaatttgatatcacagatggccagattggttttgtgttgccaactgcagttccaccttacagtaccacttcttttagtagaatgttatccgttgaagatgacaaggatgcccattcattgtggaacacttgcattttacttcccttcagatcaaaatttagggagtgcactggtatgtgctccattgtgtctttgttttcagatctgcacccatctctactgctgttccttcatcgactaaaatgtatcaagtttaagaatttgtttgatgacacacttctgattatgagaagggagattcttggtgatggtattgtgagaatctcgcatgggattgagacaatgagttggttggtggtcagtaagaggctacaaggtaccattgtgcggcatgatgtgtgcaccacagagatagctgtggcgtttactttgcagcagactgaggaaggagattatgaaccttatttgaagcagcaacctgtgtttgcttttcttcctctaaggaattacggtcttaaattcattcttcaaggagattttgttttaccatcttccagagaggaagtggatgcggatagtgcatggaatcagtggttgttgtctgaattcccttctttgtttgtaagtgcccaagaatctttttgtgctcttccctgttttcagaggtgccctggaaaagctgtcacagccttcttgagttttattcctctagcaggagaggttcatggattcttcagccagcttccacacttgatcctttccaagttgcgtctgacccgctgcatgtttttggatggctctactgtgcaatgggtctatccatgcaacacacttaggggttgggatgaacaaactaaaatgttattttcagaaggcttacttcatgaacatcttggtcttggttacctctcaaaaaatattgttatatctgataagttatcaagagccctaggtattcatgactatggaccaaacattttgctagatgccatctcatctatttgccgaattgatggttgtattgagtcattgggcctggaatggctttgtgcttggtttgttaacctttatctgacattgctgtctcattcttctcaaaatgtttcctcagcaagaaacctcgaagacattcttttggataaagttaggaaaataccatgcatcccactttcagatggttcatttacctctatttcagatggtcgtatatggttgccatatgatgttgccagttccattcctgaatgcagtagcattccgaattttccagctctatatggtaatcttcgaactgtaagtccaaaccttctctctgcatgctgcaaaaataaatacctcatggaggaagtcagaataaatgatctggcagacatgctccaaaggatcggggtgcggaagttgtctgggcatgacattgttaaaaatcacatcatggtgtccttgcgtaacggtttagatgctaatgtggctgatatagtgattagagagtatgtgagctttattatggttcatcttcagtcttcttgcaccagctgtaactttgaaagaggagagatagtgtcagaactacggaagagtcctatcttccttacaaaccatggatacaagagcccagctgatgaaccaattcacttcagtaaagattatggaaattccgtggatgttactagactgcttcagaatgtagaaataagttggattgaacttgatagtagctatttgcagcatcatggttcacagtcgtcatcatttgcacgggaaaaatggaggcaattttttgaagaaatgggtgtgactgattttgtgcaggtagtgaaagttgaaaaaactttatcccaagttgattctattctagcaggaggactttctctagctgatgtatctacaaaacaatgtacagtgtatgactgggagtcaccagaattatctagaattttatcaatattttcttcaaaaagatgcaaggaaaattgtgtatatcttctggaagttcttgatagattctgggatgatcattatagtgcaaaatctaggatcttcacagatgctacacattgtggtgaaaacagagcagttgaatcatcatttatgaagtgcattcaaagcttcaaatggatagcatcaagaatggatgaggatcttcattatgcaacagatttattctatgattgtgaaaatgtccgctctctttttggtagtgtggctccatatgctgtaccgcaggtatctagcagttcacttaagaaggccattggattcaaaacagaggtatcttactgtgatgcattgatggtcctgaagtcttggataacgtcaaaggttccctttagagcaagtatgagccagatgtgcaaattctataccttcttgtctgaaggcgtggcagacgcaaagattgacattaaacgggagttcatgtcgtctccttctatatttacaccactacagcgtcctcgggcaagtgaggttattcctggaaggtttttggcgccagaagacctctattggcatgacccaacaggatgttctgaaataacagaggatttcgttgcaacgaaaaacagaagtatgttcccaagaaaaatgctgtctgcagcctatccaaacctttatgaattatttactctgacatgcggtgtaccaaaggccccaacaacatcaaattatgttgagatgctgctacggttgtcaaccattgcattgccttcacaggcaggaaaccatgtcttttgtgtatttgtgagatgggccaagtgtatgcattctgaaagtgacaagatgaatgatatattgtacttgaaagaatcccttcagaaattagaaacaacaatattgcccacctcagccgataaatgggtctctctacatccttcttttggccttgtttgctgggtagatgatgatgagctaaagcaacagtttgttaactctaatgatgtttacttcatacaatttggcgacctttcttctgaggataagcaaatgttgtatggaagagttgctgctttaatgaaaagcttaggcatccaagcactttcaaaggttgtgtatcgtgaagcaatattttatggtacatcagagaacagagaaaaggtttccttgatttgttggctgttgccatacatgcaacgttacatctataagatgcatagagatacttatatcaacttccagaaaaacgacatcatgaagattagcaacctgcaagtagtagttgttgacaagttattccacaagtatgtactgaggggactcgagagttcttctaagaaaagattccaatgtcattgtcttttgcagggagatactctatatgcaacacaagaggctgactcacattcagtatttttggagctttctagaattttctttgatggatcccatgatcttcattttgcaaattttctacacatgatcaaaaccatggccgaatctggcactcatgctgagcaaatagagacttttatcgttaataatcagaatgtgcctgagttacctgagcatgaagctatctggtccttctcttccttgtctgcagccaaacatggttcagcgaaccaaggtggtgctgatacccagggggttgatttccaacctgtccatgaatttagtattcccaatcatcagaaggcacaggtgatggtttctagttggcctctaaactattggagaacagcacccgtcttcagaacacctctcataaaccagcatgcaagcatgcaagaggcaaaggtgaatgatgctggaccttcatcaaacttaaacatgcctgctatgtatggacacaccgaagatagtttgctttctgctgatcttgaaagggattggattatagaagagaatccaagaactgaaactacattgtttggagatagttcatcggaaatccttgatgagcctcagatggtgatgtctgctgaacctttccatgcacctgcttatttgaacttggaggctggaaattcaagcccaacggttcatgtcgagctaacaaattccgatgagaaactggccaatcttgcagaagacaagaatcggcgactttcagatgcaagccagttaagaacaggttcaaacccaatggttgatgttgagctaacaaatttcgatgagaaactggccaatcttgcagaaggcaagaatcagcgactttcagatgcaagccagttaagaacaggttcaaacccaatggttgatgttgagctaacaaatttcgatgagaaactggccattcttgcagaagacaagaatcagcgactttcagatgcaaaccagttaagaacagggaggcttggtgaagaactggtcgagaaatatttggccaaacagctaggttccaacaatgttaggtgggtgaacaacagaattgaaaccggactgccttatgatattgttataacacacccagagggtttcacagagtatgtggaggttaaaacaactgtatcttcaagaaaagattggtttgacgtctcagcaagggaatggcagtttgccttggagaaaggggattcatttagcattgctcgtgtcatcttaggtacaaagaaagcaagtatagaaatgttgaaaaacccacacaagctttgtaagcagaaagcattgcggcttgctctcctgatatccagatcggcagcaacctagactaaaatgtcggttttgttgaggctagcaccgatcatccttctgcagattgttatgattactctgactaataatcaacatgaactggagtgagcatctgcatcttgataggtatttgctgatccaagttagcagattcttctttttggagagagatggggtaccgggtacggcatgagtgcaagacaacatacagttgagccgctctatagtaggctcctctttctattattctaactcgggttcacaccgttgttttctgactttatactgctgttcagagtagcgcattgctgaacaaactgaacctccgaacctcaaactgaattactcactttgctgaataaactgatgaggatctagacaacagtttcagaatgctacagtattttcagagtagcgcttgagatgcagatatggtaaaatcaaaggggtgaactagagaagttgctttggcatgttgtgggaaaagaaatgatgttacagttcacattcaggtgcagaaaattaaggtaacgagagagcccagaggtctgcagagggcagaggctgatgaaaatgcatcag

SEQ ID NO: 218549 - DNA, 8734 bp, Zea Mays
atccagaagagacccaattgcccagggccgccgccgcgccgacctcgccgtcgcgcgctttgcttctcttgcccccctgcccgtggcctccgccccaattccagcgggacagcctcgatgagccgccaggatcgtcaccagtggcctcgccctaaccacggatacgaccctcgcgccgccgccgccgccgcgcaatgaactccgctgccctagctgcctaccaactgcagcagcagcaggctcatcacttcgcctcccatgcctaccaccaagcccctaccggtaacaccatgcaccgctctaccaaacccgccgccgctgccaaacctgcgccgccaccgggcaaccagcaggccgtgctggaccgggctcaagaggcggcgaggaaggctcgggaggagctcgtgaagggtggggacggcgtcacggcgtggaaggtggcgcaggcggtgctggtggcgctcaaggctgattcgtgggactccctcggcgtccagccccaggatgtgcctctcctgcgggatctcttcctaatcgagggcaaggtgaacgcattcatccattgctatgttgcagcaagaaaaattgtaacggtttatgatctggaggttgagatatgcaagaatgagggggttgtgcaatttgaagagctgggattgggacctttccttcagcacccgcttgttgcacattattttttagtgccagctgatttgtctgtggtgcctaagctttgtagcgaggaaattatcaataccctgctgaaatttgtggacaaatctaagaaaaaaatcacaattgaagattttttgaaccatcttgcagagaaaaaatcagtctctgggaaggaaaaacttggtgtgcgggtacaaagcttggggttgcatatttccttactacgacaggccaagcaaacagaagtgtctgctgcgaagcttcgagcaaatatgagtggatctggtaatagtagtcaggagaaggatttgttgaaaaatgcaagtttccatactcacaagaaggctttggacaagaggttcatttctttaactaatcgtataaaagagttaccaggcatcaataagcatatccattttgattcgaccgatgatgaaactaatagttgtactggttctgaggatggtaaatctgatggcaatgagaatgagaatgaatgttctattcttgacaaaaaggatggtgataagcgtgtgaatagctgcccatatccgtcaaaaactgaagaactggaaaggcttggtttgaaatctgaaattaataaaaggcaatctttagagaatagcaagccaagagacagtgggaaaaaggggaaagttttggaaatgttagcaaattactatgggagaacgatatcagggaagaggagaattagaaatttcttctcacagtacccaggcattggccttctcaatgttgctgttaaatcaatgggatgtggtctgctggatagcatttacgatgtgatacagcttgctgatgagaatgatgtagcttcaagccctcctcctaacaccaccactgaagttatggaaattgagcctccaagtgttgctattgatgatgtcatcaggaggatttcagaatatattgaatccaacagtaaaatctctggtgatgtggctttgcaagtgagggcacttaatgattgtgaaacatgggtaactactcaattttcagcaaatcaattcagtgctcttggccatgggacattccttgagtttttggacaaacattgtcaccagttccgaactgctttgagtagtttctttaaggagggtccttctaattcttcatctctggaagtttctgtactgcagcagcaaattgaatttttactctgtcaagctgagagtaattggctggaagatagtgacttttcagaggatagttttgttatgcttcttaaaaagcaatttccaacaataagctttaatattgtgcaagacaaatctgatggtggagtttctggctttattgaggggcagaagaaagacatacggacatatagtttaaaattttccatctctttgttggagaaacgatggtctggaactttgccaagtagacatgggaatgttgatgaactggggaacattgtcgctgaacaatcttgttaccataccacagtttgctcacgagaggcaattaattgtttactgagggctcctatgctgtctgatctgcatctttggtcccattgggattcgctatttgctcctacactgggctcctttgtacattggttgctgaatactggtccaattcaagagctcgcatgcattgcgaccacagatggtaggtttattagagtagattcatcagccacagttgaccagtttctggaagctattatccatcgatcaccacttcaagtggcagtgaaactgctttcacttctatacatttacaatggttctatgaacaccccaatgtcattgctaaaatgttatgcacagcgagcaataaagctcatagtagataacaacaatgatttgatgaatgctaaatctgaaaacaaaatatttatgcctgatgagccccaaaacctaagtagtgaaagctctacttgttttgctgatcagtgtcaagaaagctctcaggcgtctcctggaaggttgatcaggtctgatagcttgccaaacattaataacactgttcatttgatcacaaaatttgtacttgattgtcttgatcatctaccttcagaattccgtagtcttgcagcagacatactattggcaggatttcgggttgttactaagaactggcatgcagttatgttgcatgaagccactgaaaacgggcagctttgcatgcttcatgatattggtttgtcacttggagttgtagaatgggttgaagattgccataggttgtgtttaactgatgaagttcatgtgcagacagaaatgcattcttctgccaagcttgcaacacctgcctctgtgggagccacccatgaagattctaacatgcatatttctagtgatgttaatatgatggataagagaaaacaattgtttcctgtcataaatgatcgggctggtatagataaggaagacaataagatgttaaatcctgctggaactgaggcagatgttgcagaactacatactaccagcagatcttctatgatggaagaaacaagtcttgaggaagcatctcttgttattgagactatacgccgtgaagagtttggtctggatcaggcactaagtgacactgagaatagcttgttaaagaagcagcatgctcgacttggcagagcattgcattgcctttcacaagaattatattcccaggattctcatctacttcttgagctggtacagaatgctgacgacaatacatatcctgaggatgttgaagcaacattagcattcattctccaagaggatggtattgctgttctaaacaatgagaggggcttctctgctgagaacattagagcactctgtgatattggtaactcgacaaagaaaggatcaaaccagggttatattggaaataaaggcattggatttaaatcagttttccgggtaactgatgctccggagatccattcaaatggtttccatgtgaaatttgatatcacagatggccagattggttttgtgttgccaactgcagttccaccttacagtaccacttcttttagtagaatgttatccgttgaagatgacaaggatgcccattcattgtggaacacttgcattttacttcccttcagatcaaaatttagggagtgcactggtatgtgctccattgtgtctttgttttcagatctgcacccatctctactgctgttccttcatcgactaaaatgtatcaagtttaagaatttgtttgatgacacacttctgattatgagaagggagattcttggtgatggtattgtgagaatctcgcatgggattgagacaatgagttggttggtggtcagtaagaggctacaaggtaccattgtgcggcatgatgtgtgcaccacagagatagctgtggcgtttactttgcagcagactgaggaaggagattatgaaccttatttgaagcagcaacctgtgtttgcttttcttcctctaaggaattacggtcttaaattcattcttcaaggagattttgttttaccatcttccagagaggaagtggatgcggatagtgcatggaatcagtggttgttgtctgaattcccttctttgtttgtaagtgcccaagaatctttttgtgctcttccctgttttcagaggtgccctggaaaagctgtcacagccttcttgagttttattcctctagcaggagaggttcatggattcttcagccagcttccacacttgatcctttccaagttgcgtctgacccgctgcatgtttttggatggctctactgtgcaatgggtctatccatgcaacacacttaggggttgggatgaacaaactaaaatgttattttcagaaggcttacttcatgaacatcttggtcttggttacctctcaaaaaatattgttatatctgataagttatcaagagccctaggtattcatgactatggaccaaacattttgctagatgccatctcatctatttgccgaattgatggttgtattgagtcattgggcctggaatggctttgtgcttggtttgttaacctttatctgacattgctgtctcattcttctcaaaatgtttcctcagcaagaaacctcgaagacattcttttggataaagttaggaaaataccatgcatcccactttcagatggttcatttacctctatttcagatggtcgtatatggttgccatatgatgttgccagttccattcctgaatgcagtagcattccgaattttccagctctatatggtaatcttcgaactgtaagtccaaaccttctctctgcatgctgcaaaaataaatacctcatggaggaagtcagaataaatgatctggcagacatgctccaaaggatcggggtgcggaagttgtctgggcatgacattgttaaaaatcacatcatggtgtccttgcgtaacggtttagatgctaatgtggctgatatagtgattagagagtatgtgagctttattatggttcatcttcagtcttcttgcaccagctgtaactttgaaagaggagagatagtgtcagaactacggaagagtcctatcttccttacaaaccatggatacaagagcccagctgatgaaccaattcacttcagtaaagattatggaaattccgtggatgttactagactgcttcagaatgtagaaataagttggattgaacttgatagtagctatttgcagcatcatggttcacagtcgtcatcatttgcacgggaaaaatggaggcaattttttgaagaaatgggtgtgactgattttgtgcaggtagtgaaagttgaaaaaactttatcccaagttgattctattctagcaggaggactttctctagctgatgtatctacaaaacaatgtacagtgtatgactgggagtcaccagaattatctagaattttatcaatattttcttcaaaaagatgcaaggaaaattgtgtatatcttctggaagttcttgatagattctgggatgatcattatagtgcaaaatctaggatcttcacagatgctacacattgtggtgaaaacagagcagttgaatcatcatttatgaagtgcattcaaagcttcaaatggatagcatcaagaatggatgaggatcttcattatgcaacagatttattctatgattgtgaaaatgtccgctctctttttggtagtgtggctccatatgctgtaccgcaggtatctagcagttcacttaagaaggccattggattcaaaacagaggtatcttactgtgatgcattgatggtcctgaagtcttggataacgtcaaaggttccctttagagcaagtatgagccagatgtgcaaattctataccttcttgtctgaaggcgtggcagacgcaaagattgacattaaacgggagttcatgtcgtctccttctatatttacaccactacagcgtcctcgggcaagtgaggttattcctggaaggtttttggcgccagaagacctctattggcatgacccaacaggatgttctgaaataacagaggatttcgttgcaacgaaaaacagaagtatgttcccaagaaaaatgctgtctgcagcctatccaaacctttatgaattatttactctgacatgcggtgtaccaaaggccccaacaacatcaaattatgttgagatgctgctacggttgtcaaccattgcattgccttcacaggcaggaaaccatgtcttttgtgtatttgtgagatgggccaagtgtatgcattctgaaagtgacaagatgaatgatatattgtacttgaaagaatcccttcagaaattagaaacaacaatattgcccacctcagccgataaatgggtctctctacatccttcttttggccttgtttgctgggtagatgatgatgagctaaagcaacagtttgttaactctaatgatgtttacttcatacaatttggcgacctttcttctgaggataagcaaatgttgtatggaagagttgctgctttaatgaaaagcttaggcatccaagcactttcaaaggttgtgtatcgtgaagcaatattttatggtacatcagagaacagagaaaaggtttccttgatttgttggctgttgccatacatgcaacgttacatctataagatgcatagagatacttatatcaacttccagaaaaacgacatcatgaagattagcaacctgcaagtagtagttgttgacaagttattccacaagtatgtactgaggggactcgagagttcttctaagaaaagattccaatgtcattgtcttttgcagggagatactctatatgcaacacaagaggctgactcacattcagtatttttggagctttctagaattttctttgatggatcccatgatcttcattttgcaaattttctacacatgatcaaaaccatggccgaatctggcactcatgctgagcaaatagagacttttatcgttaataatcagaatgtgcctgagttacctgagcatgaagctatctggtccttctcttccttgtctgcagccaaacatggttcagcgaaccaaggtggtgctgatacccagggggttgatttccaacctgtccatgaatttagtattcccaatcatcagaaggcacaggtgatggtttctagttggcctctaaactattggagaacagcacccgtcttcagaacacctctcataaaccagcatgcaagcatgcaagaggcaaaggtgaatgatgctggaccttcatcaaacttaaacatgcctgctatgtatggacacaccgaagatagtttgctttctgctgatcttgaaagggattggattatagaagagaatccaagaactgaaactacattgtttggagatagttcatcggaaatccttgatgagcctcagatggtgatgtctgctgaacctttccatgcacctgcttatttgaacttggaggctggaaattcaagcccaacggttcatgtcgagctaacaaattccgatgagaaactggccaatcttgcagaagacaagaatcagcgactttcagatgcaaaccagttaagaacagggaggcttggtgaagaactggtcgagaaatatttggccaaacagctaggttccaacaatgttaggtgggtgaacaacagaattgaaaccggactgccttatgatattgttataacacacccagagggtttcacagagtatgtggaggttaaaacaactgtatcttcaagaaaagattggtttgacgtctcagcaagggaatggcagtttgccttggagaaaggggattcatttagcattgctcgtgtcatcttaggtacaaagaaagcaagtatagaaatgttgaaaaacccacacaagctttgtaagcagaaagcattgcggcttgctctcctgatatccagatcggcagcaacctagactaaaatgtcggttttgttgaggctagcaccgatcatccttctgcagattgttatgattactctgactaataatcaacatgaactggagtgagcatctgcatcttgataggtatttgctgatccaagttagcagattcttctttttggagagagatggggtaccgggtacggcatgagtgcaagacaacatacagttgagccgctctatagtaggctcctctttctattattctaactcgggtaatcttctccaatggcggctctctaccatgtctcttgttacatacaacttacgctctgcctttgtaacccattctggtattttgttgcataatgtatgtgattttgtcattagatttgtttttcaatttctgccctagacatcgtcccataggttgattgtgtaactaaacatgaaactgtacataaatggatggaatttgattttaccatgtacatgaaatttgattttgcgtgcggcggctgcctggtctgtgcgttctggtctctgtgcgcagggcgcggcatctgcccggcagcctgctcgccggctgctcggtgagaaaattggctagttgggtactggttttttttttcaattgataaaaaaacaggatctgatggagccttttcatttttgttttactttccgtctcttttatcagcagttgaaaggcgatcacttattctcaatttggtggaatc

SEQ ID NO: 218550 - DNA, 8563 bp, Zea Mays
catctctatccagaagagacccaattgcccagggccgccgccgcgccgacctcgccgtcgcgcgctttgcttctcttgcccccctgcccgtggcctccgccccaattccagcgggacagcctcgatgagccgccaggatcgtcaccagtggcctcgccctaaccacggatacgaccctcgcgccgccgccgccgccgcgcaatggtatggcgccgcttcgatgctgtttcccgaccccggcgcggcggcgctgcacgggataaacccctacggcttcgcccctaaccctttcttcaataacttcctcccccagaactccgctgccctagctgcctaccaactgcagcagcagcaggctcatcacttcgcctcccatgcctaccaccaagcccctaccggtaacaccatgcaccgctctaccaaacccgccgccgctgccaaacctgcgccgccaccgggcaaccagcaggccgtgctggaccgggctcaagaggcggcgaggaaggctcgggaggagctcgtgaagggtggggacggcgtcacggcgtggaaggtggcgcaggcggtgctggtggcgctcaaggctgattcgtgggactccctcggcgtccagccccaggatgtgcctctcctgcgggatctcttcctaatcgagggcaaggtgaacgcattcatccattgctatgttgcagcaagaaaaattgtaacggtttatgatctggaggttgagatatgcaagaatgagggggttgtgcaatttgaagagctgggattgggacctttccttcagcacccgcttgttgcacattattttttagtgccagctgatttgtctgtggtgcctaagctttgtagcgaggaaattatcaataccctgctgaaatttgtggacaaatctaagaaaaaaatcacaattgaagattttttgaaccatcttgcagagaaaaaatcagtctctgggaaggaaaaacttggtgtgcgggtacaaagcttggggttgcatatttccttactacgacaggccaagcaaacagaagtgtctgctgcgaagcttcgagcaaatatgagtggatctggtaatagtagtcaggagaaggatttgttgaaaaatgcaagtttccatactcacaagaaggctttggacaagaggttcatttctttaactaatcgtataaaagagttaccaggcatcaataagcatatccattttgattcgaccgatgatgaaactaatagttgtactggttctgaggatggtaaatctgatggcaatgagaatgagaatgaatgttctattcttgacaaaaaggatggtgataagcgtgtgaatagctgcccatatccgtcaaaaactgaagaactggaaaggcttggtttgaaatctgaaattaataaaaggcaatctttagagaatagcaagccaagagacagtgggaaaaaggggaaagttttggaaatgttagcaaattactatgggagaacgatatcagggaagaggagaattagaaatttcttctcacagtacccaggcattggccttctcaatgttgctgttaaatcaatgggatgtggtctgctggatagcatttacgatgtgatacagcttgctgatgagaatgatgtagcttcaagccctcctcctaacaccaccactgaagttatggaaattgagcctccaagtgttgctattgatgatgtcatcaggaggatttcagaatatattgaatccaacagtaaaatctctggtgatgtggctttgcaagtgagggcacttaatgattgtgaaacatgggtaactactcaattttcagcaaatcaattcagtgctcttggccatgggacattccttgagtttttggacaaacattgtcaccagttccgaactgctttgagtagtttctttaaggagggtccttctaattcttcatctctggaagtttctgtactgcagcagcaaattgaatttttactctgtcaagctgagagtaattggctggaagatagtgacttttcagaggatagttttgttatgcttcttaaaaagcaatttccaacaataagctttaatattgtgcaagacaaatctgatggtggagtttctggctttattgaggggcagaagaaagacatacggacatatagtttaaaattttccatctctttgttggagaaacgatggtctggaactttgccaagtagacatgggaatgttgatgaactggggaacattgtcgctgaacaatcttgttaccataccacagtttgctcacgagaggcaattaattgtttactgagggctcctatgctgtctgatctgcatctttggtcccattgggattcgctatttgctcctacactgggctcctttgtacattggttgctgaatactggtccaattcaagagctcgcatgcattgcgaccacagatgtgtcaagaaagctctcaggcgtctcctggaaggttgatcaggtctgatagcttgccaaacattaataacactgttcatttgatcacaaaatttgtacttgattgtcttgatcatctaccttcagaattccgtagtcttgcagcagacatactattggcaggatttcgggttgttactaagaactggcatgcagttatgttgcatgaagccactgaaaacgggcagctttgcatgcttcatgatattggtttgtcacttggagttgtagaatgggttgaagattgccataggttgtgtttaactgatgaagttcatgtgcagacagaaatgcattcttctgccaagcttgcaacacctgcctctgtgggagccacccatgaagattctaacatgcatatttctagtgatgttaatatgatggataagagaaaacaattgtttcctgtcataaatgatcgggctggtatagataaggaagacaataagatgttaaatcctgctggaactgaggcagatgttgcagaactacatactaccagcagatcttctatgatggaagaaacaagtcttgaggaagcatctcttgttattgagactatacgccgtgaagagtttggtctggatcaggcactaagtgacactgagaatagcttgttaaagaagcagcatgctcgacttggcagagcattgcattgcctttcacaagaattatattcccaggattctcatctacttcttgagctggtacagaatgctgacgacaatacatatcctgaggatgttgaagcaacattagcattcattctccaagaggatggtattgctgttctaaacaatgagaggggcttctctgctgagaacattagagcactctgtgatattggtaactcgacaaagaaaggatcaaaccagggttatattggaaataaaggcattggatttaaatcagttttccgggtaactgatgctccggagatccattcaaatggtttccatgtgaaatttgatatcacagatggccagattggttttgtgttgccaactgcagttccaccttacagtaccacttcttttagtagaatgttatccgttgaagatgacaaggatgcccattcattgtggaacacttgcattttacttcccttcagatcaaaatttagggagtgcactggtatgtgctccattgtgtctttgttttcagatctgcacccatctctactgctgttccttcatcgactaaaatgtatcaagtttaagaatttgtttgatgacacacttctgattatgagaagggagattcttggtgatggtattgtgagaatctcgcatgggattgagacaatgagttggttggtggtcagtaagaggctacaaggtaccattgtgcggcatgatgtgtgcaccacagagatagctgtggcgtttactttgcagcagactgaggaaggagattatgaaccttatttgaagcagcaacctgtgtttgcttttcttcctctaaggaattacggtcttaaattcattcttcaaggagattttgttttaccatcttccagagaggaagtggatgcggatagtgcatggaatcagtggttgttgtctgaattcccttctttgtttgtaagtgcccaagaatctttttgtgctcttccctgttttcagaggtgccctggaaaagctgtcacagccttcttgagttttattcctctagcaggagaggttcatggattcttcagccagcttccacacttgatcctttccaagttgcgtctgacccgctgcatgtttttggatggctctactgtgcaatgggtctatccatgcaacacacttaggggttgggatgaacaaactaaaatgttattttcagaaggcttacttcatgaacatcttggtcttggttacctctcaaaaaatattgttatatctgataagttatcaagagccctaggtattcatgactatggaccaaacattttgctagatgccatctcatctatttgccgaattgatggttgtattgagtcattgggcctggaatggctttgtgcttggtttgttaacctttatctgacattgctgtctcattcttctcaaaatgtttcctcagcaagaaacctcgaagacattcttttggataaagttaggaaaataccatgcatcccactttcagatggttcatttacctctatttcagatggtcgtatatggttgccatatgatgttgccagttccattcctgaatgcagtagcattccgaattttccagctctatatggtaatcttcgaactgtaagtccaaaccttctctctgcatgctgcaaaaataaatacctcatggaggaagtcagaataaatgatctggcagacatgctccaaaggatcggggtgcggaagttgtctgggcatgacattgttaaaaatcacatcatggtgtccttgcgtaacggtttagatgctaatgtggctgatatagtgattagagagtatgtgagctttattatggttcatcttcagtcttcttgcaccagctgtaactttgaaagaggagagatagtgtcagaactacggaagagtcctatcttccttacaaaccatggatacaagagcccagctgatgaaccaattcacttcagtaaagattatggaaattccgtggatgttactagactgcttcagaatgtagaaataagttggattgaacttgatagtagctatttgcagcatcatggttcacagtcgtcatcatttgcacgggaaaaatggaggcaattttttgaagaaatgggtgtgactgattttgtgcaggtagtgaaagttgaaaaaactttatcccaagttgattctattctagcaggaggactttctctagctgatgtatctacaaaacaatgtacagtgtatgactgggagtcaccagaattatctagaattttatcaatattttcttcaaaaagatgcaaggaaaattgtgtatatcttctggaagttcttgatagattctgggatgatcattatagtgcaaaatctaggatcttcacagatgctacacattgtggtgaaaacagagcagttgaatcatcatttatgaagtgcattcaaagcttcaaatggatagcatcaagaatggatgaggatcttcattatgcaacagatttattctatgattgtgaaaatgtccgctctctttttggtagtgtggctccatatgctgtaccgcaggtatctagcagttcacttaagaaggccattggattcaaaacagaggtatcttactgtgatgcattgatggtcctgaagtcttggataacgtcaaaggttccctttagagcaagtatgagccagatgtgcaaattctataccttcttgtctgaaggcgtggcagacgcaaagattgacattaaacgggagttcatgtcgtctccttctatatttacaccactacagcgtcctcgggcaagtgaggttattcctggaaggtttttggcgccagaagacctctattggcatgacccaacaggatgttctgaaataacagaggatttcgttgcaacgaaaaacagaagtatgttcccaagaaaaatgctgtctgcagcctatccaaacctttatgaattatttactctgacatgcggtgtaccaaaggccccaacaacatcaaattatgttgagatgctgctacggttgtcaaccattgcattgccttcacaggcaggaaaccatgtcttttgtgtatttgtgagatgggccaagtgtatgcattctgaaagtgacaagatgaatgatatattgtacttgaaagaatcccttcagaaattagaaacaacaatattgcccacctcagccgataaatgggtctctctacatccttcttttggccttgtttgctgggtagatgatgatgagctaaagcaacagtttgttaactctaatgatgtttacttcatacaatttggcgacctttcttctgaggataagcaaatgttgtatggaagagttgctgctttaatgaaaagcttaggcatccaagcactttcaaaggttgtgtatcgtgaagcaatattttatggtacatcagagaacagagaaaaggtttccttgatttgttggctgttgccatacatgcaacgttacatctataagatgcatagagatacttatatcaacttccagaaaaacgacatcatgaagattagcaacctgcaagtagtagttgttgacaagttattccacaagtatgtactgaggggactcgagagttcttctaagaaaagattccaatgtcattgtcttttgcagggagatactctatatgcaacacaagaggctgactcacattcagtatttttggagctttctagaattttctttgatggatcccatgatcttcattttgcaaattttctacacatgatcaaaaccatggccgaatctggcactcatgctgagcaaatagagacttttatcgttaataatcagaatgtgcctgagttacctgagcatgaagctatctggtccttctcttccttgtctgcagccaaacatggttcagcgaaccaaggtggtgctgatacccagggggttgatttccaacctgtccatgaatttagtattcccaatcatcagaaggcacaggtgatggtttctagttggcctctaaactattggagaacagcacccgtcttcagaacacctctcataaaccagcatgcaagcatgcaagaggcaaaggtgaatgatgctggaccttcatcaaacttaaacatgcctgctatgtatggacacaccgaagatagtttgctttctgctgatcttgaaagggattggattatagaagagaatccaagaactgaaactacattgtttggagatagttcatcggaaatccttgatgagcctcagatggtgatgtctgctgaacctttccatgcacctgcttatttgaacttggaggctggaaattcaagcccaacggttcatgtcgagctaacaaattccgatgagaaactggccaatcttgcagaagacaagaatcagcgactttcagatgcaaaccagttaagaacagggaggcttggtgaagaactggtcgagaaatatttggccaaacagctaggttccaacaatgttaggtgggtgaacaacagaattgaaaccggactgccttatgatattgttataacacacccagagggtttcacagagtatgtggaggttaaaacaactgtatcttcaagaaaagattggtttgacgtctcagcaagggaatggcagtttgccttggagaaaggggattcatttagcattgctcgtgtcatcttaggtacaaagaaagcaagtatagaaatgttgaaaaacccacacaagctttgtaagcagaaagcattgcggcttgctctcctgatatccagatcggcagcaacctagactaaaatgtcggttttgttgaggctagcaccgatcatccttctgcagattgttatgattactctgactaataatcaacatgaactggagtgagcatctgcatcttgataggtatttgctgatccaagttagcagattcttctttttggagagagatggggtaccgggtacggcatgagtgcaagacaacatacagttgagccgctctatagtaggctcctctttctattattctaactcgggtaatcttctccaatggcggctctctaccatgtctcttgttacatacaacttacgctctgcctttgtaacccattctggtattttgttgcataatgtatgtgattttgtcattagatttgtttttcaatttctgccctagacatcgtcccataggttgattgtgtaactaaacatgaaactgtacataaatggatggaatttgattttaccatgtacatgaaatttgattttgcgtgcggcggctgcctggtctgtgcgttctggtctctgtgcgcagggcgcggcatctgcccggcagcctgctcgccggctgctcggtgagaaaattggctagttgggtactggttttttttttcaattgataaaaaaacaggatctgatggagccttttcatttttgttttactttccgtctcttttatcagcagttgaaaggcgatcacttattctcaatttggtggaatc

SEQ ID NO: 218551 - DNA, 9315 bp, Zea Mays
tggcatctctatccagaagagacccaattgcccagggccgccgccgcgccgacctcgccgtcgcgcgctttgcttctcttgcccccctgcccgtggcctccgccccaattccagcgggacagcctcgatgagccgccaggatcgtcaccagtggcctcgccctaaccacggatacgaccctcgcgccgccgccgccgccgcgcaatggtatggcgccgcttcgatgctgtttcccgaccccggcgcggcggcgctgcacgggataaacccctacggcttcgcccctaaccctttcttcaataacttcctcccccagaactccgctgccctagctgcctaccaactgcagcagcagcaggctcatcacttcgcctcccatgcctaccaccaagcccctaccggtaacaccatgcaccgctctaccaaacccgccgccgctgccaaacctgcgccgccaccgggcaaccagcaggccgtgctggaccgggctcaagaggcggcgaggaaggctcgggaggagctcgtgaagggtggggacggcgtcacggcgtggaaggtggcgcaggcggtgctggtggcgctcaaggctgattcgtgggactccctcggcgtccagccccaggatgtgcctctcctgcgggatctcttcctaatcgagggcaaggtgaacgcattcatccattgctatgttgcagcaagaaaaattgtaacggtttatgatctggaggttgagatatgcaagaatgagggggttgtgcaatttgaagagctgggattgggacctttccttcagcacccgcttgttgcacattattttttagtgccagctgatttgtctgtggtgcctaagctttgtagcgaggaaattatcaataccctgctgaaatttgtggacaaatctaagaaaaaaatcacaattgaagattttttgaaccatcttgcagagaaaaaatcagtctctgggaaggaaaaacttggtgtgcgggtacaaagcttggggttgcatatttccttactacgacaggccaagcaaacagaagtgtctgctgcgaagcttcgagcaaatatgagtggatctggtaatagtagtcaggagaaggatttgttgaaaaatgcaagtttccatactcacaagaaggctttggacaagaggttcatttctttaactaatcgtataaaagagttaccaggcatcaataagcatatccattttgattcgaccgatgatgaaactaatagttgtactggttctgaggatggtaaatctgatggcaatgagaatgagaatgaatgttctattcttgacaaaaaggatggtgataagcgtgtgaatagctgcccatatccgtcaaaaactgaagaactggaaaggcttggtttgaaatctgaaattaataaaaggcaatctttagagaatagcaagccaagagacagtgggaaaaaggggaaagtaagtgaaaaaagaaaatatgaagaaatcgggagtcctagctgttcgttcaagcagcctaagaagcagcaaaagttgcaaaaacatgaagcatcaccgaaatgtttcctaagtataggtaagctggaaaattttgtaacaacatggaaggaaacatgtcgtgaacatccagttcaacaggttttggaaatgttagcaaattactatgggagaacgatatcagggaagaggagaattagaaatttcttctcacagtacccaggcattggccttctcaatgttgctgttaaatcaatgggatgtggtctgctggatagcatttacgatgtgatacagcttgctgatgagaatgatgtagcttcaagccctcctcctaacaccaccactgaagttatggaaattgagcctccaagtaaagaaaatacaggtagcactaatggagcccatgagaagagtgaagacaacatgactgcacatggtgttgctattgatgatgtcatcaggaggatttcagaatatattgaatccaacagtaaaatctctggtgatgtggctttgcaagtgagggcacttaatgattgtgaaacatgggtaactactcaattttcagcaaatcaattcagtgctcttggccatgggacattccttgagtttttggacaaacattgtcaccagttccgaactgctttgagtagtttctttaaggagggtccttctaattcttcatctctggaagtttctgtactgcagcagcaaattgaatttttactctgtcaagctgagagtaattggctggaagatagtgacttttcagaggatagttttgttatgcttcttaaaaagcaatttccaacaataagctttaatattgtgcaagacaaatctgatggtggagtttctggctttattgaggggcagaagaaagacatacggacatatagtttaaaattttccatctctttgttggagaaacgatggtctggaactttgccaagtagacatgggaatgttgatgaactggggaacattgtcgctgaacaatcttgttaccataccacagtttgctcacgagaggcaattaattgtttactgagggctcctatgctgtctgatctgcatctttggtcccattgggattcgctatttgctcctacactgggctcctttgtacattggttgctgaatactggtccaattcaagagctcgcatgcattgcgaccacagatggtaggtttattagagtagattcatcagccacagttgaccagtttctggaagctattatccatcgatcaccacttcaagtggcagtgaaactgctttcacttctatacatttacaatggttctatgaacaccccaatgtcattgctaaaatgttatgcacagcgagcaataaagctcatagtagataacaacaatgatttgatgaatgctaaatctgaaaacaaaatatttatgcctgatgagccccaaaacctaagtagtgaaagctctacttgttttgctgatcagtgtcaagaaagctctcaggcgtctcctggaaggttgatcaggtctgatagcttgccaaacattaataacactgttcatttgatcacaaaatttgtacttgattgtcttgatcatctaccttcagaattccgtagtcttgcagcagacatactattggcaggatttcgggttgttactaagaactggcatgcagttatgttgcatgaagccactgaaaacgggcagctttgcatgcttcatgatattggtttgtcacttggagttgtagaatgggttgaagattgccataggttgtgtttaactgatgaagttcatgtgcagacagaaatgcattcttctgccaagcttgcaacacctgcctctgtgggagccacccatgaagattctaacatgcatatttctagtgatgttaatatgatggataagagaaaacaattgtttcctgtcataaatgatcgggctggtatagataaggaagacaataagatgttaaatcctgctggaactgaggcagatgttgcagaactacatactaccagcagatcttctatgatggaagaaacaagtcttgaggaagcatctcttgttattgagactatacgccgtgaagagtttggtctggatcaggcactaagtgacactgagaatagcttgttaaagaagcagcatgctcgacttggcagagcattgcattgcctttcacaagaattatattcccaggattctcatctacttcttgagctggtacagaatgctgacgacaatacatatcctgaggatgttgaagcaacattagcattcattctccaagaggatggtattgctgttctaaacaatgagaggggcttctctgctgagaacattagagcactctgtgatattggtaactcgacaaagaaaggatcaaaccagggttatattggaaataaaggcattggatttaaatcagttttccgggtaactgatgctccggagatccattcaaatggtttccatgtgaaatttgatatcacagatggccagattggttttgtgttgccaactgcagttccaccttacagtaccacttcttttagtagaatgttatccgttgaagatgacaaggatgcccattcattgtggaacacttgcattttacttcccttcagatcaaaatttagggagtgcactggtatgtgctccattgtgtctttgttttcagatctgcacccatctctactgctgttccttcatcgactaaaatgtatcaagtttaagaatttgtttgatgacacacttctgattatgagaagggagattcttggtgatggtattgtgagaatctcgcatgggattgagacaatgagttggttggtggtcagtaagaggctacaaggtaccattgtgcggcatgatgtgtgcaccacagagatagctgtggcgtttactttgcagcagactgaggaaggagattatgaaccttatttgaagcagcaacctgtgtttgcttttcttcctctaaggaattacggtcttaaattcattcttcaaggagattttgttttaccatcttccagagaggaagtggatgcggatagtgcatggaatcagtggttgttgtctgaattcccttctttgtttgtaagtgcccaagaatctttttgtgctcttccctgttttcagaggtgccctggaaaagctgtcacagccttcttgagttttattcctctagcaggagaggttcatggattcttcagccagcttccacacttgatcctttccaagttgcgtctgacccgctgcatgtttttggatggctctactgtgcaatgggtctatccatgcaacacacttaggggttgggatgaacaaactaaaatgttattttcagaaggcttacttcatgaacatcttggtcttggttacctctcaaaaaatattgttatatctgataagttatcaagagccctaggtattcatgactatggaccaaacattttgctagatgccatctcatctatttgccgaattgatggttgtattgagtcattgggcctggaatggctttgtgcttggtttgttaacctttatctgacattgctgtctcattcttctcaaaatgtttcctcagcaagaaacctcgaagacattcttttggataaagttaggaaaataccatgcatcccactttcagatggttcatttacctctatttcagatggtcgtatatggttgccatatgatgttgccagttccattcctgaatgcagtagcattccgaattttccagctctatatggtaatcttcgaactgtaagtccaaaccttctctctgcatgctgcaaaaataaatacctcatggaggaagtcagaataaatgatctggcagacatgctccaaaggatcggggtgcggaagttgtctgggcatgacattgttaaaaatcacatcatggtgtccttgcgtaacggtttagatgctaatgtggctgatatagtgattagagagtatgtgagctttattatggttcatcttcagtcttcttgcaccagctgtaactttgaaagaggagagatagtgtcagaactacggaagagtcctatcttccttacaaaccatggatacaagagcccagctgatgaaccaattcacttcagtaaagattatggaaattccgtggatgttactagactgcttcagaatgtagaaataagttggattgaacttgatagtagctatttgcagcatcatggttcacagtcgtcatcatttgcacgggaaaaatggaggcaattttttgaagaaatgggtgtgactgattttgtgcaggtagtgaaagttgaaaaaactttatcccaagttgattctattctagcaggaggactttctctagctgatgtatctacaaaacaatgtacagtgtatgactgggagtcaccagaattatctagaattttatcaatattttcttcaaaaagatgcaaggaaaattgtgtatatcttctggaagttcttgatagattctgggatgatcattatagtgcaaaatctaggatcttcacagatgctacacattgtggtgaaaacagagcagttgaatcatcatttatgaagtgcattcaaagcttcaaatggatagcatcaagaatggatgaggatcttcattatgcaacagatttattctatgattgtgaaaatgtccgctctctttttggtagtgtggctccatatgctgtaccgcaggtatctagcagttcacttaagaaggccattggattcaaaacagaggtatcttactgtgatgcattgatggtcctgaagtcttggataacgtcaaaggttccctttagagcaagtatgagccagatgtgcaaattctataccttcttgtctgaaggcgtggcagacgcaaagattgacattaaacgggagttcatgtcgtctccttctatatttacaccactacagcgtcctcgggcaagtgaggttattcctggaaggtttttggcgccagaagacctctattggcatgacccaacaggatgttctgaaataacagaggatttcgttgcaacgaaaaacagaagtatgttcccaagaaaaatgctgtctgcagcctatccaaacctttatgaattatttactctgacatgcggtgtaccaaaggccccaacaacatcaaattatgttgagatgctgctacggttgtcaaccattgcattgccttcacaggcaggaaaccatgtcttttgtgtatttgtgagatgggccaagtgtatgcattctgaaagtgacaagatgaatgatatattgtacttgaaagaatcccttcagaaattagaaacaacaatattgcccacctcagccgataaatgggtctctctacatccttcttttggccttgtttgctgggtagatgatgatgagctaaagcaacagtttgttaactctaatgatgtttacttcatacaatttggcgacctttcttctgaggataagcaaatgttgtatggaagagttgctgctttaatgaaaagcttaggcatccaagcactttcaaaggttgtgtatcgtgaagcaatattttatggtacatcagagaacagagaaaaggtttccttgatttgttggctgttgccatacatgcaacgttacatctataagatgcatagagatacttatatcaacttccagaaaaacgacatcatgaagattagcaacctgcaagtagtagttgttgacaagttattccacaagtatgtactgaggggactcgagagttcttctaagaaaagattccaatgtcattgtcttttgcagggagatactctatatgcaacacaagaggctgactcacattcagtatttttggagctttctagaattttctttgatggatcccatgatcttcattttgcaaattttctacacatgatcaaaaccatggccgaatctggcactcatgctgagcaaatagagacttttatcgttaataatcagaatgtgcctgagttacctgagcatgaagctatctggtccttctcttccttgtctgcagccaaacatggttcagcgaaccaaggtggtgctgatacccagggggttgatttccaacctgtccatgaatttagtattcccaatcatcagaaggcacaggtgatggtttctagttggcctctaaactattggagaacagcacccgtcttcagaacacctctcataaaccagcatgcaagcatgcaagaggcaaaggtgaatgatgctggaccttcatcaaacttaaacatgcctgctatgtatggacacaccgaagatagtttgctttctgctgatcttgaaagggattggattatagaagagaatccaagaactgaaactacattgtttggagatagttcatcggaaatccttgatgagcctcagatggtgatgtctgctgaacctttccatgcacctgcttatttgaacttggaggctggaaattcaagcccaacggttcatgtcgagctaacaaattccgatgagaaactggccaatcttgcagaagacaagaatcggcgactttcagatgcaagccagttaagaacaggttcaaacccaatggttgatgttgagctaacaaatttcgatgagaaactggccaatcttgcagaaggcaagaatcagcgactttcagatgcaagccagttaagaacaggttcaaacccaatggttgatgttgagctaacaaatttcgatgagaaactggccattcttgcagaagacaagaatcagcgactttcagatgcaaaccagttaagaacagggaggcttggtgaagaactggtcgagaaatatttggccaaacagctaggttccaacaatgttaggtgggtgaacaacagaattgaaaccggactgccttatgatattgttataacacacccagagggtttcacagagtatgtggaggttaaaacaactgtatcttcaagaaaagattggtttgacgtctcagcaagggaatggcagtttgccttggagaaaggggattcatttagcattgctcgtgtcatcttaggtacaaagaaagcaagtatagaaatgttgaaaaacccacacaagctttgtaagcagaaagcattgcggcttgctctcctgatatccagatcggcagcaacctagactaaaatgtcggttttgttgaggctagcaccgatcatccttctgcagattgttatgattactctgactaataatcaacatgaactggagtgagcatctgcatcttgataggtatttgctgatccaagttagcagattcttctttttggagagagatggggtaccgggtacggcatgagtgcaagacaacatacagttgagccgctctatagtaggctcctctttctattattctaactcgggtaatcttctccaatggcggctctctaccatgtctcttgttacatacaacttacgctctgcctttgtaacccattctggtattttgttgcataatgtatgtgattttgtcattagatttgtttttcaatttctgccctagacatcgtcccataggttgattgtgtaactaaacatgaaactgtacataaatggatggaatttgattttaccatgtacatgaaatttgattttgcgtgcggcggctgcctggtctgtgcgttctggtctctgtgcgcagggcgcggcatctgcccggcagcctgctcgccggctgctcggtgagaaaattggctagttgggtactggttttttttttcaattgataaaaaaacaggatctgatggagccttttcatttttgttttactttccgtctcttttatcagcagttgaaaggcgatcacttattctcaatttggtggaatc

SEQ ID NO: 218552 - DNA, 9071 bp, Zea Mays
gttggcatctctatccagaagagacccaattgcccagggccgccgccgcgccgacctcgccgtcgcgcgctttgcttctcttgcccccctgcccgtggcctccgccccaattccagcgggacagcctcgatgagccgccaggatcgtcaccagtggcctcgccctaaccacggatacgaccctcgcgccgccgccgccgccgcgcaatggtatggcgccgcttcgatgctgtttcccgaccccggcgcggcggcgctgcacgggataaacccctacggcttcgcccctaaccctttcttcaataacttcctcccccagaactccgctgccctagctgcctaccaactgcagcagcagcaggctcatcacttcgcctcccatgcctaccaccaagcccctaccggtaacaccatgcaccgctctaccaaacccgccgccgctgccaaacctgcgccgccaccgggcaaccagcaggccgtgctggaccgggctcaagaggcggcgaggaaggctcgggaggagctcgtgaagggtggggacggcgtcacggcgtggaaggtggcgcaggcggtgctggtggcgctcaaggctgattcgtgggactccctcggcgtccagccccaggatgtgcctctcctgcgggatctcttcctaatcgagggcaaggtgaacgcattcatccattgctatgttgcagcaagaaaaattgtaacggtttatgatctggaggttgagatatgcaagaatgagggggttgtgcaatttgaagagctgggattgggacctttccttcagcacccgcttgttgcacattattttttagtgccagctgatttgtctgtggtgcctaagctttgtagcgaggaaattatcaataccctgctgaaatttgtggacaaatctaagaaaaaaatcacaattgaagattttttgaaccatcttgcagagaaaaaatcagtctctgggaaggaaaaacttggtgtgcgggtacaaagcttggggttgcatatttccttactacgacaggccaagcaaacagaagtgtctgctgcgaagcttcgagcaaatatgagtggatctggtaatagtagtcaggagaaggatttgttgaaaaatgcaagtttccatactcacaagaaggctttggacaagaggttcatttctttaactaatcgtataaaagagttaccaggcatcaataagcatatccattttgattcgaccgatgatgaaactaatagttgtactggttctgaggatggtaaatctgatggcaatgagaatgagaatgaatgttctattcttgacaaaaaggatggtgataagcgtgtgaatagctgcccatatccgtcaaaaactgaagaactggaaaggcttggtttgaaatctgaaattaataaaaggcaatctttagagaatagcaagccaagagacagtgggaaaaaggggaaagtaagtgaaaaaagaaaatatgaagaaatcgggagtcctagctgttcgttcaagcagcctaagaagcagcaaaagttgcaaaaacatgaagcatcaccgaaatgtttcctaagtataggtaagctggaaaattttgtaacaacatggaaggaaacatgtcgtgaacatccagttcaacaggttttggaaatgttagcaaattactatgggagaacgatatcagggaagaggagaattagaaatttcttctcacagtacccaggcattggccttctcaatgttgctgttaaatcaatgggatgtggtctgctggatagcatttacgatgtgatacagcttgctgatgagaatgatgtagcttcaagccctcctcctaacaccaccactgaagttatggaaattgagcctccaagtaaagaaaatacaggtagcactaatggagcccatgagaagagtgaagacaacatgactgcacatggtgttgctattgatgatgtcatcaggaggatttcagaatatattgaatccaacagtaaaatctctggtgatgtggctttgcaagtgagggcacttaatgattgtgaaacatgggtaactactcaattttcagcaaatcaattcagtgctcttggccatgggacattccttgagtttttggacaaacattgtcaccagttccgaactgctttgagtagtttctttaaggagggtccttctaattcttcatctctggaagtttctgtactgcagcagcaaattgaatttttactctgtcaagctgagagtaattggctggaagatagtgacttttcagaggatagttttgttatgcttcttaaaaagcaatttccaacaataagctttaatattgtgcaagacaaatctgatggtggagtttctggctttattgaggggcagaagaaagacatacggacatatagtttaaaattttccatctctttgttggagaaacgatggtctggaactttgccaagtagacatgggaatgttgatgaactggggaacattgtcgctgaacaatcttgttaccataccacagtttgctcacgagaggcaattaattgtttactgagggctcctatgctgtctgatctgcatctttggtcccattgggattcgctatttgctcctacactgggctcctttgtacattggttgctgaatactggtccaattcaagagctcgcatgcattgcgaccacagatggtaggtttattagagtagattcatcagccacagttgaccagtttctggaagctattatccatcgatcaccacttcaagtggcagtgaaactgctttcacttctatacatttacaatggttctatgaacaccccaatgtcattgctaaaatgttatgcacagcgagcaataaagctcatagtagataacaacaatgatttgatgaatgctaaatctgaaaacaaaatatttatgcctgatgagccccaaaacctaagtagtgaaagctctacttgttttgctgatcagtgtcaagaaagctctcaggcgtctcctggaaggttgatcaggtctgatagcttgccaaacattaataacactgttcatttgatcacaaaatttgtacttgattgtcttgatcatctaccttcagaattccgtagtcttgcagcagacatactattggcaggatttcgggttgttactaagaactggcatgcagttatgttgcatgaagccactgaaaacgggcagctttgcatgcttcatgatattggtttgtcacttggagttgtagaatgggttgaagattgccataggttgtgtttaactgatgaagttcatgtgcagacagaaatgcattcttctgccaagcttgcaacacctgcctctgtgggagccacccatgaagattctaacatgcatatttctagtgatgttaatatgatggataagagaaaacaattgtttcctgtcataaatgatcgggctggtatagataaggaagacaataagatgttaaatcctgctggaactgaggcagatgttgcagaactacatactaccagcagatcttctatgatggaagaaacaagtcttgaggaagcatctcttgttattgagactatacgccgtgaagagtttggtctggatcaggcactaagtgacactgagaatagcttgttaaagaagcagcatgctcgacttggcagagcattgcattgcctttcacaagaattatattcccaggattctcatctacttcttgagctggtacagaatgctgacgacaatacatatcctgaggatgttgaagcaacattagcattcattctccaagaggatggtattgctgttctaaacaatgagaggggcttctctgctgagaacattagagcactctgtgatattggtaactcgacaaagaaaggatcaaaccagggttatattggaaataaaggcattggatttaaatcagttttccgggtaactgatgctccggagatccattcaaatggtttccatgtgaaatttgatatcacagatggccagattggttttgtgttgccaactgcagttccaccttacagtaccacttcttttagtagaatgttatccgttgaagatgacaaggatgcccattcattgtggaacacttgcattttacttcccttcagatcaaaatttagggagtgcactgatctgcacccatctctactgctgttccttcatcgactaaaatgtatcaagtttaagaatttgtttgatgacacacttctgattatgagaagggagattcttggtgatggtattgtgagaatctcgcatgggattgagacaatgagttggttggtggtcagtaagaggctacaaggtaccattgtgcggcatgatgtgtgcaccacagagatagctgtggcgtttactttgcagcagactgaggaaggagattatgaaccttatttgaagcagcaacctgtgtttgcttttcttcctctaaggaattacggtcttaaattcattcttcaaggagattttgttttaccatcttccagagaggaagtggatgcggatagtgcatggaatcagtggttgttgtctgaattcccttctttgtttgtaagtgcccaagaatctttttgtgctcttccctgttttcagaggtgccctggaaaagctgtcacagccttcttgagttttattcctctagcaggagaggttcatggattcttcagccagcttccacacttgatcctttccaagttgcgtctgacccgctgcatgtttttggatggctctactgtgcaatgggtctatccatgcaacacacttaggggttgggatgaacaaactaaaatgttattttcagaaggcttacttcatgaacatcttggtcttggttacctctcaaaaaatattgttatatctgataagttatcaagagccctaggtattcatgactatggaccaaacattttgctagatgccatctcatctatttgccgaattgatggttgtattgagtcattgggcctggaatggctttgtgcttggtttgttaacctttatctgacattgctgtctcattcttctcaaaatgtttcctcagcaagaaacctcgaagacattcttttggataaagttaggaaaataccatgcatcccactttcagatggttcatttacctctatttcagatggtcgtatatggttgccatatgatgttgccagttccattcctgaatgcagtagcattccgaattttccagctctatatggtaatcttcgaactgtaagtccaaaccttctctctgcatgctgcaaaaataaatacctcatggaggaagtcagaataaatgatctggcagacatgctccaaaggatcggggtgcggaagttgtctgggcatgacattgttaaaaatcacatcatggtgtccttgcgtaacggtttagatgctaatgtggctgatatagtgattagagagtatgtgagctttattatggttcatcttcagtcttcttgcaccagctgtaactttgaaagaggagagatagtgtcagaactacggaagagtcctatcttccttacaaaccatggatacaagagcccagctgatgaaccaattcacttcagtaaagattatggaaattccgtggatgttactagactgcttcagaatgtagaaataagttggattgaacttgatagtagctatttgcagcatcatggttcacagtcgtcatcatttgcacgggaaaaatggaggcaattttttgaagaaatgggtgtgactgattttgtgcaggtagtgaaagttgaaaaaactttatcccaagttgattctattctagcaggaggactttctctagctgatgtatctacaaaacaatgtacagtgtatgactgggagtcaccagaattatctagaattttatcaatattttcttcaaaaagatgcaaggaaaattgtgtatatcttctggaagttcttgatagattctgggatgatcattatagtgcaaaatctaggatcttcacagatgctacacattgtggtgaaaacagagcagttgaatcatcatttatgaagtgcattcaaagcttcaaatggatagcatcaagaatggatgaggatcttcattatgcaacagatttattctatgattgtgaaaatgtccgctctctttttggtagtgtggctccatatgctgtaccgcaggtatctagcagttcacttaagaaggccattggattcaaaacagaggtatcttactgtgatgcattgatggtcctgaagtcttggataacgtcaaaggttccctttagagcaagtatgagccagatgtgcaaattctataccttcttgtctgaaggcgtggcagacgcaaagattgacattaaacgggagttcatgtcgtctccttctatatttacaccactacagcgtcctcgggcaagtgaggttattcctggaaggtttttggcgccagaagacctctattggcatgacccaacaggatgttctgaaataacagaggatttcgttgcaacgaaaaacagaagtatgttcccaagaaaaatgctgtctgcagcctatccaaacctttatgaattatttactctgacatgcggtgtaccaaaggccccaacaacatcaaattatgttgagatgctgctacggttgtcaaccattgcattgccttcacaggcaggaaaccatgtcttttgtgtatttgtgagatgggccaagtgtatgcattctgaaagtgacaagatgaatgatatattgtacttgaaagaatcccttcagaaattagaaacaacaatattgcccacctcagccgataaatgggtctctctacatccttcttttggccttgtttgctgggtagatgatgatgagctaaagcaacagtttgttaactctaatgatgtttacttcatacaatttggcgacctttcttctgaggataagcaaatgttgtatggaagagttgctgctttaatgaaaagcttaggcatccaagcactttcaaaggttgtgtatcgtgaagcaatattttatggtacatcagagaacagagaaaaggtttccttgatttgttggctgttgccatacatgcaacgttacatctataagatgcatagagatacttatatcaacttccagaaaaacgacatcatgaagattagcaacctgcaagtagtagttgttgacaagttattccacaagtatgtactgaggggactcgagagttcttctaagaaaagattccaatgtcattgtcttttgcagggagatactctatatgcaacacaagaggctgactcacattcagtatttttggagctttctagaattttctttgatggatcccatgatcttcattttgcaaattttctacacatgatcaaaaccatggccgaatctggcactcatgctgagcaaatagagacttttatcgttaataatcagaatgtgcctgagttacctgagcatgaagctatctggtccttctcttccttgtctgcagccaaacatggttcagcgaaccaaggtggtgctgatacccagggggttgatttccaacctgtccatgaatttagtattcccaatcatcagaaggcacaggtgatggtttctagttggcctctaaactattggagaacagcacccgtcttcagaacacctctcataaaccagcatgcaagcatgcaagaggcaaaggtgaatgatgctggaccttcatcaaacttaaacatgcctgctatgtatggacacaccgaagatagtttgctttctgctgatcttgaaagggattggattatagaagagaatccaagaactgaaactacattgtttggagatagttcatcggaaatccttgatgagcctcagatggtgatgtctgctgaacctttccatgcacctgcttatttgaacttggaggctggaaattcaagcccaacggttcatgtcgagctaacaaattccgatgagaaactggccaatcttgcagaagacaagaatcagcgactttcagatgcaaaccagttaagaacagggaggcttggtgaagaactggtcgagaaatatttggccaaacagctaggttccaacaatgttaggtgggtgaacaacagaattgaaaccggactgccttatgatattgttataacacacccagagggtttcacagagtatgtggaggttaaaacaactgtatcttcaagaaaagattggtttgacgtctcagcaagggaatggcagtttgccttggagaaaggggattcatttagcattgctcgtgtcatcttaggtacaaagaaagcaagtatagaaatgttgaaaaacccacacaagctttgtaagcagaaagcattgcggcttgctctcctgatatccagatcggcagcaacctagactaaaatgtcggttttgttgaggctagcaccgatcatccttctgcagattgttatgattactctgactaataatcaacatgaactggagtgagcatctgcatcttgataggtatttgctgatccaagttagcagattcttctttttggagagagatggggtaccgggtacggcatgagtgcaagacaacatacagttgagccgctctatagtaggctcctctttctattattctaactcgggtaatcttctccaatggcggctctctaccatgtctcttgttacatacaacttacgctctgcctttgtaacccattctggtattttgttgcataatgtatgtgattttgtcattagatttgtttttcaatttctgccctagacatcgtcccataggttgattgtgtaactaaacatgaaactgtacataaatggatggaatttgattttaccatgtacatgaaatttgattttgcgtgcggcggctgcctggtctgtgcgttctggtctctgtgcgcagggcgcggcatctgcccggcagcctgctcgccggctgctcggtgagaaaattggctagttgggtactggttttttttttcaattgataaaaaaacaggatctgatggagccttttcatttttgttttactttccgtctcttttatcagcagttgaaaggcgatcacttattctcaatttggtggaatc

SEQ ID NO: 218553 - DNA, 670 bp, Zea Mays
accccagaagaatccttggccccgcgcccccagacacgcaccgcacagccacacgcgtacacccgtacaccgtacgcagccatggcatcagtaggcttcggcacggtcgcgccggccgtggcatcatcgccggcggccaggacgacgagcatgggccgcccctctgcggcgcacgtccctgcggcgacgaccaagttcgtcgcggcggcggcgggtaagcgggtggaggagaagggcctgttcgacaccatcttcggcgcgctgtacaaggaggagcagctgctggagacggaccccgtcctgaacaaggtggggagcaagggcaaggccgccgccgccccggcgcccaagaaagccgctgaagagggcggcaacggcgggctcagcctcggcgggttcttctccaggcccaagaaaggttgatctcgccctgtgttctgcaagcacacaccccagccagcatcagtggttcactgctggctgttgatcatcatcatcatcactagtaaatgtagcagttgtgtgtctatgtataaatgtactgaagctcgtgtagaaataaaaaaaaaatgggaaacaacatcgcctagaaggatcccgtggccttcagctgcttcaccagcacgtgtggccgatctatcttgctgtaaaaaaggaaataaaaaatgaa

SEQ ID NO: 218554 - DNA, 2880 bp, Zea Mays
ctttctctctctgcgcctgcgcctttctcttctccttctccttctccctcctctcaaccccaacaatctctgtctccccatctcctctcaacaaggcggcctcaacaaagtcccaccgcacctttctttaatggagcgagggtgagcctaacaaacactcgacacacaggaggaggtgctgcccgcttctcccctccctcagtctcactcgctccgctctcctccccgagaccaggaggccaagccaagaaccgcaaaccctcaggccgtggccatggcgcaaggacgggacccggaggagctcttcgaggagctgtggcgcgcctgcgcggggccgctcgtggagttgccccagaccaacgaaagggtcttctacttcctccagggtcacctagaacagctgcaagagccgacggacccggcgctgctggctgagcagatcaagatgttccaggtgcccaacaagatcctctgcaaggtcgtcaacgtcgagctcaaggccgagacagaaacggacgagatgtacgcccagatcactctgcagccggaaccagatcaagtggatctaccccaattacctgaaccgcccctgcaggagacgtcaaggcccgtggtgcactccttctgcaagatcctcacaccatccgacaccagtactcatggcggtttctccgttcttcggcgtcatgcaaacgaatgcctcccagcactggatatgtcgatgccgaccccgacccaagagctcatcacaaaggacctacatggatctgaatggaggttcaagcacatatacaggggccaaccccgtcggcaccttctgactactggatggagcacgtttgtcacatcaaagaagctgattgctggtgacgcgtttgtctacctgaggagcgagaccggacagcagcgtgtgggagtgaggcgcctcgtgcagaagcaaagcacaatgccagcatctgttatatcaagccaaagcatgcatcttggggtgcttgcaagtgcatcacacgctattaggactcattccattttcctagtgtattatagaccaaggttaagccaaagccaatacatcgtcaggctgaacaagtacctggaatctagtaaaattggattcgatgtgggcatgaggtttaagatgagttttgaaggggatgacgtccctataaagaagttttctggaacagttgtcgataaaggagatctttctccacaatggcaaggttctgaatggaagacattgaaggtcaaatgggacgaagccacaaacttaaatggccctgagagggtttcctcctgggaaattgaaccattcgatgcatccgcacctgccatcaccatgcccgtgcaaccatcaatgaaaaacaaaaggcctagggagacagctgaaggcctggatattcatgcactggaacctgctcaagaattctggctctctggaaggcctgaacagcatgagaagacaagcgtaagctccagcgaacccaaacatcaagtcgcttggacaagtgaacgcgcaggatacagtgccatgagcagttcaatctgtcagaattctgcagtaactgggagctggttcaagggcttcaattcctccggctcacacccttccctgccagagatctcccagaaactgtttcaggtcaccagcaacgacgcgagggttcctccttggcctgggctctccgcttatcatgctgacgagccctcttccaagctgtcctgcaacactgctctgtgcagctaccagaccgaggaggtggctccaagattttccaatgccgtcgaagaggaaaagaaggagcccggcatgttccgtctgtttggcgtcaatttgattaaccatgctaggagtagtgctaccgctgacaagacgagtgtgggagcaggggaaacatcggcgcgagctgctggttcttttgaagactctgctcagctatcaagagtgacgaaggatcatacgcacatggtgaacggaagcccccgagaaatccaaagccaccagagttgcagtggaaggagtcgtatcaagagctgtggatttgggaaatctggatgggtacgagcagctgatgggtgaggttggagagatgtttgagatcaaagaccttggctccaaagagaaagaggaatggaaggttactttcattaacgacgagaatgagacaatggaagtcggagctgttccttggcaggagttttgccagatggtgaggaagatcgtgatccattccattggagacaggggccatatggaggcttgcccttgcctggggcaggatgggaagagggactattagaagaagggatttttttttttggctggggcagtcaggagatgggtgctgctgaaacatgatggcgtagcttgtcgatgacaaagaaggcaacagattggttgctggcgtcagttcttccttgagaaaaaaattcagtggaaggaagaagtgatgtaacataggatttgcagaaaagatttgataatgcgtcttttagaagtttggtttggtttaaagatgacaagttaatgtgtgtctagtgatctgcctaaagccttagcgacgggcaacaagcaataacaaggatggatgatgaccttaccttgggtatgttagctgtgtaaatattatgtatgtatgtatgggacattaaattggttggcatacttgactcctgatttatattgtacgtagtgtgttgcagtgctctggattcagttgtgatgtgctactattacaagtagtagaaggaatctggtttttagtccaagaatcaacatcaatatgtcaatcacaggcacactagtgtgtaattttagatctttttctgacatccatacctctctcctgttttgttagagtgtttttggttgcgggacag

SEQ ID NO: 218555 - DNA, 2814 bp, Zea Mays
ctttctctctctgcgcctgcgcctttctcttctccttctccttctccctcctctcaaccccaacaatctctgtctccccatctcctctcaacaaggcggcctcaacaaagtcccaccgcacctttctttaatggagcgagggtgagcctaacaaacactcgacacacaggaggaggtgctgcccgcttctcccctccctcagtctcactcgctccgctctcctccccgagaccaggaggccaagccaagaaccgcaaaccctcaggccgtggccatggcgcaaggacgggacccggaggagctcttcgaggagctgtggcgcgcctgcgcggggccgctcgtggagttgccccagaccaacgaaagggtcttctacttcctccagggtcacctagaacagctgcaagagccgacggacccggcgctgctggctgagcagatcaagatgttccaggtgcccaacaagatcctctgcaaggtcgtcaacgtcgagctcaaggccgagacagaaacggacgagatgtacgcccagatcactctgcagccggaaccagatcaagtggatctaccccaattacctgaaccgcccctgcaggagacgtcaaggcccgtggtgcactccttctgcaagatcctcacaccatccgacaccagtactcatggcggtttctccgttcttcggcgtcatgcaaacgaatgcctcccagcactggatatgtcgatgccgaccccgacccaagagctcatcacaaaggacctacatggatctgaatggaggttcaagcacatatacaggggccaaccccgtcggcaccttctgactactggatggagcacgtttgtcacatcaaagaagctgattgctggtgacgcgtttgtctacctgaggagcgagaccggacagcagcgtgtgggagtgaggcgcctcgtgcagaagcaaagcacaatgccagcatctgttatatcaagccaaagcatgcatcttggggtgcttgcaagtgcatcacacgctattaggactcattccattttcctagtgtattatagaccaaggttaagccaaagccaatacatcgtcaggctgaacaagtacctggaatctagtaaaattggattcgatgtgggcatgaggtttaagatgagttttgaaggggatgacgtccctataaagaattgtcgataaaggagatctttctccacaatggcaaggttctgaatggaagacattgaaggtcaaatgggacgaagccacaaacttaaatggccctgagagggtttcctcctgggaaattgaaccattcgatgcatccgcacctgccatcaccatgcccgtgcaaccatcaatgaaaaacaaaaggcctagggagacagctgaaggcctggatattcatgcactggaacctgctcaagaattctggctctctggaaggcctgaacagcatgagaagacaagcgtaagctccagcgaacccaaacatcaagtcgcttggacaagtgaacgcgcaggatacagtgccatgagcagttcaatctgtcagaattctgcagtaactgggagctggttcaagggcttcaattcctccggctcacacccttccctgccagagatctcccagaaactgtttcaggtcaccagcaacgacgcgagggttcctccttggcctgggctctccgcttatcatgctgacgagccctcttccaagctgtcctgcaacactgctctgtgcagctaccagaccgaggaggtggctccaagattttccaatgccgtcgaagaggaaaagaaggagcccggggaaacatcggcgcgagctgctggttcttttgaagactctgctcagctatcaagagtgacgaaggatcatacgcacatggtgaacggaagcccccgagaaatccaaagccaccagagttgcagtggaaggagtcgtatcaaggttcaaatgcatggaaatgacgtgtgcagagctgtggatttgggaaatctggatgggtacgagcagctgatgggtgaggttggagagatgtttgagatcaaagaccttggctccaaagagaaagaggaatggaaggttactttcattaacgacgagaatgagacaatggaagtcggagctgttccttggcaggagttttgccagatggtgaggaagatcgtgatccattccattggagacaggggccatatggaggcttgcccttgcctggggcaggatgggaagagggactattagaagaagggatttttttttttggctggggcagtcaggagatgggtgctgctgaaacatgatggcgtagcttgtcgatgacaaagaaggcaacagattggttgctggcgtcagttcttccttgagaaaaaaattcagtggaaggaagaagtgatgtaacataggatttgcagaaaagatttgataatgcgtcttttagaagtttggtttggtttaaagatgacaagttaatgtgtgtctagtgatctgcctaaagccttagcgacgggcaacaagcaataacaaggatggatgatgaccttaccttgggtatgttagctgtgtaaatattatgtatgtatgtatgggacattaaattggttggcatacttgactcctgatttatattgtacgtagtgtgttgcagtgctctggattcagttgtgatgtgctactattacaagtagtagaaggaatctggtttttagtccaagaatcaacatcaatatgtcaatcacaggcacactagtgtgtaattttagatctttttctgacatccatacctctctcctgttttgttagagtgtttttggttgcgggacag

SEQ ID NO: 218556 - DNA, 2901 bp, Zea Mays
gtttccttctctttccgcttccgccgaggccactctctttctctctctgcgcctgcgcctttctcttctccttctccttctccctcctctcaaccccaacaatctctgtctccccatctcctctcaacaaggcggcctcaacaaagtcccaccgcacctttctttaatggagcgagggtgagcctaacaaacactcgacacacaggaggaggtgctgcccgcttctcccctccctcagtctcactcgctccgctctcctccccgagaccaggaggccaagccaagaaccgcaaaccctcaggccgtggccatggcgcaaggagcaggacgggacccggaggagctcttcgaggagctgtggcgcgcctgcgcggggccgctcgtggagttgccccagaccaacgaaagggtcttctacttcctccagggtcacctagaacagctgcaagagccgacggacccggcgctgctggctgagcagatcaagatgttccaggtgcccaacaagatcctctgcaaggccgagacagaaacggacgagatgtacgcccagatcactctgcagccggaaccagatcaagtggatctaccccaattacctgaaccgcccctgcaggagacgtcaaggcccgtggtgcactccttctgcaagatcctcacaccatccgacaccagtactcatggcggtttctccgttcttcggcgtcatgcaaacgaatgcctcccagcactggatatgtcgatgccgaccccgacccaagagctcatcacaaaggacctacatggatctgaatggaggttcaagcacatatacaggggccaaccccgtcggcaccttctgactactggatggagcacgtttgtcacatcaaagaagctgattgctggtgacgcgtttgtctacctgaggagcgagaccggacagcagcgtgtgggagtgaggcgcctcgtgcagaagcaaagcacaatgccagcatctgttatatcaagccaaagcatgcatcttggggtgcttgcaagtgcatcacacgctattaggactcattccattttcctagtgtattatagaccaaggttaagccaaagccaatacatcgtcaggctgaacaagtacctggaatctagtaaaattggattcgatgtgggcatgaggtttaagatgagttttgaaggggatgacgtccctataaagaagttttctggaacagttgtcgataaaggagatctttctccacaatggcaaggttctgaatggaagacattgaaggtcaaatgggacgaagccacaaacttaaatggccctgagagggtttcctcctgggaaattgaaccattcgatgcatccgcacctgccatcaccatgcccgtgcaaccatcaatgaaaaacaaaaggcctagggagacagctgaaggcctggatattcatgcactggaacctgctcaagaattctggctctctggaaggcctgaacagcatgagaagacaagcgtaagctccagcgaacccaaacatcaagtcgcttggacaagtgaacgcgcaggatacagtgccatgagcagttcaatctgtcagaattctgcagtaactgggagctggttcaagggcttcaattcctccggctcacacccttccctgccagagatctcccagaaactgtttcaggtcaccagcaacgacgcgagggttcctccttggcctgggctctccgcttatcatgctgacgagccctcttccaagctgtcctgcaacactgctctgtgcagctaccagaccgaggaggtggctccaagattttccaatgccgtcgaagaggaaaagaaggagcccggcatgttccgtctgtttggcgtcaatttgattaaccatgctaggagtagtgctaccgctgacaagacgagtgtgggagcaggggaaacatcggcgcgagctgctggttcttttgaagactctgctcagctatcaagagtgacgaaggatcatacgcacatggtgaacggaagcccccgagaaatccaaagccaccagagttgcagtggaaggagtcgtatcaagagctgtggatttgggaaatctggatgggtacgagcagctgatgggtgaggttggagagatgtttgagatcaaagaccttggctccaaagagaaagaggaatggaaggttactttcattaacgacgagaatgagacaatggaagtcggagctgttccttggcaggagttttgccagatggtgaggaagatcgtgatccattccattggagacaggggccatatggaggcttgcccttgcctggggcaggatgggaagagggactattagaagaagggatttttttttttggctggggcagtcaggagatgggtgctgctgaaacatgatggcgtagcttgtcgatgacaaagaaggcaacagattggttgctggcgtcagttcttccttgagaaaaaaattcagtggaaggaagaagtgatgtaacataggatttgcagaaaagatttgataatgcgtcttttagaagtttggtttggtttaaagatgacaagttaatgtgtgtctagtgatctgcctaaagccttagcgacgggcaacaagcaataacaaggatggatgatgaccttaccttgggtatgttagctgtgtaaatattatgtatgtatgtatgggacattaaattggttggcatacttgactcctgatttatattgtacgtagtgtgttgcagtgctctggattcagttgtgatgtgctactattacaagtagtagaaggaatctggtttttagtccaagaatcaacatcaatatgtcaatcacaggcacactagtgtgtaattttagatctttttctgacatccatacctctctcctgttttgttagagtgtttttggttgcgggacag

SEQ ID NO: 218557 - DNA, 2864 bp, Zea Mays
gtttccttctctttccgcttccgccgaggccactctctttctctctctgcgcctgcgcctttctcttctccttctccttctccctcctctcaaccccaacaatctctgtctccccatctcctctcaacaaggcggcctcaacaaagtcccaccgcacctttctttaatggagcgagggtgagcctaacaaacactcgacacacaggaggaggtgctgcccgcttctcccctccctcagtctcactcgctccgctctcctccccgagaccaggaggccaagccaagaaccgcaaaccctcaggccgtggccatggcgcaaggacgggacccggaggagctcttcgaggagctgtggcgcgcctgcgcggggccgctcgtggagttgccccagaccaacgaaagggtcttctacttcctccagggtcacctagaacagctgcaagagccgacggacccggcgctgctggctgagcagatcaagatgttccaggtgcccaacaagatcctctgcaaggtcgtcaacgtcgagctcaaggccgagacagaaacggacgagatgtacgcccagatcactctgcagccggaaccagatcaagtggatctaccccaattacctgaaccgcccctgcaggagacgtcaaggcccgtggtgcactccttctgcaagatcctcacaccatccgacaccagtactcatggcggtttctccgttcttcggcgtcatgcaaacgaatgcctcccagcactggatatgtcgatgccgaccccgacccaagagctcatcacaaaggacctacatggatctgaatggaggttcaagcacatatacaggggccaaccccgtcggcaccttctgactactggatggagcacgtttgtcacatcaaagaagctgattgctggtgacgcgtttgtctacctgaggagcgagaccggacagcagcgtgtgggagtgaggcgcctcgtgcagaagcaaagcacaatgccagcatctgttatatcaagccaaagcatgcatcttggggtgcttgcaagtgcatcacacgctattaggactcattccattttcctagtgtattatagaccaaggttaagccaaagccaatacatcgtcaggctgaacaagtacctggaatctagtaaaattggattcgatgtgggcatgaggtttaagatgagttttgaaggggatgacgtccctataaagaagttttctggaacagttgtcgataaaggagatctttctccacaatggcaaggttctgaatggaagacattgaaggtcaaatgggacgaagccacaaacttaaatggccctgagagggtttcctcctgggaaattgaaccattcgatgcatccgcacctgccatcaccatgcccgtgcaaccatcaatgaaaaacaaaaggcctagggagacagctgaaggcctggatattcatgcactggaacctgctcaagaattctggctctctggaaggcctgaacagcatgagaagacaagcgtaagctccagcgaacccaaacatcaagtcgcttggacaagtgaacgcgcaggatacagtgccatgagcagttcaatctgtcagaattctgcagtaactgggagctggttcaagggcttcaattcctccggctcacacccttccctgccagagatctcccagaaactgtttcaggtcaccagcaacgacgcgagggttcctccttggcctgggctctccgcttatcatgctgacgagccctcttccaagctgtcctgcaacactgctctgtgcagctaccagaccgaggaggtggctccaagattttccaatgccgtcgaagaggaaaagaaggagcccggggaaacatcggcgcgagctgctggttcttttgaagactctgctcagctatcaagagtgacgaaggatcatacgcacatggtgaacggaagcccccgagaaatccaaagccaccagagttgcagtggaaggagtcgtatcaaggttcaaatgcatggaaatgacgtgtgcagagctgtggatttgggaaatctggatgggtacgagcagctgatgggtgaggttggagagatgtttgagatcaaagaccttggctccaaagagaaagaggaatggaaggttactttcattaacgacgagaatgagacaatggaagtcggagctgttccttggcaggagttttgccagatggtgaggaagatcgtgatccattccattggagacaggggccatatggaggcttgcccttgcctggggcaggatgggaagagggactattagaagaagggatttttttttttggctggggcagtcaggagatgggtgctgctgaaacatgatggcgtagcttgtcgatgacaaagaaggcaacagattggttgctggcgtcagttcttccttgagaaaaaaattcagtggaaggaagaagtgatgtaacataggatttgcagaaaagatttgataatgcgtcttttagaagtttggtttggtttaaagatgacaagttaatgtgtgtctagtgatctgcctaaagccttagcgacgggcaacaagcaataacaaggatggatgatgaccttaccttgggtatgttagctgtgtaaatattatgtatgtatgtatgggacattaaattggttggcatacttgactcctgatttatattgtacgtagtgtgttgcagtgctctggattcagttgtgatgtgctactattacaagtagtagaaggaatctggtttttagtccaagaatcaacatcaatatgtcaatcacaggcacactagtgtgtaattttagatctttttctgacatccatacctctctcctgttttgttagagtgtttttggttgcgggacag

SEQ ID NO: 218558 - DNA, 1167 bp, Zea Mays
cacggacacggagtagtttatatgttgtggagctagccctcgctgctcgtagttgtagctccgggcctccggctgctgccgccgccgccgccacagggagagctagcaaggaggtatataggtatagccgtatagctagctagctgctgctgcgtgaacggggaagaggggagggggctgctgttgcagtgttgcctgttggcctgttgcaggctcagctcgcaagtcgcgtctgcagcagctgctgcctcagggaggggctcattactccctcgttgcgtgctgcagttattgcttgctaccgctagctactgtgtacgttttggccttgccaataagctctaatggagaggatgcagctgcaactgcaagggtccatcgcctcttcgctgtgggcagacaagcagcagcaggcggccagcaccaacgccgcagcggcggcggcgcagatgcccttcctggcgctgctccagggcgcgggcgttgtggtggaggcggagcagcaggaggagcagcaccacgacgggcgcaagcggcaggccttcgcgcgcgccgtctccgaccttgatctgctcgagagctgcgtcacgcaggcggtagctcccgcagcggcggcgtctgcgcccgtggccggcaggaccgagaggcggaggaagcggcagaggccccgcgcgcgcgccgcgccgccgccggagaagcgcaagaagcccgaggaggccgagagccagcgtatgacgcacattgctgtggagcgcaaccggcggcgcctcatgaacgaccacctcgcctcgctccgctccctcatcccttccagctacaccccgcgcatggaggaaggatgcgaggtggcgacggcggacgaggtggcgacggtggtgcaccagatcttcgcctacgccgcgggcgcatgctgctgacgacgacgacgacgacgggcagccggggaggacgggggacggcaagtcaggaccatggtggaggcgggcaggcacgacgatgcatgtacacgacgaacgcgggcgcggaggagaggagaggacgatgatggctggctggccgggcgggcgggccaccagaggaggtcatgcgtacgtagagaggtagagcagcggcagcgagctaggggaccaagcaagcagcggcaggcaggtccagagcagcgcaggg

SEQ ID NO: 218559 - DNA, 3052 bp, Zea Mays
ctcgccatcgcttcctgttcctcttcttccgccgccgccgtacgatcacactagcaccgccagccgcaaggtcccatggacctcgacccggcctatcccccatcagcctgcgccgacgcctggccctttgactcgctcaccacgtccctgctcttctccccgcagctcacgccgataccggccaactcatccttctcctggctcaccccacactcgccgctctggctcttcgaggaccgccacctgctcccgctcgacgcgcccgccgtcttcgaagaggtccagcggccacgctccgggaattctcacacttcaagcaagccagctgaacagatcagtcacagatggcagtttcatctgtccctggacgaagatggcacagacaactccagcttgttcaaggagaagctgacacacgctcttcgctacttcaaggagtccacagatcaacatctgctggtccaagtctgggcaccagtcaagaatggagaccgctatgtgctcactacttcaggacagcctttcgtgcttgaccaccagagcattggcctacttcagtacagggctgtatccatgacctacatgttttcagttgatgcggaaaatgttggagacctgggcctacctgggcgtgtctataagcaaaaggtgcccgagtggacaccgaatgtgcagtactatagcagtggtgagtaccaacgacttaaccatgcgatcagctacaacgtccatggtacagtcgccctgcctgtttttgatccttccgctcactcgtgtatcgctgttgttgaacttataatgacatcaaagaagataaactatgcctgcgaggtcgataaagtctgcaaagcacttgaggcggtaaatcttaaaagcactgaaatacatgaccatccaaatgtccagatatgcaatgaaggccgtcaagctgcgctggtcgaaatactggagatcttgaccgtagtatgtgaagagcacaagcttcctttggcacagacctgggttccttgcaagtatagaagtgtcttggcgcatggtggtggtttaaaaaagagctgcttaagttttgatggaagttgcatgggggaggtctgcatgtcaactagtgatgtggcgtttcatgtgattgatgctcatatgtgggggtttagagatgcctgtgtcgagcatcacctacagaggggacaaggagttcctggaaaggcgtttatctcacacaaaccttgcttttcaaaagatatccgcaagttctgtaagttggcatatccccttgtacactatgctcgcatgtttgggttggctggctgctttgcaatatgcttgcaaagttcttatactggaaatgatgactacatattagagtttttcttgccgcccgattgtagtgacgaagatgaccaaaatgccttactggagtctgtattaactctgatgaagaggtgtcttcggagcctaaaggtagttggtgacagagatttgagtggggtctctcttcaccttagcaatgtgctaaaacttgagaatgaagaattcaagacagatgcacagtttgataactctgatggttccctttgccaatcacctaacggtgatagacatggaggatcccatgagtttgatggtgggaacaagaaggttttggatgtgccagagggacaattgttgactgatgacttctctcaaggcaatggtacttctgctggcagaccaaatggtagcggtgcttctgattcttctgtgcttcacaaaaccaacaaaccccctgaaaggaaacgtgggaaagccgaaaagactatcagtttagaggttcttcagcaatatttttctggaagcttgaagaacgcagctaaaagccttggtgtttgtcctacaactatgaagcgcatttgccggcagcatgggatttctcgttggccatctcgaaaaatcaataaggtcctctccctattcctgttggcccttcattggattctctcaatgtagagaaattaactcaaagtaaagtggcagaactttcaaatatcgctgttgatggtgacagagattctttgcaaaagtcacttggaaatgatggccattttggtatagtcatgccccagcaaggatctacagaccataacaatgacacacagcttgaagctgacaaggcgtctcactcgagaagttcgtctggagaaggcagcataaattcacgcacttcggaaggctcatgccagagaagtccagcgaaccagacatttgtttgcaagccaattgcttcaacattcgcagaacctcaacttaatccagaggagttcaataaagagcctttccaagaaccacaactaccactttccaggatgctcattgaagattctggtagctccaaagatttgaagaatctcttcacttcaacatctgaccaaccatttttggcccctcccaataatttggtgccaatgaagcattcagggtctgtaacgataaaggcgagttttaaagaagatattgtgaggttccgtttctcatgctcaggcagtgttattgtattgaaagaggaggtagcgaaaaggctaaggatggatgttggcacgtttgatatcaagtatctagatgatgaccatgaatgggtaaagttgacgtgtaattcagacttggaagaatgcatggagatctcacggctttcgggtagccatgtcatcaggttatctgttagcgatattgcgacacactttggcagttcttgtggaagctccggttgatatgcctgtcagccttttgctctgatcaatgggtactcgaaagtgcttgtaccatgagttcagttccacttgaagagttgtacttttgttgctagttagcattactgcattagcgggagcattagttgcttcattgtgtttgataaatgtatcattgtatttttccgcaaaatgcatgtaattgtgcagaatgcacttgtagtcaactttgtatatgttatgtgcaagaaattctatttcaagttataaactagataattgttgtctagagtttgcacagtatattgcattggaaatgaagcagattttcc

SEQ ID NO: 218560 - DNA, 2929 bp, Zea Mays
ccactaccttcccgacgggccgcattggattcctcccgtcctcctcccgtctcgccatcgcttcctgttcctcttcttccgccgccgccgtacgatcacactagcaccgccagccgcaaggtcccatggacctcgacccggcctatcccccatcagcctgcgccgacgcctggccctttgactcgctcaccacgtccctgctcttctccccgcagctcacgccgataccggccaactcatccttctcctggctcaccccacactcgccgctctggctcttcgaggaccgccacctgctcccgctcgacgcgcccgccgtcttcgaagaggtccagcggccacgctccgggaattctcacacttcaagcaagccagctgaacagatcagtcacagatggcagtttcatctgtccctggacgaagatggcacagacaactccagcttgttcaaggagaagctgacacacgctcttcgctacttcaaggagtccacagatcaacatctgctggtccaagtctgggcaccagtcaagaatggagaccgctatgtgctcactacttcaggacagcctttcgtgcttgaccaccagagcattggcctacttcagtacagggctgtatccatgacctacatgttttcagttgatgcggaaaatgttggagacctgggcctacctgggcgtgtctataagcaaaaggtgcccgagtggacaccgaatgtgcagtactatagcagtgataaactatgcctgcgaggtcgataaagtctgcaaagcacttgaggcggtaaatcttaaaagcactgaaatacatgaccatccaaatgtccagatatgcaatgaaggccgtcaagctgcgctggtcgaaatactggagatcttgaccgtagtatgtgaagagcacaagcttcctttggcacagacctgggttccttgcaagtatagaagtgtcttggcgcatggtggtggtttaaaaaagagctgcttaagttttgatggaagttgcatgggggaggtctgcatgtcaactagtgatgtggcgtttcatgtgattgatgctcatatgtgggggtttagagatgcctgtgtcgagcatcacctacagaggggacaaggagttcctggaaaggcgtttatctcacacaaaccttgcttttcaaaagatatccgcaagttctgtaagttggcatatccccttgtacactatgctcgcatgtttgggttggctggctgctttgcaatatgcttgcaaagttcttatactggaaatgatgactacatattagagtttttcttgccgcccgattgtagtgacgaagatgaccaaaatgccttactggagtctgtattaactctgatgaagaggtgtcttcggagcctaaaggtagttggtgacagagatttgagtggggtctctcttcaccttagcaatgtgctaaaacttgagaatgaagaattcaagacagatgcacagtttgataactctgatggttccctttgccaatcacctaacggtgatagacatggaggatcccatgagtttgatggtgggaacaagaaggttttggatgtgccagagggacaattgttgactgatgacttctctcaaggcaatggtacttctgctggcagaccaaatggtagcggtgcttctgattcttctgtgcttcacaaaaccaacaaaccccctgaaaggaaacgtgggaaagccgaaaagactatcagtttagaggttcttcagcaatatttttctggaagcttgaagaacgcagctaaaagccttggtgtttgtcctacaactatgaagcgcatttgccggcagcatgggatttctcgttggccatctcgaaaaatcaataagagaaattaactcaaagtaaagtggcagaactttcaaatatcgctgttgatggtgacagagattctttgcaaaagtcacttggaaatgatggccattttggtatagtcatgccccagcaaggatctacagaccataacaatgacacacagcttgaagctgacaaggcgtctcactcgagaagttcgtctggagaaggcagcataaattcacgcacttcggaaggctcatgccagagaagtccagcgaaccagacatttgtttgcaagccaattgcttcaacattcgcagaacctcaacttaatccagaggagttcaataaagagcctttccaagaaccacaactaccactttccaggatgctcattgaagattctggtagctccaaagatttgaagaatctcttcacttcaacatctgaccaaccatttttggcccctcccaataatttggtgccaatgaagcattcagggtctgtaacgataaaggcgagttttaaagaagatattgtgaggttccgtttctcatgctcaggcagtgttattgtattgaaagaggaggtagcgaaaaggctaaggatggatgttggcacgtttgatatcaagtatctagatgatgaccatgaatgggtaaagttgacgtgtaattcagacttggaagaatgcatggagatctcacggctttcgggtagccatgtcatcaggttatctgttagcgatattgcgacacactttggcagttcttgtggaagctccggttgatatgcctgtcagccttttgctctgatcaatgggtactcgaaagtgcttgtaccatgagttcagttccacttgaagagttgtacttttgttgctagttagcattactgcattagcgggagcattagttgcttcattgtgtttgataaatgtatcattgtatttttccgcaaaatgcatgtaattgtgcagaatgcacttgtagtcaactttgtatatgttatgtgcaagaaattctatttcaagttataaactagataattgttgtctagagtttgcacagtatattgcattggaaatgaagcagattttcc

SEQ ID NO: 218561 - DNA, 1416 bp, Zea Mays
  misc_feature (1416)..(1416): n is a, c, g, or t
gtaaccctagctcgtttgttctggaacaaatccaactcgccgcacgcgactgagatgagcgcgccgccgcacgtttcttacaccgcgctcccgccaccacctcctgctcccactgccacctccttctcgcagctcccgcctctgcccgacgtcgtcggtggatgccgcgtcaaggctggcgctaaaccacctgggcccggcgcaaatccaccagatccattcgcagctcttattgtccctactcttgtgagagtcgcgaggacgagctttccccctcttgagatccgatgtctaatccatttttcaagttttacaatggatatgaatactagagatcgcattagaaaaaggagggatgatgatgatgacgacctcatgcttttaattctccctactctacatctcttgggctatattattggagatagtgaaaaaaacttgcgacatacatcaatgctaactggagaggaaaaggttagggagctacttgaaggccacatcaagaattgtaggacatcatttaggatggaaccttacatctttaaagccttggtcaattatcttagaagcgaagggttggttaaagacactagaatcaaggtcgaggagaagcttggtttctttttatatatgattagtcacaatgcgtcatttgagtatctccaagtattctttggtcacagcaatgatacattccatcgtgtgatcaaacatttctttgacatagttatccctgccctcagcatgcggttcctaaaacctccctccaatcaagtacatgcaaaagttcgcgaagataaccgattttacccttactttaagaattgcctaggttcaatatatggaacccacgttccaatatcaatgtcacctaatcaagctgcaccattcaggaatagaaaagggacacttagtcaaaatgtgatgttcgtttgtgattttgatctcagagtcacttatttgtcagctggatgggaaggatcagcaacagattcaatggttctcagatctgcaatgaccaattctataggaaagttctaactagtagatggtggttatgccaatacagcttcctttcttgcgccttatcgtggggttaggtaccacttgaaagagtttcttggaatgaaaaaagatgcatgatcattgctgaaccaacgatatgggacaacattatcactacatttcttagagctaagaagttccgcaagaagtcttttcctctcaaccactacaaaattctgatgaaggagagaaatttaaaaccatagaagtggaagatgaagatactaatgaaccacaagtagatgcgagaatagaacaagatgaagatatagtaattgttgaaagggttgaacagaggttacctaaaaggtcagatgcaccaattgtcaatcaagagaaggagacaaagan

SEQ ID NO: 218562 - DNA, 1392 bp, Zea Mays
  misc_feature (1392)..(1392): n is a, c, g, or t
gtaaccctagctcgtttgttctggaacaaatccaactcgccgcacgcgactgagatgagcgcgccgccgcacgtttcttacaccgcgctcccgccaccacctcctgctcccactgccacctccttctcgcagctcccgcctctgcccgacgtcgtcggtggatgccgcgtcaaggctggcgctaaaccacctgggcccggcgcaaatccaccagatccattcgcagctcttattgtccctactcttgtgagagtcgcgaggacgagctttccccctcttgagatccgatgtctaatccatttttcaagagatcgcattagaaaaaggagggatgatgatgatgacgacctcatgcttttaattctccctactctacatctcttgggctatattattggagatagtgaaaaaaacttgcgacatacatcaatgctaactggagaggaaaaggttagggagctacttgaaggccacatcaagaattgtaggacatcatttaggatggaaccttacatctttaaagccttggtcaattatcttagaagcgaagggttggttaaagacactagaatcaaggtcgaggagaagcttggtttctttttatatatgattagtcacaatgcgtcatttgagtatctccaagtattctttggtcacagcaatgatacattccatcgtgtgatcaaacatttctttgacatagttatccctgccctcagcatgcggttcctaaaacctccctccaatcaagtacatgcaaaagttcgcgaagataaccgattttacccttactttaagaattgcctaggttcaatatatggaacccacgttccaatatcaatgtcacctaatcaagctgcaccattcaggaatagaaaagggacacttagtcaaaatgtgatgttcgtttgtgattttgatctcagagtcacttatttgtcagctggatgggaaggatcagcaacagattcaatggttctcagatctgcaatgaccaattctataggaaagttctaactagtagatggtggttatgccaatacagcttcctttcttgcgccttatcgtggggttaggtaccacttgaaagagtttcttggaatgaaaaaagatgcatgatcattgctgaaccaacgatatgggacaacattatcactacatttcttagagctaagaagttccgcaagaagtcttttcctctcaaccactacaaaattctgatgaaggagagaaatttaaaaccatagaagtggaagatgaagatactaatgaaccacaagtagatgcgagaatagaacaagatgaagatatagtaattgttgaaagggttgaacagaggttacctaaaaggtcagatgcaccaattgtcaatcaagagaaggagacaaagan

SEQ ID NO: 218563 - DNA, 981 bp, Zea Mays
  misc_feature (981)..(981): n is a, c, g, or t
gtaaccctagctcgtttgttctggaacaaatccaactcgccgcacgcgactgagatgagcgcgccgccgcacgtttcttacaccgcgctcccgccaccacctcctgctcccactgccacctccttctcgcagctcccgcctctgcccgacgtcgtcggtggatgccgcgtcaaggctggcgctaaaccacctgggcccggcgcaaatccaccagatccattcgcagctcttattgtccctactcttgtgagagtcgcgaggacgagctttccccctcttgagatccgatgtctaatccatttttcaagcatgcggttcctaaaacctccctccaatcaagtacatgcaaaagttcgcgaagataaccgattttacccttactttaagaattgcctaggttcaatatatggaacccacgttccaatatcaatgtcacctaatcaagctgcaccattcaggaatagaaaagggacacttagtcaaaatgtgatgttcgtttgtgattttgatctcagagtcacttatttgtcagctggatgggaaggatcagcaacagattcaatggttctcagatctgcaatgaccaattctataggaaagttctaactagtagatggtggttatgccaatacagcttcctttcttgcgccttatcgtggggttaggtaccacttgaaagagtttcttggaatgaaaaaagatgcatgatcattgctgaaccaacgatatgggacaacattatcactacatttcttagagctaagaagttccgcaagaagtcttttcctctcaaccactacaaaattctgatgaaggagagaaatttaaaaccatagaagtggaagatgaagatactaatgaaccacaagtagatgcgagaatagaacaagatgaagatatagtaattgttgaaagggttgaacagaggttacctaaaaggtcagatgcaccaattgtcaatcaagagaaggagacaaagan

SEQ ID NO: 218564 - DNA, 2753 bp, Zea Mays
ccctcctcttcttccccaggaaaaaacacctcgcctgcatacggacgacgcaccaccaagcccctgcccccgcaaccccgctgcaccgcgcccgatctctgtcgtcgacaccgccgcctccggcgaggccctttccgctcttgaggtttccacaggtgtctctcagcctccgcaccctgcctcgtgggtttccccgggctcccctgccccaaaccctaaccctagctcctggcgtggggccgtgcaggttcattccctgctcaatcgggcgccccatttggctccctctgccccccacagacccgtagggttgcatttcaggaatatgatgtccgtgaagaacgaaggagagagcttgaatttcttgagaagggaggcaatcccttggatttcaaacttggccatgtagcttcccttagtgtacagtccacttctgtgacagaacagatagctgaacaaaatgtgataagtgaggccaaaggtagttctgcatttgctacgtcatctcatggagattctgttgaaagcaacgacaagccaggaaattcattgtgccgtgaaggcaatacagccgataatcttacgcttttggatggagatgccagcaacctgggtgtggataaaattgtgaaacatggaactaagagaactaattcagctcaagctgagcagttcctgcactgtgatggtcagaacaatgcaaaagaagaagattctgggttgttccgtcttggtccaaagagccaagcgtatgcacgacgtaggtcaaagcctatcagagaaaatgcatatagtctatctgttatgtacccaccaattcctccattaagttctcagcaaaaagatgtgacaggattaatcccagaaaccaagactgaggataatggtgtttcatccattggtgattcaaaaccgactagtcctaactctaaaaatatggtgacaaatgcatcattactgaatgataaggtggaaatggagacagaaaatgttcaagcaattcctgaaggcaatcaagcaccaaaaaacgagttatcaaacagcaacaatggtagtcctgctatggagatttcaccaaatagtgtgcctgataattctcgtcttactgtaagtgatcagatggctactgcatttgtttctgtggaatccccagatgctatttcaaaagtagctgcttcaaggatagtttgttctctcccatatatatccaatgaaatattgaaagaagcacaaactcttgagaaggcaggtaataacccatctatggtaagtgtggttgacgttcatgcatatggtatggataacaatggtgcagcaccttactctgctgtgaaaagtgctagtttgaatgaaaatgaagttgatccaattcatgcatatgctgccaaagctgttactgaacatccagaccaaaatgagaatcttgtaccagtgaatgcagatgaaatggctgatgaaggcttgaatgagatcctacctgatgacaaggatgacaagaaagattgtcaactggaagttagtagtgggcctgtcattttgaatgacagttctactcctgtctatcctgaatttagcaatttcttttatgcaaaagatggaacagaagtttctaacaatgcagtagattcaaaaaataacgcagaacagcatgcttcttctaatcagggaaaagggaacatggaggaatgtaaagattctgatggaaacaatgcaagtgaatcgagtgttgcccaaaagctagtgtctgttattgtgctccctgcttcagacacaggcgatgtgagtaactttgtagaaaatgatgttgagaaatctagcagagatcaggagaaggtagcaaagaaggaatatgaagattctgtcgtggcaaagaaggatcacgaagatgctatcctcagaagggcacggtatatagaggcaaatattaagagggctggtgaatggtctctctgcaatatttctctagagaagaagcagaagagccactgggattttgttctggaggagatggtctggatggcaaatgacttcacacaggagcgtttgtggaaaaatacagtcgcagcacagatgtcccattggatttcttctagaggtcgagcggcatttgaagaagcaagcattcagagaaagcagaaatctgttgctagagttctagccaatgcaaccgaatgagctagaggaaaataagcttggtggggtcaaaaccagaaaagcggatgaggagtgtttggagcaagaaaagtcccgtcagtctcctattcagagctttgcacttaggcttcttgagtataacattaatgcatctgaatttctgccattagccgaagcaccatcaactcctgacaggctaaatgattttggcattttgaaagtacctgatcaactttcagaagcaaatctcttttatggcgtagcacccggtgcaatgcaggcatacagggagtctatggagcgtctccttatttataataacaagatgccagctggtcattcaggtcctggaagtccatggtcaagttttgaggatcaggctcttgttgtccttgtccatgatatgggtgaaaactgggaattggttagcgatgcccttaacagcatcatccaattgaagtgcatatacagacggcctaatgagtgtaaggaacgccataaacttctcacggataaaagttgtggcgacggtgctgacagcgctgatgactcaggctcatctcaacactatccttctgcattgcctgggattccaaagg

SEQ ID NO: 218565 - DNA, 2895 bp, Zea Mays
ctcctcttcttccccaggaaaaaacacctcgcctgcatacggacgacgcaccaccaagcccctgcccccgcaaccccgctgcaccgcgcccgatctctgtcgtcgacaccgccgcctccggcgaggccctttccgctcttgaggtttccacaggaaacagcgtgtctcttttctggacttgggaatctgagaagatactgtgcagtttaatggcacacactgctgactatatgcgcatataatgatgcatgggctaactgtgcttctctggtctagtggctattgagctgtgctctatgggaggtattgctgaatgtggtgtgagcattgacactaaagcttcaccacgccgtgcagccatagagaaagctcaggaggagctcaggcaggaatatgatgtccgtgaagaacgaaggagagagcttgaatttcttgagaagggaggcaatcccttggatttcaaacttggccatgtagcttcccttagtgtacagtccacttctgtgacagaacagatagctgaacaaaatgtgataagtgaggccaaaggtagttctgcatttgctacgtcatctcatggagattctgttgaaagcaacgacaagccaggaaattcattgtgccgtgaaggcaatacagccgataatcttacgcttttggatggagatgccagcaacctgggtgtggataaaattgtgaaacatggaactaagagaactaattcagctcaagctgagcagttcctgcactgtgatggtcagaacaatgcaaaagaagaagattctgggttgttccgtcttggtccaaagagccaagcgtatgcacgacgtaggtcaaagcctatcagagaaaatgcatatagtctatctgttatgtacccaccaattcctccattaagttctcagcaaaaagatgtgacaggattaatcccagaaaccaagactgaggataatggtgtttcatccattggtgattcaaaaccgactagtcctaactctaaaaatatggtgacaaatgcatcattactgaatgataaggtggaaatggagacagaaaatgttcaagcaattcctgaaggcaatcaagcaccaaaaaacgagttatcaaacagcaacaatggtagtcctgctatggagatttcaccaaatagtgtgcctgataattctcgtcttactgtaagtgatcagatggctactgcatttgtttctgtggaatccccagatgctatttcaaaagtagctgcttcaaggatagtttgttctctcccatatatatccaatgaaatattgaaagaagcacaaactcttgagaaggcaggtaataacccatctatggtaagtgtggttgacgttcatgcatatggtatggataacaatggtgcagcaccttactctgctgtgaaaagtgctagtttgaatgaaaatgaagttgatccaattcatgcatatgctgccaaagctgttactgaacatccagaccaaaatgagaatcttgtaccagtgaatgcagatgaaatggctgatgaaggcttgaatgagatcctacctgatgacaaggatgacaagaaagattgtcaactggaagttagtagtgggcctgtcattttgaatgacagttctactcctgtctatcctgaatttagcaatttcttttatgcaaaagatggaacagaagtttctaacaatgcagtagattcaaaaaataacgcagaacagcatgcttcttctaatcagggaaaagggaacatggaggaatgtaaagattctgatggaaacaatgcaagtgaatcgagtgttgcccaaaagctagtgtctgttattgtgctccctgcttcagacacaggcgatgtgagtaactttgtagaaaatgatgttgagaaatctagcagagatcaggagaaggtagcaaagaaggaatatgaagattctgtcgtggcaaagaaggatcacgaagatgctatcctcagaagggcacggtatatagaggcaaatattaagagggctggtgaatggtctctctgcaatatttctctagagaagaagcagaagagccactgggattttgttctggaggagatggtctggatggcaaatgacttcacacaggagcgtttgtggaaaaatacagtcgcagcacagatgtcccattggatttcttctagaggtcgagcggcatttgaagaagcaagcattcagagaaagcagaaatctgttgctagagttctagccaatggtattatgaacttttggtgttcagtccatactttacgagctagtggtggtattcctaaaccaatgcaaatacagcaaccgaatgagctagaggaaaataagcttggtggggtcaaaaccagaaaagcggatgaggagtgtttggagcaagaaaagtcccgtcagtctcctattcagagctttgcacttaggcttcttgagtataacattaatgcatctgaatttctgccattagccgaagcaccatcaactcctgacaggctaaatgattttggcattttgaaagtacctgatcaactttcagaagcaaatctcttttatggcgtagcacccggtgcaatgcaggcatacagggagtctatggagcgtctccttatttataataacaagatgccagctggtcattcaggtcctggaagtccatggtcaagttttgaggatcaggctcttgttgtccttgtccatgatatgggtgaaaactgggaattggttagcgatgcccttaacagcatcatccaattgaagtgcatatacagacggcctaatgagtgtaaggaacgccataaacttctcacggataaaagttgtggcgacggtgctgacagcgctgatgactcaggctcatctcaacactatccttctgcattgcctgggattccaaagg

SEQ ID NO: 218566 - DNA, 2965 bp, Zea Mays
tcttcttccccaggaaaaaacacctcgcctgcatacggacgacgcaccaccaagcccctgcccccgcaaccccgctgcaccgcgcccgatctctgtcgtcgacaccgccgcctccggcgaggccctttccgctcttgaggtttccacaggttcattccctgctcaatcgggcgccccatttggctccctctgccccccacagacccgtagggttgcatttcaggaaacagcgtgtctcttttctggacttgggaatctgagaagatactgtgcagtttaatggcacacactgctgactatatgcgcatataatgatgcatgggctaactgtgcttctctggtctagtggctattgagctgtgctctatgggaggtattgctgaatgtggtgtgagcattgacactaaagcttcaccacgccgtgcagccatagagaaagctcaggaggagctcaggcaggaatatgatgtccgtgaagaacgaaggagagagcttgaatttcttgagaagggaggcaatcccttggatttcaaacttggccatgtagcttcccttagtgtacagtccacttctgtgacagaacagatagctgaacaaaatgtgataagtgaggccaaaggtagttctgcatttgctacgtcatctcatggagattctgttgaaagcaacgacaagccaggaaattcattgtgccgtgaaggcaatacagccgataatcttacgcttttggatggagatgccagcaacctgggtgtggataaaattgtgaaacatggaactaagagaactaattcagctcaagctgagcagttcctgcactgtgatggtcagaacaatgcaaaagaagaagattctgggttgttccgtcttggtccaaagagccaagcgtatgcacgacgtaggtcaaagcctatcagagaaaatgcatatagtctatctgttatgtacccaccaattcctccattaagttctcagcaaaaagatgtgacaggattaatcccagaaaccaagactgaggataatggtgtttcatccattggtgattcaaaaccgactagtcctaactctaaaaatatggtgacaaatgcatcattactgaatgataaggtggaaatggagacagaaaatgttcaagcaattcctgaaggcaatcaagcaccaaaaaacgagttatcaaacagcaacaatggtagtcctgctatggagatttcaccaaatagtgtgcctgataattctcgtcttactgtaagtgatcagatggctactgcatttgtttctgtggaatccccagatgctatttcaaaagtagctgcttcaaggatagtttgttctctcccatatatatccaatgaaatattgaaagaagcacaaactcttgagaaggcaggtaataacccatctatggtaagtgtggttgacgttcatgcatatggtatggataacaatggtgcagcaccttactctgctgtgaaaagtgctagtttgaatgaaaatgaagttgatccaattcatgcatatgctgccaaagctgttactgaacatccagaccaaaatgagaatcttgtaccagtgaatgcagatgaaatggctgatgaaggcttgaatgagatcctacctgatgacaaggatgacaagaaagattgtcaactggaagttagtagtgggcctgtcattttgaatgacagttctactcctgtctatcctgaatttagcaatttcttttatgcaaaagatggaacagaagtttctaacaatgcagtagattcaaaaaataacgcagaacagcatgcttcttctaatcagggaaaagggaacatggaggaatgtaaagattctgatggaaacaatgcaagtgaatcgagtgttgcccaaaagctagtgtctgttattgtgctccctgcttcagacacaggcgatgtgagtaactttgtagaaaatgatgttgagaaatctagcagagatcaggagaaggtagcaaagaaggaatatgaagattctgtcgtggcaaagaaggatcacgaagatgctatcctcagaagggcacggtatatagaggcaaatattaagagggctggtgaatggtctctctgcaatatttctctagagaagaagcagaagagccactgggattttgttctggaggagatggtctggatggcaaatgacttcacacaggagcgtttgtggaaaaatacagtcgcagcacagatgtcccattggatttcttctagaggtcgagcggcatttgaagaagcaagcattcagagaaagcagaaatctgttgctagagttctagccaatggtattatgaacttttggtgttcagtccatactttacgagctagtggtggtattcctaaaccaatgcaaatacagcaaccgaatgagctagaggaaaataagcttggtggggtcaaaaccagaaaagcggatgaggagtgtttggagcaagaaaagtcccgtcagtctcctattcagagctttgcacttaggcttcttgagtataacattaatgcatctgaatttctgccattagccgaagcaccatcaactcctgacaggctaaatgattttggcattttgaaagtacctgatcaactttcagaagcaaatctcttttatggcgtagcacccggtgcaatgcaggcatacagggagtctatggagcgtctccttatttataataacaagatgccagctggtcattcaggtcctggaagtccatggtcaagttttgaggatcaggctcttgttgtccttgtccatgatatgggtgaaaactgggaattggttagcgatgcccttaacagcatcatccaattgaagtgcatatacagacggcctaatgagtgtaaggaacgccataaacttctcacggataaaagttgtggcgacggtgctgacagcgctgatgactcaggctcatctcaacactatccttctgcattgcctgggattccaaagg

SEQ ID NO: 218567 - DNA, 3027 bp, Zea Mays
ctcgcctgcatacggacgacgcaccaccaagcccctgcccccgcaaccccgctgcaccgcgcccgatctctgtcgtcgacaccgccgcctccggcgaggccctttccgctcttgaggtttccacaggtgtctctcagcctccgcaccctgcctcgtgggtttccccgggctcccctgccccaaaccctaaccctagctcctggcgtggggccgtgcaggttcattccctgctcaatcgggcgccccatttggctccctctgccccccacagacccgtagggttgcatttcagcgtgtctcttttctggacttgggaatctgagaagatactgtgcagtttaatggcacacactgctgactatatgcgcatataatgatgcatgggctaactgtgcttctctggtctagtggctattgagctgtgctctatgggaggtattgctgaatgtggtgtgagcattgacactaaagcttcaccacgccgtgcagccatagagaaagctcaggaggagctcaggcaggaatatgatgtccgtgaagaacgaaggagagagcttgaatttcttgagaagggaggcaatcccttggatttcaaacttggccatgtagcttcccttagtgtacagtccacttctgtgacagaacagatagctgaacaaaatgtgataagtgaggccaaaggtagttctgcatttgctacgtcatctcatggagattctgttgaaagcaacgacaagccaggaaattcattgtgccgtgaaggcaatacagccgataatcttacgcttttggatggagatgccagcaacctgggtgtggataaaattgtgaaacatggaactaagagaactaattcagctcaagctgagcagttcctgcactgtgatggtcagaacaatgcaaaagaagaagattctgggttgttccgtcttggtccaaagagccaagcgtatgcacgacgtaggtcaaagcctatcagagaaaatgcatatagtctatctgttatgtacccaccaattcctccattaagttctcagcaaaaagatgtgacaggattaatcccagaaaccaagactgaggataatggtgtttcatccattggtgattcaaaaccgactagtcctaactctaaaaatatggtgacaaatgcatcattactgaatgataaggtggaaatggagacagaaaatgttcaagcaattcctgaaggcaatcaagcaccaaaaaacgagttatcaaacagcaacaatggtagtcctgctatggagatttcaccaaatagtgtgcctgataattctcgtcttactgtaagtgatcagatggctactgcatttgtttctgtggaatccccagatgctatttcaaaagtagctgcttcaaggatagtttgttctctcccatatatatccaatgaaatattgaaagaagcacaaactcttgagaaggcaggtaataacccatctatggtaagtgtggttgacgttcatgcatatggtatggataacaatggtgcagcaccttactctgctgtgaaaagtgctagtttgaatgaaaatgaagttgatccaattcatgcatatgctgccaaagctgttactgaacatccagaccaaaatgagaatcttgtaccagtgaatgcagatgaaatggctgatgaaggcttgaatgagatcctacctgatgacaaggatgacaagaaagattgtcaactggaagttagtagtgggcctgtcattttgaatgacagttctactcctgtctatcctgaatttagcaatttcttttatgcaaaagatggaacagaagtttctaacaatgcagtagattcaaaaaataacgcagaacagcatgcttcttctaatcagggaaaagggaacatggaggaatgtaaagattctgatggaaacaatgcaagtgaatcgagtgttgcccaaaagctagtgtctgttattgtgctccctgcttcagacacaggcgatgtgagtaactttgtagaaaatgatgttgagaaatctagcagagatcaggagaaggtagcaaagaaggaatatgaagattctgtcgtggcaaagaaggatcacgaagatgctatcctcagaagggcacggtatatagaggcaaatattaagagggctggtgaatggtctctctgcaatatttctctagagaagaagcagaagagccactgggattttgttctggaggagatggtctggatggcaaatgacttcacacaggagcgtttgtggaaaaatacagtcgcagcacagatgtcccattggatttcttctagaggtcgagcggcatttgaagaagcaagcattcagagaaagcagaaatctgttgctagagttctagccaatggtattatgaacttttggtgttcagtccatactttacgagctagtggtggtattcctaaaccaatgcaaatacagcaaccgaatgagctagaggaaaataagcttggtggggtcaaaaccagaaaagcggatgaggagtgtttggagcaagaaaagtcccgtcagtctcctattcagagctttgcacttaggcttcttgagtataacattaatgcatctgaatttctgccattagccgaagcaccatcaactcctgacaggctaaatgattttggcattttgaaagtacctgatcaactttcagaagcaaatctcttttatggcgtagcacccggtgcaatgcaggcatacagggagtctatggagcgtctccttatttataataacaagatgccagctggtcattcaggtcctggaagtccatggtcaagttttgaggatcaggctcttgttgtccttgtccatgatatgggtgaaaactgggaattggttagcgatgcccttaacagcatcatccaattgaagtgcatatacagacggcctaatgagtgtaaggaacgccataaacttctcacggataaaagttgtggcgacggtgctgacagcgctgatgactcaggctcatctcaacactatccttctgcattgcctgggattccaaagg

SEQ ID NO: 218568 - DNA, 3243 bp, Zea Mays
cccacatggaaaaccgaagccaaaacccacgcgaagccacctccccgaattccccaacccgccatgcccgactccgccgatcccctccccacgcaagcctcgccggatccggacatgccgccgcggaagcctacagctggctgcggcggcggcaagctcaagaagcctctcactgacaagcagcgcgctgccgcggagcagcgcctgtcccacctccgcgcccacctcatcctccgatccctcgagtcctcagctgccggggcccgtgccctaccgccggcgcaggaggcggcgctcgatgccctaggtctgctcgagtttttccgcctcgacctgcaatccgacaccctgcgccccgacctcatcgccccgctcgtcgcctactacgacccggtctgcaagcgcagcttcgtccgaggcgtccgtgtcgccgtctcgcgccacaactttacccgcgcgctctgcctaccctcgaagccctccccctcggcgccggccccagccgacatcgaccccgcagccgtggtgcctgccgttatgcagctcctgaaggattacgttctgctcccgttcctaggagacgacatgtgcatactgccgcaggaagtggccgccgcggagcaggcggtcagggagggggcggcgcatagggttgactgggcgggcctgatgtggggcctcgtcgagaaggagatcctcgagctgcctaagagggaagacggggtgtgctactacgggcctcatctgcagaggctcatttatgcccaaaagccacatttgttggagctggtggaggaagggggcacaggagagcctgctccggaggcatccactgatgtggagatggaggaggatggtgatgtggatatgaaaagcaagagcttggtggagctggagctgggggatagggatggggatgccagtaacgacgtgaggagcaagagcttggaggagtcggaattgggaaatgctagtgcaaggagtgatggtttggacgagttggaattgggggtttctgttactaggaacaaggtcatggaggagttgggtttaggggatatggatgacaggaacaacagtatagaggaactagaggtggttgaggaagatgcaaggagcaagaggttggatgaatatgagtctgtggatgtggatccggatgccatggataacaatatagatgaaataaacacagtcaatgaagactcaaggaggaaaagcttgaatgaatctgagactgtggatgtggatccggatgccatggacaacaatatagatgaaatgcaggcggtcaatgaagactcaaggagcaagagcttgaatgaatctgaggatgtggatgtggatccgcatgccatggacaacaatatagatgaaatggagatggtcaatgaagatgcaaggaccaagagcttggatgaatctgaggctgtggatgtggatccggatgccatggacaacaatatagatgaaatggaggcagtcagtgaagattcaaggagcaagaccttcaatgagtctgagtctgtggatgccatgaacaacaatatagtcgaattggatgcggtcaatgaagacacaaggagccagagattgaatgatgaatcagagttggtggaagaggatgttaagggtccaaacttagatgacaagaacactgcggatgagcatgtcaatggcacaaacattgatggaatatgtttgggatttgtggcagttgaagtggtgcctgctgtacatgaggcaaggcttgacaataatgaggaaacagcagaggtagcaccaatggggggcgatgatgtgccagtgcctacagatgtggatggtgaagaacccttggtggaggcagcagctgtaacacaggaggtagtggctgttgcagaggaattgggggatgatgaggctgaggaggatgaagagaaggatgcaatgggattgagcttggggtttgactctaccaatggttatgttgctatggatgtggaagaggaaactaatgttgagaatctggacgaggatgagagtgacagtgccaatgaagaggcagaggagtcagaggatgatgcatttgaggttaatgatggagaggacatgaattggagaattggggatggcaggggggatgagggaatgtcacattctttgcaacgctgtaacacatttggaggcatggagtttgagaacctgaatgaaggggagactgtaatgaaggatgagttgaggtttgatgatttccctgcgagggcatcttcagaaaggatgacaccatcaaacctcctccaagccatgaactcaattccctcaacgtacaatgtagcagggaatgtgcatgatctgccttctggggatttcttggctatgggggctgatgcacataagaatggagtggatctgggaccagggagctcatatttatttgggaataatggtaagaggaatattgatgatattgatggttacgatgacaatatgcaggcgcaagaggactttcctcagtctaatcagcagaagaggatgcgccatagtaacagtggcaacatatcacctggatcaggctttttcaacgcaagcttttcggtacctatacagaacttgatggttgaggcaagcaggctctatgagcagaaggagcaaaaacttcagagtttgcaatttgagaaacaacattggtctgacatgctgcaagagaaggaagccattatccaatccctaaactcagctcggtttgagcaacagaacaagtatcaagtggagcttagacgcttcgagcatgatctgaatgttatggcccatttggtaactacctacaaaagagctttaaaacagacccgggcttcttttgatgagtacaggaagaagttcccttgcaatgttcctctttatgatgatgttgctggtggtggtggtcttgttcttagtgtgagggagttggagaagaggcggtgtgaggaggagcagcaaaaaattgccatggtaaatgatatgatcgaaagattccagtacaaatggttctcaaaagcttgaagagtggggactgtctgtcaactcactgtggagcagaatggaaggactctataaggagattgagcttctgaaggaaaatagaagatcaagatttgctaccccagctacagaggaatctctagctacagaagaacctaccccagctacagaggaatgagttccctgacagtcagagatacaatcggccgtaaatgaggaccggatgagttttcaggagat

SEQ ID NO: 218569 - DNA, 3229 bp, Zea Mays
ggaaaaccgaagccaaaacccacgcgaagccacctccccgaattccccaacccgccatgcccgactccgccgatcccctccccacgcaagcctcgccggatccggacatgccgccgcggaagcctacagctggctgcggcggcggcaagctcaagaagcctctcactgacaagcagcgcgctgccgcggagcagcgcctgtcccacctccgcgcccacctcatcctccgatccctcgagtcctcagctgccggggcccgtgccctaccgccggcgcaggaggcggcgctcgatgccctaggtctgctcgagtttttccgcctcgacctgcaatccgacaccctgcgccccgacctcatcgccccgctcgtcgcctactacgacccggtctgcaagcgcagcttcgtccgaggcgtccgtgtcgccgtctcgcgccacaactttacccgcgcgctctgcctaccctcgaagccctccccctcggcgccggccccagccgacatcgaccccgcagccgtggtgcctgccgttatgcagctcctgaaggattacgttctgctcccgttcctaggagacgacatgtgcatactgccgcaggaagtggccgccgcggagcaggcggtcagggagggggcggcgcatagggttgactgggcgggcctgatgtggggcctcgtcgagaaggagatcctcgagctgcctaagagggaagacggggtgtgctactacgggcctcatctgcagaggctcatttatgcccaaaagccacatttgttggagctggtggaggaagggggcacaggagagcctgctccggaggcatccactgatgtggagatggaggaggatggtgatgtggatatgaaaagcaagagcttggtggagctggagctgggggatagggatggggatgccagtaacgacgtgaggagcaagagcttggaggagtcggaattgggaaatgctagtgcaaggagtgatggtttggacgagttggaattgggggtttctgttactaggaacaaggtcatggaggagttgggtttaggggatatggatgacaggaacaacagtatagaggaactagaggtggttgaggaagatgcaaggagcaagaggttggatgaatatgagtctgtggatgtggatccggatgccatggataacaatatagatgaaataaacacagtcaatgaagactcaaggaggaaaagcttgaatgaatctgagactgtggatgtggatccggatgccatggacaacaatatagatgaaatgcaggcggtcaatgaagactcaaggagcaagagcttgaatgaatctgaggatgtggatgtggatccgcatgccatggacaacaatatagatgaaatggagatggtcaatgaagatgcaaggaccaagagcttggatgaatctgaggctgtggatgtggatccggatgccatggacaacaatatagatgaaatggaggcagtcagtgaagattcaaggagcaagaccttcaatgagtctgagtctgtggatgccatgaacaacaatatagtcgaattggatgcggtcaatgaagacacaaggagccagagattgaatgatgaatcagagttggtggaagaggatgttaagggtccaaacttagatgacaagaacactgcggatgagcatgtcaatggcacaaacattgatggaatatgtttgggatttgtggcagttgaagtggtgcctgctgtacatgaggcaaggcttgacaataatgaggaaacagcagaggtagcaccaatggggggcgatgatgtgccagtgcctacagatgtggatggtgaagaacccttggtggaggcagcagctgtaacacaggaggtagtggctgttgcagaggaattgggggatgatgaggctgaggaggatgaagagaaggatgcaatgggattgagcttggggtttgactctaccaatggttatgttgctatggatgtggaagaggaaactaatgttgagaatctggacgaggatgagagtgacagtgccaatgaagaggcagaggagtcagaggatgatgcatttgaggttaatgatggagaggacatgaattggagaattggggatggcaggggggatgagggaatgtcacattctttgcaacgctgtaacacatttggaggcatggagtttgagaacctgaatgaaggggagactgtaatgaaggatgagttgaggtttgatgatttccctgcgagggcatcttcagaaaggatgacaccatcaaacctcctccaagccatgaactcaattccctcaacgtacaatgtagcagggaatgtgcatgatctgccttctggggatttcttggctatgggggctgatgcacataagaatggagtggatctgggaccagggagctcatatttatttgggaataatggtaagaggaatattgatgatattgatggttacgatgacaatatgcaggcgcaagaggactttcctcagtctaatcagcagaagaggatgcgccatagtaacagtggcaacatatcacctggatcaggctttttcaacgcaagcttttcggtacctatacagaacttgatggttgaggcaagcaggctctatgagcagaaggagcaaaaacttcagagtttgcaatttgagaaacaacattggtctgacatgctgcaagagaaggaagccattatccaatccctaaactcagctcggtttgagcaacagaacaagtatcaagtggagcttagacgcttcgagcatgatctgaatgttatggcccatttggtaactacctacaaaagagctttaaaacagacccgggcttcttttgatgagtacaggaagaagttcccttgcaatgttcctctttatgatgatgttgctggtggtggtggtcttgttcttagtgtgagggagttggagaagaggcggtgtgaggaggagcagcaaaaaattgccatggtaaatgatatgatcgaaagattccagtacaaatggttctcaaaagcttgaagagtggggactgtctgtcaactcactgtggagcagaatggaaggactctataaggagattgagcttctgaaggaaaatagaagatcaagatttgctaccccagctacagaggaatctctagctacagaagaacctaccccagctacagaggaatgagttccctgacagtcagagcccaatttctgagagggattcctaaagctttagataa

SEQ ID NO: 218570 - DNA, 2278 bp, Zea Mays
ctcccatgtcttggcgtctcccggcgccgggcgcgacgctcacgccaatgactatttatccgccctccttgcgatcggacagccaggcagcgacgacgaccgcgaccggtgggcggcggaggcaagctggtttgacaggtctcaagctagagcacaggtggtttcatcagctcacacacagagaacaggatcaggatcaggacagatgggagccgagaacggtagcaacaacccttcgtcgaccgtcttggatggcctctacggggtgcagctcggccgtccatcggatccggcacagaccgacggtggggcgtcgtcgtcaccagcagcttgtgaacaccaccacaagcgtggccgtggtggtacagcacaggcacagcagaggttgcagatccgaaggctatggcagcacagaccgtcttgcttcaagcccatccactgcaccattacgtgtgacaagcatgctggcgagactgtcgcgaacgtcgtcacctcgctgcccttcatcgttcttggactgcaggctccaaggaagaacctgaacgccgctatctacgccaactccctggtcgggatgggagtagcgtcgagcctgtaccattcttccagaggaggaatccggaggctcctgcgttgggccgactacactatgattgccaccacaactctgtgtttgtcgagagcagtaggcaacgagaacccaagattgctcatggccgcttcagcgttgctcctgccgtttcagccactggtggtttcggctgtccacactggactcatggaggtttcatttgcgagaagagcgtcgatggaaccggagctcaggatggcgcataacctgcacaaggtgtcgtctctgctgggaggtgcgctgttcatcgccgacgactgcttcccggagactccctatatccacgccgcgtggcatcttgctgctgccatcggcgttggcacgtgcaacaagcttcttgaatgacaacagcccggcctccactcatgctgatatcaatgagcagttgatttcagcacctatcacgacctacgctacgtagaatgcacacagtatagcagcttgtcgacatttataacagaaaacaccatatgtctattatttgatagcctaggctgaactccttcgtctgacacatggtgtgggagggagtaacgtttgagaccatcttacaggcaatctgaaggtggtgaagatttgttaaagactgatccatttgcatctatgtcagtgcactgaggaaaattgtcaagacatcaacacccgatgaccaagtatttgcagttctacttcaagtatggtgtggatacagtttgcacattcttcatataaaggattttggcttttgagtcacggatcaaccacttgggcctgtgttaccaacatgtaggactcattctgattcacccagcttcttcgtgttaagtaaccctagttaaggttatgtgggcaaataccgactttgcccctgaggggtctcatatctctatataaggaacctgtacaccccttcataatacagagaagagaaagaggccagaggcccaaccctatatccagtgtctcgtgtgtttcctctgtcgtgtttatgggaagggagacgggttctctacatcttctcgcgcctaatctgctgacgggagggaaggaagcggatctggtgatccgtggtaacgtagttctcaatacgttatcagcacgctctacctcgatcttgccgcgggatcagatctgcatcaactctccgtcaagctggcaggtccctggcctcgccaaactgtcctacgcgacaggcttcgatttaccatctacgcaatcacacggtaccatatattgttgttaatgtgttcgtctgaaaaaagcgaatcagtggtcgaatccatattgccaatcacgaacacacacgattggtctgtatcgcgtgatgctggtatgcataacgcacaggaacgtcgcgccgcgccgcgccggaggtcgcactcgtgcctgaagtcgcgcctgtgcgtgccagctcgcgtcgtcagccgcacccatgtcgaaggacacgcgcacgcgcctgaagccgtgcccgcgtcgaggccacatcgtagccgaaggcacgcccgcgccatgccggagcctcgccggcccgagggatcgaacatgacggtcggtctctacgcaggggcacgaggatgcatgccaggctaccaacacgcgacccccactctctccctcgcacggataaaaggggaactcggttagagtggtgccgataattgcgaacgg

SEQ ID NO: 218571 - DNA, 2270 bp, Zea Mays
ctcccatgtcttggcgtctcccggcgccgggcgcgacgctcacgccaatgactatttatccgccctccttgcgatcggacagccaggcagcgacgacgaccgcgaccggtgggcggcggaggcaagctgggtctcaagctagagcacaggtggtttcatcagctcacacacagagaacaggatcaggatcaggacagatgggagccgagaacggtagcaacaacccttcgtcgaccgtcttggatggcctctacggggtgcagctcggccgtccatcggatccggcacagaccgacggtggggcgtcgtcgtcaccagcagcttgtgaacaccaccacaagcgtggccgtggtggtacagcacaggcacagcagaggttgcagatccgaaggctatggcagcacagaccgtcttgcttcaagcccatccactgcaccattacgtgtgacaagcatgctggcgagactgtcgcgaacgtcgtcacctcgctgcccttcatcgttcttggactgcaggctccaaggaagaacctgaacgccgctatctacgccaactccctggtcgggatgggagtagcgtcgagcctgtaccattcttccagaggaggaatccggaggctcctgcgttgggccgactacactatgattgccaccacaactctgtgtttgtcgagagcagtaggcaacgagaacccaagattgctcatggccgcttcagcgttgctcctgccgtttcagccactggtggtttcggctgtccacactggactcatggaggtttcatttgcgagaagagcgtcgatggaaccggagctcaggatggcgcataacctgcacaaggtgtcgtctctgctgggaggtgcgctgttcatcgccgacgactgcttcccggagactccctatatccacgccgcgtggcatcttgctgctgccatcggcgttggcacgtgcaacaagcttcttgaatgacaacagcccggcctccactcatgctgatatcaatgagcagttgatttcagcacctatcacgacctacgctacgtagaatgcacacagtatagcagcttgtcgacatttataacagaaaacaccatatgtctattatttgatagcctaggctgaactccttcgtctgacacatggtgtgggagggagtaacgtttgagaccatcttacaggcaatctgaaggtggtgaagatttgttaaagactgatccatttgcatctatgtcagtgcactgaggaaaattgtcaagacatcaacacccgatgaccaagtatttgcagttctacttcaagtatggtgtggatacagtttgcacattcttcatataaaggattttggcttttgagtcacggatcaaccacttgggcctgtgttaccaacatgtaggactcattctgattcacccagcttcttcgtgttaagtaaccctagttaaggttatgtgggcaaataccgactttgcccctgaggggtctcatatctctatataaggaacctgtacaccccttcataatacagagaagagaaagaggccagaggcccaaccctatatccagtgtctcgtgtgtttcctctgtcgtgtttatgggaagggagacgggttctctacatcttctcgcgcctaatctgctgacgggagggaaggaagcggatctggtgatccgtggtaacgtagttctcaatacgttatcagcacgctctacctcgatcttgccgcgggatcagatctgcatcaactctccgtcaagctggcaggtccctggcctcgccaaactgtcctacgcgacaggcttcgatttaccatctacgcaatcacacggtaccatatattgttgttaatgtgttcgtctgaaaaaagcgaatcagtggtcgaatccatattgccaatcacgaacacacacgattggtctgtatcgcgtgatgctggtatgcataacgcacaggaacgtcgcgccgcgccgcgccggaggtcgcactcgtgcctgaagtcgcgcctgtgcgtgccagctcgcgtcgtcagccgcacccatgtcgaaggacacgcgcacgcgcctgaagccgtgcccgcgtcgaggccacatcgtagccgaaggcacgcccgcgccatgccggagcctcgccggcccgagggatcgaacatgacggtcggtctctacgcaggggcacgaggatgcatgccaggctaccaacacgcgacccccactctctccctcgcacggataaaaggggaactcggttagagtggtgccgataattgcgaacgg

SEQ ID NO: 218572 - DNA, 2300 bp, Zea Mays
ctcccatgtcttggcgtctcccggcgccgggcgcgacgctcacgccaatgactatttatccgccctccttgcgatcggacagccaggcagcgacgacgaccgcgaccggtgggcggcggaggcaagctgggtgggtttctacttctactactactaccacacgcgcgcgcgatctcgcggtggtttcatcagctcacacacagagaacaggatcaggatcaggacagatgggagccgagaacggtagcaacaacccttcgtcgaccgtcttggatggcctctacggggtgcagctcggccgtccatcggatccggcacagaccgacggtggggcgtcgtcgtcaccagcagcttgtgaacaccaccacaagcgtggccgtggtggtacagcacaggcacagcagaggttgcagatccgaaggctatggcagcacagaccgtcttgcttcaagcccatccactgcaccattacgtgtgacaagcatgctggcgagactgtcgcgaacgtcgtcacctcgctgcccttcatcgttcttggactgcaggctccaaggaagaacctgaacgccgctatctacgccaactccctggtcgggatgggagtagcgtcgagcctgtaccattcttccagaggaggaatccggaggctcctgcgttgggccgactacactatgattgccaccacaactctgtgtttgtcgagagcagtaggcaacgagaacccaagattgctcatggccgcttcagcgttgctcctgccgtttcagccactggtggtttcggctgtccacactggactcatggaggtttcatttgcgagaagagcgtcgatggaaccggagctcaggatggcgcataacctgcacaaggtgtcgtctctgctgggaggtgcgctgttcatcgccgacgactgcttcccggagactccctatatccacgccgcgtggcatcttgctgctgccatcggcgttggcacgtgcaacaagcttcttgaatgacaacagcccggcctccactcatgctgatatcaatgagcagttgatttcagcacctatcacgacctacgctacgtagaatgcacacagtatagcagcttgtcgacatttataacagaaaacaccatatgtctattatttgatagcctaggctgaactccttcgtctgacacatggtgtgggagggagtaacgtttgagaccatcttacaggcaatctgaaggtggtgaagatttgttaaagactgatccatttgcatctatgtcagtgcactgaggaaaattgtcaagacatcaacacccgatgaccaagtatttgcagttctacttcaagtatggtgtggatacagtttgcacattcttcatataaaggattttggcttttgagtcacggatcaaccacttgggcctgtgttaccaacatgtaggactcattctgattcacccagcttcttcgtgttaagtaaccctagttaaggttatgtgggcaaataccgactttgcccctgaggggtctcatatctctatataaggaacctgtacaccccttcataatacagagaagagaaagaggccagaggcccaaccctatatccagtgtctcgtgtgtttcctctgtcgtgtttatgggaagggagacgggttctctacatcttctcgcgcctaatctgctgacgggagggaaggaagcggatctggtgatccgtggtaacgtagttctcaatacgttatcagcacgctctacctcgatcttgccgcgggatcagatctgcatcaactctccgtcaagctggcaggtccctggcctcgccaaactgtcctacgcgacaggcttcgatttaccatctacgcaatcacacggtaccatatattgttgttaatgtgttcgtctgaaaaaagcgaatcagtggtcgaatccatattgccaatcacgaacacacacgattggtctgtatcgcgtgatgctggtatgcataacgcacaggaacgtcgcgccgcgccgcgccggaggtcgcactcgtgcctgaagtcgcgcctgtgcgtgccagctcgcgtcgtcagccgcacccatgtcgaaggacacgcgcacgcgcctgaagccgtgcccgcgtcgaggccacatcgtagccgaaggcacgcccgcgccatgccggagcctcgccggcccgagggatcgaacatgacggtcggtctctacgcaggggcacgaggatgcatgccaggctaccaacacgcgacccccactctctccctcgcacggataaaaggggaactcggttagagtggtgccgataattgcgaacgg

SEQ ID NO: 218573 - DNA, 3911 bp, Zea Mays
accggccaccgttcacccctgacccccatttcgttccttccagatctccccgcccccgcatctcgcccgccagctaccggcgagtgggcgcgcgcccgccgccgccgcgatgtacctggcgtacgggtggccgcagtcgatccctctggacccggacgactcggaccgcgtggtcctcctccgcgtgctcggccgcctcctcctcgccgtctgtccggcttcgcttcacctctggtccgccgcccaacaccgggtccgcctagcccgctccgatcgctccccggagtccctcgccacccatggccacaacgcgcacgccgcgtggagccccgacgccaggaccgtcgccgtcctgacctcttccttctacctctacgtttacaaggttcagcactcgggaaagcaactgatcgtcggtggcaagcaggtcccggggctttgcctggctagtatatccctaatcatcaccgagaaggagcaatttcgtgtgtgacagcaaaagcatgctcctcggactatccaatgggcatgtgcaggtcgtgtcctggaacgctgagttctcagacagcttcaagcttggttgctatgtgtgttcatctgagaaacctactgctgccgtagatgcgttggtgtttgatcctcccagtttgcgagaaagctctaacgcaaggcctgctccttgctgcacaggcaattcttctattgtccatgttgagctgtcggtgaagctgagattgctggttgctttgtactcaggctgtcgcattgccctctgtactattggtaagaagggattaaggcagcctggcagcaccagagtggagagatggttggacactgatgatgcgatgtgtacttctgtggcttctgagcaacagattcttgctgtcgggtgcagtagaggtgttgttgaattgtatgatctagcagaaaacacacgccatatacgaaccatttcgttgtatgattgggggtattcagtggaagataccggtcctgttgcctgtatatcttggacgcctgacaattgtgctcttgcagttgggtggaaatttaggggacttactgtatggtctgtgtctggatgtcgattgatgtgtactattcgtcaaactggttcaaattctgcctcatctcctatggtgaaacctagcgctctaaaatttgagcctcttatgggaggaacatcacacattcaatgggatgataatggatataagttatttgctgtcgaagaaagcttgtcagaaagggttcttgctttctcatttgccaaatgttgcccaaacagagggctttcaggcacaacatattcccaccaggttctttatggggaagatcgaatccttttggtgcaaccggatgatgccgatgaactgaagatattgcatcttaatgttccaatttcatacatttcccagaactggccagttctacatgtggtggcaagcaatgatgggatgtacttggcagttgctggctctcacggactagtgctatatgatttgcgaaataaaaggtggcgtttttttggtgatgttacacaagagcaaaagatccaatgcaaaggcctattgtggatgagaaaaattgttattgtgtgcaactatgttgaatcgtcaaacacgtatgagctcctctttttcccaagatatcatcttgattatagttctttactctaccggaaacaactgcttggaaggccaattgtcatggatgttttccaggattatatattagttacttacagtccattcgatgtacatatctaccatgtggtggtctcgggagaattatctcctgctagcaatccagttttaaagctttcaacattgcgagaactttcaatcatgagtccaaaaagcccacctgtttcaatgcgcttcattcctgaacaaaatgacaaaggagcgctgacagaagatactcatggattttctgatcttttgtcccagcaaccatcaagatgtttgatcttgcggaccaatggggagctttctgtgcttgacatggacgatggacatgaacacactctcacaaattcaattgaactcttttgggtcacctgttcgcagtttgaagagaagggtagtcttatcaaggaggtttcatggcttgattacggtcatcggggtatgcaggtgtggtacccatcacatggagcagatcgttttaagcaagaggattttttgcagttggacccggagcttgagtttgatcgtgaggtgtatcctcttggtcttcttccaaatgttggtgtggttgttggtgtttctcagagaatgtccttctcaactgcggagtttccatgctttgagccttcacctcaagcccaaacaatattgcattgtttattacgacatctccttcagagggacaagattgaagaggctttgctcttggcaaatttgtccgcagaaaaacctcatttctctcactgtttagagtggcttctgtttacagtatttgatgcagatatatcaaggccaagtgcttcaaaaaatcaggcttcacaaaaagttgattctcccaagaaatctcttcttgagaaaacttgtgacctactacggaattttcctgaatatatggatgttgtagtcagcgttgctaggaaaactgatggacgacactgggctgatctgttctctgcagctggacgatccacagagatgtttgaggaatgcttccaacagaggtggtacaggactgctgcttgctacatactggtcattgctaagctggagggccctgcagtcagtcagtattgtgcactccgtttgctacaagctacacttgatgagtctttgtatgagcttgcaggggagttggttcgcttcttactaagatctggaagagattttgagaatgccacttcagactctgagaagctatctccaagatttctaggctattttctgttccgttcaccttataagcggcaatcttctgatttgaaaagtaactcaacgaaagaacttagtccacatattgcttctgttatgaacattctagagcgccatgctagctatttgatgtctggcaaggagctttctaaactcgtcgcttttgtcaaggggactcaatttgatcttgtggaatatctacaacgagaaaggcaagggtctgctcgtctggagaattttgcttctgcactcgaactgattggacaaaagctccaaatggatacactgcaaagccgacttgatgcagagttccttctagctcatatgtgttcagtcaagtttaaggaatggatcgtggtgctagctactttgttgcggcgtacagaggttttggtggatctctttcagcatgatttgcgattgtggaaagcatatagcattactctacagtcacatgatgtattcagggaatatcttgaccttcttaatatcttggaggaacagctttcgtctgtctctgatcttacattgcagaatggaccattgtcatgaatgctggacggtgacactgattgaaaaaaacaactgaatacggcgttttagccttgagttaattaacacatacggcgggaccaggaatctgatgtaaatagattattcagggtgtttttctctttgagcaacaccccgaggtgctatggcagttttttgtacagtgatcagctaagcacctattgttgtatcattagtttgttgcagcggagttgagtctgcattcttcgccttactgtaaatatgtgctgcgcccttaacattgtaagccatataccattctgagcagcaagttcttttctctgttccatagaatcgtgtttaaagctagaagcctagaacatgtagatagtcttcacctgatgtttgtagactccgagatattattaaaactgacactatgatttcttaattgcattttttccatggcatactgatgtttttttttactttgcg

SEQ ID NO: 218574 - DNA, 3830 bp, Zea Mays
atttgctgcatcgctcgcgtcgcaccggccaccgttcacccctgacccccatttcgttccttccagatctccccgcccccgcatctcgcccgccagctaccggcgagtgggcgcgcgcccgccgccgccgcgatgtacctggcgtacgggtggccgcagtcgatccctctggacccggacgactcggaccgcgtggtcctcctccgcgtgctcggccgcctcctcctcgccgtctgtccggcttcgcttcacctctggtccgccgcccaacaccgggtccgcctagcccgctccgatcgctccccggagtccctcgccacccatggccacaacgcgcacgccgcgtggagccccgacgccaggaccgtcgccgtcctgacctcttccttctacctctacgtttacaaggttcagcactcgggaaagcaactgatcgtcggtggcaagcaggtcccggggctttgcctggctagtatatccctaatcatcaccgagaaggttcctctcgccaatggcgttgctataacgagcaatttcgtgtgtgacagcaaaagcatgctcctcggactatccaatgggcatgtgcaggtcgtgtcctggaacgctgaggcaattcttctattgtccatgttgagctgtcggtgaagctgagattgctggttgctttgtactcaggctgtcgcattgccctctgtactattggtaagaagggattaaggcagcctggcagcaccagagtggagagatggttggacactgatgatgcgatgtgtacttctgtggcttctgagcaacagattcttgctgtcgggtgcagtagaggtgttgttgaattgtatgatctagcagaaaacacacgccatatacgaaccatttcgttgtatgattgggggtattcagtggaagataccggtcctgttgcctgtatatcttggacgcctgacaattgtgctcttgcagttgggtggaaatttaggggacttactgtatggtctgtgtctggatgtcgattgatgtgtactattcgtcaaactggttcaaattctgcctcatctcctatggtgaaacctagcgctctaaaatttgagcctcttatgggaggaacatcacacattcaatgggatgataatggatataagttatttgctgtcgaagaaagcttgtcagaaagggttcttgctttctcatttgccaaatgttgcccaaacagagggctttcaggcacaacatattcccaccaggttctttatggggaagatcgaatccttttggtgcaaccggatgatgccgatgaactgaagatattgcatcttaatgttccaatttcatacatttcccagaactggccagttctacatgtggtggcaagcaatgatgggatgtacttggcagttgctggctctcacggactagtgctatatgatttgcgaaataaaaggtggcgtttttttggtgatgttacacaagagcaaaagatccaatgcaaaggcctattgtggatgagaaaaattgttattgtgtgcaactatgttgaatcgtcaaacacgtatgagctcctctttttcccaagatatcatcttgattatagttctttactctaccggaaacaactgcttggaaggccaattgtcatggatgttttccaggattatatattagttacttacagtccattcgatgtacatatctaccatgtggtggtctcgggagaattatctcctgctagcaatccagttttaaagctttcaacattgcgagaactttcaatcatgagtccaaaaagcccacctgtttcaatgcgcttcattcctgaacaaaatgacaaaggagcgctgacagaagatactcatggattttctgatcttttgtcccagcaaccatcaagatgtttgatcttgcggaccaatggggagctttctgtgcttgacatggacgatggacatgaacacactctcacaaattcaattgaactcttttgggtcacctgttcgcagtttgaagagaagggtagtcttatcaaggaggtttcatggcttgattacggtcatcggggtatgcaggtgtggtacccatcacatggagcagatcgttttaagcaagaggattttttgcagttggacccggagcttgagtttgatcgtgaggtgtatcctcttggtcttcttccaaatgttggtgtggttgttggtgtttctcagagaatgtccttctcaactgcggagtttccatgctttgagccttcacctcaagcccaaacaatattgcattgtttattacgacatctccttcagagggacaagattgaagaggctttgctcttggcaaatttgtccgcagaaaaacctcatttctctcactgtttagagtggcttctgtttacagtatttgatgcagatatatcaaggccaagtgcttcaaaaaatcaggcttcacaaaaagttgattctcccaagaaatctcttcttgagaaaacttgtgacctactacggaattttcctgaatatatggatgttgtagtcagcgttgctaggaaaactgatggacgacactgggctgatctgttctctgcagctggacgatccacagagatgtttgaggaatgcttccaacagaggtggtacaggactgctgcttgctacatactggtcattgctaagctggagggccctgcagtcagtcagtattgtgcactccgtttgctacaagctacacttgatgagtctttgtatgagcttgcaggggagttggttcgcttcttactaagatctggaagagattttgagaatgccacttcagactctgagaagctatctccaagatttctaggctattttctgttccgttcaccttataagcggcaatcttctgatttgaaaagtaactcaacgaaagaacttagtccacatattgcttctgttatgaacattctagagcgccatgctagctatttgatgtctggcaaggagctttctaaactcgtcgcttttgtcaaggggactcaatttgatcttgtggaatatctacaacgagaaaggcaagggtctgctcgtctggagaattttgcttctgcactcgaactgattggacaaaagctccaaatggatacactgcaaagccgacttgatgcagagttccttctagctcatatgtgttcagtcaagtttaaggaatggatcgtggtgctagctactttgttgcggcgtacagaggttttggtggatctctttcagcatgatttgcgattgtggaaagcatatagcattactctacagtcacatgatgtattcagggaatatcttgaccttcttaatatcttggaggaacagctttcgtctgtctctgatcttacattgcagaatggaccattgtcatgaatgctggacggtgacactgattgaaaaaaacaactgaatacggcgttttagccttgagttaattaacacatacggcgggaccaggaatctgatgtaaatagattattcagggtgtttttctctttgagcaacaccccgaggtgctatggcagttttttgtacagtgatcagctaagcacctattgttgtatcattagtttgttgcagcggagttgagtctgcattcttcgccttactgtaaatatgtgctgcgcccttaacattgtaagccatataccattctgagcagcaagttcttttctctgttccatagaatcgtgtttaaagctagaagcctagaacatgtagatagtcttcacctgatgtttgtagactccgagatattattaaaactgacactatgatttcttaattgcattttttccatggcatactgatgtttttttttactttgcg

SEQ ID NO: 218575 - DNA, 2777 bp, Zea Mays
ccactctccatggacacgggcatggagttgtcctcctccgccctccttcctccccccaccttctaggactaggcctaaggactaggagtggcgccgcggtgccgtgtggcgttgactggagatccagagggcgccatccgtcctcgatttgaacttgggttcacctcgccttttctcttcctctccctggtctgccattgaggagtcacatgtgtttcagtggcggttagaagcctacaactctacactcacgtgaagttgtggttggatttgttaaccggtgcggtagcacagatggagcttcatgcacatgccctgaggatgagacttatgctccaaaaaggcagactgcaagtgctatcgagcagaattctcattcaacccacagaacatttgtgaagattcagcctcctttgcaagatgctactagagctactggccacccagttccagctgttcatgccactacctcaacttcaggaaaggaggctgcatctagtaacagaagcaatcatcctcacagtcatcatcagatcataagaagtgattatgtacagccatctaagcagacagccagaagcatttctcaatctggaattgctggagctggtgtatattcagagctggttaatatcaggtcctcatctaataatggaagcactgatcaggctccacagatgggtactaactattcttatcagattttatctgataaccattcttctaataatagggcacagaatcaacttaactttcctgagggaaagatggcttataacccttccgtgaacaatgaatttgggaagggttacccaagagctggctatgcaaagccaaagcagagtttctcaggaccttctgtgatggtttccagttcaccatcacaaataaggagtcaagggcatcctggtctacctcctgcaaaatatcattctaatcatttcaattcagatgccaggcaagatgatgtacaaactcggaacccatcaggtcccaatgtgtttagtggttctggcaacaaaattcagggttctacaggaagggtaaaagctcatagtggaggaccccaatctaacttaagatcattgaagttattgcgatcagttgagcagtactaccacacactgcagcaaatgaaatggggtccaatgaccgagcatgttctagacaatcttcattgcaagatagatgcattccaggcaaatcaagtactcaagctgcttcatgaccacactgtcgctcttggcttctttcaatggttaaagaggcaacctggattcaagcacgatggtcatacttacacaaccatgataggcatccttggacaagccaggcaatttggtgttttgaaggaacttctggatgagatgagccgagctcactgcaaaccaactgtggtgacctacaacagaataatacatgcatatggccgtgcaaattatcttaaggaggctgtcaaagtatttgaggaaatgcaggaagctggttatgagcctgatcgggttacatattgtacattgattgatatccatgctaaagctggatacctagacattgcaatggatttatatggcaggatgcaagaagtaggcttgtcacctgatacgttcacctacagtgtcatggttaattgccttggtaaaggtggtcaattagcggctgcttataagcttttctgtgagatgattgaaaatggctgcacacctaaccttgttacttacaatattatgattgcgctccaggccaaagcaagaaattatgagaatgttgttaagctgtacaaagacatgcaggttgctgggtttcgtcctgacaaaataacttacagcatcgttatggaagttcttggtcattgcggccatctggatgaggctgaggcggtttttattgagatgaggcgtgattgggctcctgatgagccggtatatggacttttggtcgatctctggggcaaagctggcaatgttgacaaagcgctaggatggtaccaagcgatgcttcaggatggtttgcagcctaacgtgccgacctgcaattcgctcttgagtgctttcctgaagatgaacagatttcaagatgcctacatcgtgctccagaacatgcttgctcgggggcttgttccatctgtgcagacttacaccctgctactcagctgctgcaccgtgggtcaggcacagatgggtttgtgctgccagctcatggccatcactggacatccagctcacatgttcctgctgtacttgcctgatgcagaagctggtggccagaacgtcagggatcacactggttatttcttggacatgatgcacagtgaggacagagagagtaaaaggggtctaatggatgctgtcatagacttcttgcacaagtccggtctcaaggaggaagcaggctttatatgggaggttgctgcacagaagaacgtgtacccagattctgtaagggagaagagctcgtcgtattggctcatcaaccttcatctgatgtctgagggcacagcagtgactgcactgtccaggacgcttgcctggttccataggcaggttctgacattgggcactggtcctgaaagaattgacattgtcactggctggggcaggaggagcagggtaactggatcttcgctggttaggcaatcgattcaaaagcttctaaacctctttgaatccccattcttcaccacccgtggaaatactggctgctttgtcggctgcggggagccactcaacaagtggttgcacaatccttatgttgagcgcatgcatttattgtaagct

SEQ ID NO: 218576 - DNA, 2850 bp, Zea Mays
acccactctccatggacacgggcatggagttgtcctcctccgccctccttcctccccccaccttctaggactaggcctaaggactaggagtggcgccgcggtgccgtgtggcgttgactggagatccagagggcgccatccgtcctcgatttgaacttgggttcacctcgccttttctcttcctctccctggtctgccattgaggagtcacatgtgtttcagtggcggttagaagcctacaactctacactcacgtgaagttgtggttggatttgttaaccgtccatgttgagggcaaagcaactcagcaccctaactcagtgtgcacggtccttctatcttaatggatcaaggtgcggtagcacagatggagcttcatgcacatgccctgaggatgagacttatgctccaaaaaggcagactgcaagtgctatcgagcagaattctcattcaacccacagaacatttgtgaagattcagcctcctttgcaagatgctactagagctactggccacccagttccagctgttcatgccactacctcaacttcaggaaaggaggctgcatctagtaacagaagcaatcatcctcacagtcatcatcagatcataagaagtgattatgtacagccatctaagcagacagccagaagcatttctcaatctggaattgctggagctggtgtatattcagagctggttaatatcaggtcctcatctaataatggaagcactgatcaggctccacagatgggtactaactattcttatcagattttatctgataaccattcttctaataatagggcacagaatcaacttaactttcctgagggaaagatggcttataacccttccgtgaacaatgaatttgggaagggttacccaagagctggctatgcaaagccaaagcagagtttctcaggaccttctgtgatggtttccagttcaccatcacaaataaggagtcaagggcatcctggtctacctcctgcaaaatatcattctaatcatttcaattcagatgccaggcaagatgatgtacaaactcggaacccatcaggtcccaatgtgtttagtggttctggcaacaaaattcagggttctacaggaagggtaaaagctcatagtggaggaccccaatctaacttaagatcattgaagttattgcgatcagttgagcagtactaccacacactgcagcaaatgaaatggggtccaatgaccgagcatgttctagacaatcttcattgcaagatagatgcattccaggcaaatcaagtactcaagctgcttcatgaccacactgtcgctcttggcttctttcaatggttaaagaggcaacctggattcaagcacgatggtcatacttacacaaccatgataggcatccttggacaagccaggcaatttggtgttttgaaggaacttctggatgagatgagccgagctcactgcaaaccaactgtggtgacctacaacagaataatacatgcatatggccgtgcaaattatcttaaggaggctgtcaaagtatttgaggaaatgcaggaagctggttatgagcctgatcgggttacatattgtacattgattgatatccatgctaaagctggatacctagacattgcaatggatttatatggcaggatgcaagaagtaggcttgtcacctgatacgttcacctacagtgtcatggttaattgccttggtaaaggtggtcaattagcggctgcttataagcttttctgtgagatgattgaaaatggctgcacacctaaccttgttacttacaatattatgattgcgctccaggccaaagcaagaaattatgagaatgttgttaagctgtacaaagacatgcaggttgctgggtttcgtcctgacaaaataacttacagcatcgttatggaagttcttggtcattgcggccatctggatgaggctgaggcggtttttattgagatgaggcgtgattgggctcctgatgagccggtatatggacttttggtcgatctctggggcaaagctggcaatgttgacaaagcgctaggatggtaccaagcgatgcttcaggatggtttgcagcctaacgtgccgacctgcaattcgctcttgagtgctttcctgaagatgaacagatttcaagatgcctacatcgtgctccagaacatgcttgctcgggggcttgttccatctgtgcagacttacaccctgctactcagctgctgcaccgtgggtcaggcacagatgggtttgtgctgccagctcatggccatcactggacatccagctcacatgttcctgctgtacttgcctgatgcagaagctggtggccagaacgtcagggatcacactggttatttcttggacatgatgcacagtgaggacagagagagtaaaaggggtctaatggatgctgtcatagacttcttgcacaagtccggtctcaaggaggaagcaggctttatatgggaggttgctgcacagaagaacgtgtacccagattctgtaagggagaagagctcgtcgtattggctcatcaaccttcatctgatgtctgagggcacagcagtgactgcactgtccaggacgcttgcctggttccataggcaggttctgacattgggcactggtcctgaaagaattgacattgtcactggctggggcaggaggagcagggtaactggatcttcgctggttaggcaatcgattcaaaagcttctaaacctctttgaatccccattcttcaccacccgtggaaatactggctgctttgtcggctgcggggagccactcaacaagtggttgcacaatccttatgttgagcgcatgcatttattgtaagct

SEQ ID NO: 218577 - DNA, 2728 bp, Zea Mays
gcaaaaggcaaagcaaaagcccccgacccccgtctggcgccgggagtcccactttgtgccacactttgtctaaggttagtcgttcgaattgaagaactaaccttaggcagaaaagttaggcaaagtgtggcaagttaggcatcaaaccaaacagaccccaaaacccacgccacgccacgccacagccccgccctcgccgccgtttcccgaatcccccaagggcaagcggagccatccaggatggcccattcgccggcgcccagcggcggcggcggcggggggccgctgccgctactggtgtcgctcaactgcctcgacgacctctcgctggagcaggaggggctggcgggcgtggccgcggtggagcacgtgccgctctccgccgtcgcctgcggccgcatcgaggccgcctccgcggtgctgctcccctccctcgccttcctcccgcgcgccgcgcagcgccggctgcggccctggcagctgctgctctgtctcggctccgcggaccgcgcggccgacgcggcggcggccgccgacctgggcctccgcctcgtccacgtcgacgccaaccgcgccgaggaggtcgccgacaccgtcatggcgctcatcctcggcctgctccgccggacccacctcctctcgtgccacgcctcgtcggtcccggccgccggctggctcggctccgtccagcccatgtgccgcggcatgcggcgctgccgcggtctcgtgctcggtatcattggccggtccgcggccgcccgctgcctcgccactcgtagtctcgcgtttcggatgagcgtgctctacttcgatccgcgctacgtgggactgttgtataggctaagtaattttagtactacaattactactaagggggtgtttggaaacacagtttttcaaaaccacggtatttcaaataccacagtatacaaatgccatgacatgatctcagttttcaataccacagttttagaataccacggttttgaatacatggaggtgtttgggaacaaagcaagtgggaaaacaaagcggccttctattgttttcccttctgcagcaaggagaatggacactctcaatgatttattagcagcgagtgaccttatttcgctgcattgcggattaacaaatgaaaccatgcatatacttaatgctgactgcctgcagcacataaaacctggagctttcatagtcaatactggtagttgccagcttatagatgactgtgctctcaaacagctcttgattgatggtaccatagctggttgcgcattggatggtgctgaaggtccacagtggatggaagcatgggtgcgggagatgccaaatgttttaattcttccgcggagtgcagactacagcgaagaagtgtggatggaaataagagagaaagcaataactatgttacagtcctttttcttcgatggtgttcttccaagtagtgcaatttctgatgaagatgaggaaataagtgaagctaaaaatgaagatgactatctaggcccacaggcaaaggatagccagtcacagatttttgatactgaaatagatgaaagccacataacgctggagtctgaaaagaaaagagccatatcccaccataaagagcctcaggcgtctggaaagtctgtaaacattggctcccgatctgaagggaggcgtagtcgttctggaaagaaagggaaaaagaggcctgcccatcgcagacctcaacagaaaccagatgacttatctgctgttgagagtgacagtaactattcctcccggagagatgatgacactgcaatgagtagcagggaccaggttgtaagttccagttcacgatttgcctctcctgaggacccaaaatacaagcataaatctctttctgaatccccgatggaaataacatccgagaagaaggtgcctgtactactcagtagaaagtaccctgataaactaaaagatggatttattgtagctttgagagcaagagataattcagggtaccatgttgcaagacagagagtagttggtggtggtggctggattcttgatgttgtctcaaatgctacaaacagggaccccgctgctcagttccttgttactttcaaaaacaaggatactatggggctccgatcctttgttgctggcggtaagctactacagattaataggaagatggagtttgtgtttgcaagccattcttttgatgtttgggagagctggatgctggacggttccttgctggagggtagcaagcttatcaattgcagaaatccttcggctgtattggacatctgcattgagatcctcgcagcaccaagtgaagaagacggagtcactaggtggctagattccccacgctggggactgtaaaaatgatctgagccatcattgttgttcggttcggtttgcttccttcttttttgaaaaaaaaaatagcttccagtttttctattcctctgcttaagttcccaattttgtcctttctgatgtagggaccatgtagagttgtagacatttatatcaatacatcatgtgtaacgtgttttttcagattccacagtgtagctttgcatatttctcttgcctagggcatggggcacaggcagagacgtgttttactgtgtgtttcgttaaattgcgactttaaaaaaggctgttttaaactgtgggttatgagttatgtgaaagctgaaacccgattggctcaacagttgtaatacatccctgtgtaacgtgg

SEQ ID NO: 218578 - DNA, 613 bp, Zea Mays
ctcggtacattacctgccgtgccgcagcattagaggtcctgtgtctcgtaggtggacatattctccgcgtgacttcaggtgtcgtcgccgagttgtctccggccgagggcggcggcgcgaccggtaaccagcgtcagccgtgaccgcgatcgtgagcgcgcggcggcgcggaagcccaacggcaaggggccccaggacgggctcaccccggagcagcgccgtgagagggacaagaaagcgctggaggagaaggcggcgaagaaggcgcagcaggcagcggccggcggcaccgggacctccacggacaacaagaataaggcaggtggcaagaagtaggccgcagcggcgagcggcgccacctctaggtggtggagcatgcttgtggaatgagaacattgcaaatgggcgaatatgaatcaagtgtttctattgggaacgacacatttagcattcgggagccacttggtgtttgcactgggatatgcccatttaattttcctgctatgattcccctatggcgagggaggcgtcgcgtcgacttccgcttctcgccgacggccatctccatcgaggacgtccgcgacgccgaggaggagcgcgtcgtcgcctcctt

SEQ ID NO: 218579 - DNA, 2198 bp, Zea Mays
aattagatgtatagtgtccacaagcagctgagctgtctgttgcaactgagctggcagtggatattgtcgtcactgtaggggatgtcaagttctaccttcacaagttccctcttctgtccaagagctcccgcctacaaacgctggtggcctcgacaagcgaggagggcagcgacgaggtggacatctccgacatcccgggcggcccggcggcgttcgaggtctgtgccaagttctgctacggcatggtggtgacgctcaacgcctacaacgtgctggccgcccggtgcgcggcggagtacctggagatgtcggagacggtggagaaggggaacctggtgtacaagatcgacgtgttcctgtcggccagcatcttccgggcctggaaggactccatcatcgtgctgcagtcgacgaggccgctgcagcggtggacggacagcctcaaggtggtcaaccactgcgtcgacgccatcgcctcccgggcgtccacggacccgtcggaggtcgactggtcgtacacgtacagccggaggaagctcccgtcggagaccgacggcgacgcgcgcggctggaacggcgtcaggaagcggcaggcggtgccgagggactggtgggtggaggatctctgcgacctcgaggtgtgcctgtacaggaaggtgatcctggcgatcaaggccaaggggaggacgggcggcgccgtcgtcggcgaggcgctgcgggcctacgcgtgccgccggctgttcgggtccctggaccacgccgtcagcgacgggctcgattgcaccaagcaccgcgcggctcttgaagccgtcgccgacctgctgccggccgagaaggggtcggtctcctgtggcctccttctcaagctgctcagggcctcgtgcctactggagtccggtcaggcctaccgcggcgagctgatcaggaggatcggcgcgcagctggaacgggcttcggtcccggaccttctgatacctgcggactccggcgacggcgacggcgacgcgacgtacaatgttggcatggtggctgcgatgctggaggagttcttgctgcatcacaaggtaaatggggccgaggcggagaagcgggaagatggcgaggacgacgtggatgttgccgctgacgacccggtcacttcttcgaagctggccgctgtcgcaaagctggtcgatggatacctctccgagatcgccaaggacccgtgccttcctctggagacgttcgtcgccctcgccgaatcgatgccgcccctgtctcgcccggtgcacgacgcgctctaccgcgccatcgacgtttacctcaaggtatgcacgcgcaagattatgctctgaaagcaattctgcatcatatctgtctgcaatttcagtttcagaaatgcgcaaaaatctgcgatttcagtagctaaaaagaatgcgcaaaaatctttgtacgattgtgcgctgtcgaatctctctctgctgtgcacacgcgcgcaggagcatccgggcttgtcgaagggcgagaagaagcggctgtgcgcgctgatggactgcaggaagctgacggcggacgcgagcgagcacgccgtgcagaacgagcggctgcccctgcgcgtggtggtacaggtcctcttcttcgagcaggtccggcagtcggcggcggcggcggcagcctccgccgcccccgcgcgctcgctcatcctgcccagggacgacggcgcgtcgtacggcagctcgaggtcggcgaccacgacggcgacggaggacgagcagtggggcagcggcgccgtggtgggcgcgcctgtgacgacgtcgacgtcgggcggcgccggcgacgccggctcgctccggtccatgagccagctgtcggccaacgagaacgggagaagcggcggcggcggcgacaggaagaaggccaagggcggtgcggtggcgccggcgccggtgaagagagtgctggggaagctgtggtccggcaaggcgagcagcggcgggtccgacgacacgtcggccagccccgttgggtccctcaacctggaggagaccaagtcaatgtcgtcacagatcacgaggcattctgtgtcatagttactatattactgtatatgttctctttttttttgggtgatggttttgttggattggatttgacttacataattatggagggtgtttggtaattggtacatgtggtaatggagaatttctcgtcacgaa

SEQ ID NO: 218580 - DNA, 1221 bp, Zea Mays
  misc_feature (1220)..(1221): n is a, c, g, or t
attttctgaaaataggacttaaaaacaaaaaattcggcccagttgggagttgcccacccagttccgaacttcgaacacgacgttctccctcaccccaccctccaggctccgagctccaaaaccctagctatgcagaaacagacgggcaagtccggcgggaccggtgggggcacgccggcgaagcgcggccgcccgtttgggagcaccaccggcggaggggccgctgctgctgccgcggcggcggcggtcgttgacccgggtgcacccgccgctctggtcgggccgtccctccaagtcctatcagccctgtcagaacaacaaaagaattgtccttgcattgcaaagtgggttgaagtcagagatactgtgggcactgaatgcccttacagtactctcatttaaggagaaggatgacctccgacgtgatgcaacacctcttgctaaagttcctgggctcctagatgctcttcttcaagttattgatgaatggagcgatatttcaatgcctaaggaccatacgaaaccacccagactaagaactttgggtgccaacacaacactctcgggctttggccaggagaatatggaaaaagtatactctgacactgccactacctctaatgaccaatccaaggcggaagattccagtgtcacaaagaagcgcgctgcaagcttttggtttgatgaggatgggttgtttaacaacgatgatgaagggagggcggaaaggcagcagtgtgctattgcagcctccaatataatccgcaatttctcttttatgccagaaaatgagattatcatggttcaacataggcattgcttggaaactatatttcattgcttagaaaaccagaatagagaagatgatgagctcataacaaacatgctggagacccttgtcaatttagcacctgtgctggacctgaggatcttcagctcatcgaagccttcgttcattaaaatgaccgagaaaggtgcaattcatgccataatgggtatgctttcttcttccgtaaagccatggcactgtgctgctgctgaattgattggccgtctgataataaatccagacaacgagccatttcttcttcctatcattccacaaatatacaaacgactcgttgacctattgagtgtaccagcatatgatgcacaggctgctgctgttagtgcactctacaatgtagccgaagtgaatatggattgcaggctcaagcttnn

SEQ ID NO: 218581 - DNA, 861 bp, Zea Mays
tgatgccacacacagcctagggtagagctagctacaactacaaaagcagacaacttggaggaggccaaccccagcacacctccctttacccttccttctctcccatgcaagcaaggaatcgagggagggagggaggaagcaaaaggggaaaagctcgtgcaagacaagccgccctgccctgggaccattcccacccacatcgatcgtcagccagagagaggttcgttagttccagaaggacactggacagttggagacagcgagcgagcgagcgagcgagcgggaggagaggaagaagagctagggggcgatgggcggcgagatgaagcccgggaggggcctcaggacctgggcgcagcgccacctcaacgtcaccttcgccgtcggcttcctcctcgtgctgctcacctacctcgtcgtctcgcggcagctcgccgtcgccgcgcccggcggtgcagcgtcgagggtggtggcgggtaagcaggtggtcgtcagagacgccggagacaacgcagagggcgcgagcaaaaggcggcaggaatggcagccaaaacaggcggcggcggaggaggaggagacgtccggtgccgtcccaacggaggaggaggagtcgtatccgaaaagagatgaggccgacggcaaaccgtctgttcattgatgtccctgaagctttggaaggctgctgcttcaagaatgaaatgacaaggagcaaagagaattgaaagatatagtgtttagtcaaatttggttgatttgtttttactaaggagcagtgaaaattgtagtttgaatctgccagatttccaggtgctgagtcagagtgctgttgctgtgtattgtggtgtgttgttcagttgtgtg

SEQ ID NO: 218582 - DNA, 3404 bp, Zea Mays
agaactataccttcttcttcgtctctaacctctgcttcctctgttcctatgaatctcttgctatcttcctgaatccccagttcctgcttcctacctccaattcctgtctcggatctatctccactacctgctgctaacaattggtatcagattcgttcgatcctcgacttcaatttgcccacgccatgtcgctcgatttcaagctcatcctcgacgagctcaaccggcgattcgacgagctggaggttcgctgggaccggcgcttctcgccttctgcgtacctcgaccttccgcccacactgctcagcgtccaccaatcctccgacacatccgccagcatgccgcccaccccgactgcggccgttgggaccgtcgtcatcgccgacaactggggcgggtgcttcgatgacgacaaggagtactacgcagcgccatctgtcgttgccgacaactggggcgggctcttcgagggctgtgatgctgacggcgatatctcttcgaacctgcgcgactccgaccccgacgaggcgttcgtcacctcccactcggacaaggcgttgttcgacaaccaccacgccggtgagctcatcgccaccggcatcgaatatggctcatacaactccgtccatggtagcggcggcgctgcgctgtctcaactcgcgcacagcaacaccaacttcgccatgcccaccacctgttcgacttgggggctcaccgagcatgctatggccgaggccgtgcactgtcgcgcgctatggctgccccgacgcgagccacttccgcgcctacttcgtgcgttcctaacgctcgagcggctcgacctctccgcatgcgcctcgctcgacgacgcctccctcgctgcgtccgtcggcgatggaccagcagccgcgacaaccttgtggtggtgcgcttcggccacgggcgacatggagagcacgctcaaggggattcgcggcagcgacgcgccgttcgtgatggacctaaacgacgcagccaccgtggcgggcggcatcgaggacacttacggcgaggaccgcgccatcgaggagcagctcgccacgcccttggacacgctcctgtgcgcccgcctcgaccctgtcaagtcgcacatcgggtgcctgctgctgcagtacctcaagctttcgcctaccttgattggtgccaaggtagtattcgaggaaatgcagcaaagcaccatcctcagggacgcgcacaccgctatctgcaccacgcctgacccggcaatcgacacacacttcgccaacaagtggcggatgcgctgctcccgcaacagcaccagtacggcggcagcggtgttggagctcgatcccggcagttgcaccacctgcgacaccagttactaccgccacgttgtgcagcggcacggactgctgcgtttcgacgcatcactcactagggcctacgtgatgcaggtcgcctttggcaggttcgacggacacttcttccacgacttcaccatcatcaagctgaagacggacagcagcagctcgcccctcgagtgttcgaccaaatgtctcagccacgatattggacatgattcacgaaattatgcacacaaattacagaatgcagtcactcatggaatcactgctgctggacatgatatcctacaggtgggattggcttcaacacctgcaatgttcaacattatacttatagaagatgagagaagtcatttacctattgacgccatttgctctcctgatgaattgataaagacatcacgtctttgtgctttagaaatggttcattgccgtaaaccttggatgagatctcttggcaacacagataggcttggactattctctgaagctcgtgctgtgttaaatgcagcaagacagcaagcaatgaagattgcactaaacatgccacagcaccagacctgcatagatgtgatgggagaaggcatattatatggaggtcgacctggtgttttgaaggaagccattgtttgctcgattccgggtgtcatggtgtttacttggactgttaggaatttttctggagttactcatttatacagtcagcatgacagaggtgtggtgtggctaatcgttgctcctgattgctacttcattcaacacaatgagaggatgcacatgatattctatggcttcgatctactgagtttgcaacacttccatggacatttcattcaagctgatatgtttgctccttgggatggtcaggaaataacccagtttctattttctgaactaccaatatattggcagcagtcacatggcatgaacagtctattatttttcagaaagctcaagtattcatcatcagttgagatattttgtggtgcacagttttcatttcctaatattctattgcccaagtcttggtcacaggagttagccaccaacatagaaagacatttactatcagaaatgctagaagtggctaatggctataattttcatgaacttcatctgatgcttgcctctattggagtgacacaaatgatcagttgtggtaaatatttgatatggatcattggcttgctaactccatgggatccgggcagaatggtcttcgacctcaagttcgtgatgcttttggcttgagggcaagccaaatcttaagaaggggggaatgtcaggcatccagtgacagatacaggctacgtctgaggacataaatacaattgggccggggcagagtgagcgagccggacggcaattgtgaagctgagcggcccagagtggtcagcaatgtaattttgtgtcttgagccagttgaacgagtatttagaggagatcgtccataggacaagggagatattcagactgtaaacagaactataccttcttcttcgtctctaacctctgcttcctctgttcctatgaatctcttgctatcttcctgaatccctagttcctgcttcctacctccaattcctgtctcggatctatctccactacctgctgctaacagagtggcttctgtctgtggccgacgccgacggcggcggccacgttgagacacacgcagcagactttgtggttctttgcgtggggaggttcagtggtgtgcccaacgtacccacgacgttcccagagggcgaaggtccagaggtgtttgacgggcaggtgatgcactccatggactacgccaagatgggctcgagcaaggccaaggagacgataaggggcaagcgtgtcaccgtcgttggctacctgaagtcggcgctcgacatcgccgccgaatgcgcgcaagtgaatggcaccgctcacccttgcacaatggtggtccggaccaagcactgggtcttgccggactacttcgcctggggcttccacatctcaaggctctacctcaaccgcttttctgaactcctcatccacaagcctggcgaaggccttctcctgtccgcc

SEQ ID NO: 218583 - DNA, 7466 bp, Zea Mays
cccgcagcagctccgaaccttctcccagccggcgcaggaagctcaccgggaagccggtgcaaaacccccaagatcacacacacacacaccccagctacaaatccgtccgccagcccccgtcgacatccctcactcccccatgcgcaccggcagctcaccgatccccggagccgctactgctataaatacaaagcttccccggcggtggtctagccggccatggcggcagtcggagcgcacccagtgctgtaccaccacccggcgccggcgggcgacgcctcctccatgtcctcctacttctcccacggaggcagctccaccacctccagctctgcgtccagcttcaccgccgcgctcgcgccgacgacgacggcgctcgccgagcatttcgacatctccgagttcctcttcgacgacgctgcgggcgctggggtcgccggcgcgccaggtgtgttcgccgatggcgcggcccgccccgtcgtcctgccggtgccggatgccgctggtggtggtgcaattatcggcgcagccgctgggggcgcggctgcggcgtcggaggtgccagagcggccgcggacgacgcggatcgcgttccggacgaggtcggagatcgagatcctggacgacggctacaagtggaggaagtacggcaagaagtccgtcaagaacagccccaacccaaggaactactaccggtgctcgacggaagggtgcaacgtgaagaagcgggtggagcgggacaaggacgaccccagctacgtggtgacgacgtacgaggggatgcacaaccacgtcagccccagtacggtgtactacgccagccaggacgccgcctccggccgcttcttcgtcgccggcacgcagccaccgggctccctcaactgatccccggcggcccatcgcgacgctgccacattaaagattgttgtaggctctcatatatggctggaggataaagatttagtttggattgatggcgaggttttccgaactgaaggtcaaaatgtccatgtccacactaccaatggaaagacggttactgtgagcatatcagacattcatccaaaggacacagaagtgccatctgatggcattgatgacatgacaaggctatcatacttgcatgaacctggtgttctaaataatcttgctgttcgatatgcaaaaaatataatttatacctatactggcaatattctgattgcaattaatccattccaaagtctgccccatctttctgaaccccgtaccatggagaagtacaaaggtgcaaattttggtgagctcgaccctcacgtgtttgcaattgccgatgtttcttacaggcagatgatgaatgagggaaagagcaactccattttggtgagcggtgaaagcggtgctggtaaaactgaaaccacaaagatgctaatgagatatcttgcttttttgggcggacggtctaaaacaggggggaggacagttgaacaacaagttttagaatctaatccagtccttgaagcttttggcaatgcaaagactgtccgtaacaacaactcaagtcgatttggaaaatttgttgaaatccaatttgacaagagtgggaagatatcaggtgctgccattagaacatatttgcttgaaagatctcgtgtttgccaaatcaatagtccagagagaaactaccattgcttttactttctatgtgcagcaccgttggaggatatcaaaagttataagcttggtgacccatcatcattccactatctcaaccaatctacgtgcattaaacttgacgaaattagtgatgctaaggagtatcttgcaacacgaagtgcaatgaatacagttggcattactgagcaggaacaggaggctatattccgggtagttgctgctgtgcttcatctcgggaacatcagttttgtgaaagggagagaggcagattcatctgtaataaaggacgagaaagctaggttccatcttaatgcaacagcagagctcttgatgtgcgattgtggaaatctggagaacgcattaataaagaggaaaataaatacaccagaaggagttataaccacaacagttgatcctaattctgctactgttagcagggatggcttagcaaagcaaatatattctcagctatttgactggctcgtaaacagactaaatgcctccataggacacgatacatcctctgaccgattgattggagtacttgatatctatggtttcgaaagttttaagactaatagctttgaacaattatgcatcaatttcaccaatgaaaaacttcaacagcattttaatcagaatgtcttcaaaatggagcaggaagagtataacagggagcagattgactggagctacatagaatttgttgacaaccaagatgttctagacttgattgagaagaagcctggtggaattattgcacttcttgatgaagcttgtatgtttcctaagtgcacacacgaatcattttctcagaagttgtatgagaaattcaggaataacaaaagattttgcaaaccaaagctttctcgcactgcatttaccatacagcattatgcaggagaagtaacttaccaatctgatcagttcctggacaaaaacagagactatgtagttgtagaacatcaagaattactgaatgcttccaagtgctcttttgtgtcagggttattcccatcagtactagagaacacaaaagcatcgaagtcctccattgctactcgcttcaagtggcaactccaagaactaatggagactttgagttctacagaaccacattacatcagatgtattaagcccaataatcatcttaagcctgctacttttgagaacatcaatgttctgcagcaacttcggtgttcaggtgttcttgaagctattagaatcagctgtgctggatatcctacaagaaaaatatttcatgattttctctgtcgattttgcattcttgctcctgaagttttcacagaaagaaacaatgaaaagttaatatgccaaaagattttggacaatattggactccatggttatcagattggaagaacaaaggtgtttctgagagctggtcagatggctgaattagatgctagaagaactgaagtgcggaataaagcagctataaccgttcagagtagatttcgcactcatgttgctcgtgagcaattccttgcattacgcatgacatcaatatcttttcaatcttttgttagagtgatattggcctgtaagttacatgttttcctcagaaaacaagctgcagtactgcatatacagaaaagttaccgctgctattttgcttggaagacttactcggagctatgttcttcagccattacattgcagacaggtttaagggcctttggtgcttataacgagtacattatcagaaaacaaaataaagcttctatttgtgtccaggcttgttggcgttgccatagagatcatttgaattaccttaaaatgaaaagatcagtgttaatttatcagtgtgcatggagaagacggattgctagagaagaactcagaaagctcaaaatggctgcgagggacacagaagccctgaaggtggagaaggagaaacttgaggagcacgtggaagagctgactagccgtttgagcttcgaaaagaatcttaggattgatctagagaagagcaaggcaagagaaatttgcaaactacaggccactcttcgtgagatggaacagcgggttgaagaagccatagagatgcatgaaagagaattagccaaaaaggctattgaggaagctttagctcaagaaagggaaaagatcaccgtattgactaatgaagtcgatgagttgaaggtattactatcaagagaacgagaagaaaacagtgcaactaagagtgcactcgttgttgttcgtgaagaaaatgatgtgctgaataagaaaattgtggttgcagatgcaagcatggagcagcttagagatactgtaacgaggttgcaagaaagtttaattgagggagaagctactttgcttgcagaaagaaaagaaagtgatgcagccaagaaatcactcactgaagctcatgtaaaaaacgaggaactattcaataaaattgaagtagctgagcataacgttagtatcttccaagacgacatccaaagacttgaagaaactgcagctacattggagacttcattgttatctgagaaacaacagagtactgcaatcatttcacaattaactgaagcacaacaggacatccaagtactgcagaagaaatttgcagatgccaataagacaattgagctgcttcaagattctttgaaaaggtgtgaggacagcacaaccacaagggatgccttatatgtagcagaaagacaggagcatggtcaaaccaaacaagcactttccaaagctcaggaaagaaatttggaattgcttaggaaagttgatgatagtgagaaaactttaaacaagatgctggagaatgctcagagacttgagaaacatgcaacagcaagggaatccttgcttcttaagacaaagcagaatcttgactgcactacaaaagcgctaactgaagcacgagggagaaaccgagacttattgacaagttttgaggattcagctaaaaaaatcaatatgcttgaggattcacttaacagactagaagaatgcacagcagagaaagactctttgttggcagtagaaagaaaacaaaacaaaacgaccaaagaagaactggccaatgcccagaaaacaatcgatgaattagtacatgagtcacagcagtcccaggaaataagaaatcaattggaagataccatcaagaggtttaaagcagaatcgactgccagagacacaatattattatcagagaaacaggcacatgagacgaccaagaaagttctaactgaaattcagtcgagaaatgaagagttaatcaagaaaattcaggattgtgataaaaatattcttgagcttcagctaactgtggagaggcttcaggaaaacacatctactacagaggctttactgttgagagaacgagaacaaaacaatgcaaccatgaaggcacaagctgaaactcaagaaataaatttgcagttactgaacaagcttgaggacgttgagacaaaaattggtcttcttcaaggaagtgtacaaaggcttggtgataatacagcgaaagacactttgctgctatctgagaaacgtgagaaggatgccctgaaggaagcacttactgagtctgaatacaaaaatgaagagttactgataaaaactgaagaagccaacaaaaaagcttaaggagaacatggcagcttctttggaagctgaaagacaagaaaatgaagcaatcaagaggtcccttgttgaagctcaggagagaaacgatgcattatttaagaaagttagggatagcgaatacagggcccaccagcttcaagatactgtccaaaagcttcaagtagatgccatatctagactgtctagctttgtaatggagagacaagatggtgatggtgtcaagaatgcacatactgaggttcatggaacaaatgaagatctaatgaggagaaatgaaaacctcctaaaaaggaatgatgacttggtgaagaagattgaagattctgctatacttgttactgagcttagagggaacttggaaaggttagaagggaaagctgctaatttagaggctgaaaatcaattgcttcgtcaacaagcaattgcaactcctccatcaacagcaaagtcttctcaagctgcatgctctaaaatcagtatgatccatagatgtcaagaaagtggtcatattttaaatggcaacgtagcatatgctgaaatgaagtcctcaaccggtcaaacagaaatgagaccctcgatgggcagttcccttgatttgattaaccacaaggtttatgaaaatgggcaaagcttgtttaatgatgtatatcagcaccagcaaccccagaatcatcaacagttattgctgaaatatattacccaatatcttggattctctgggagaaaacctattgctgcgtctcttatatactactgtcttcttcattggagatcttttgaagaagcaaagacaactgtctttgacagtattatacaaattgtaaactcagcaactgaggctcaacatgatacgagaagcttggcctactggctgtccaacttatccacattgtcagttctcctgcaacgttcatttaaagccaccagggcaactgcctcaactccacatagacgaagaatttcctgtgaaaggatttttcaagccaatcaaacttcaagcagtggacttgcttgtctcagtgctcaatcagtggatggaggtaccgtgtttcaccaaattgaagcaaggtatccggcttcgctcttcaagcagcagctagtggatcaggttgaaaaggtgtatggagtgataagcgataaaataaaaaaggagctaaacccattacttgagttgtgcatacaggatccaagaacttactcaaatcaagcaaaggccttgatgtctccttctagtggcttgggccaacaggatcaactcatgcattggctgagcatcgtgaaaatcttcaacagctatttgcatgtcctcagagccaatcatgttccctcaattttggtccacaaattgcttacccaaatattttctgtggtcaatgtgcaattgtttaacaggctcctcttgaggcgtgaatgctgttcctttagcaatgggcaatacatcaaagatgggctaactcaactaagatattggtgcaatgacgtcagtcaagagtttgcagactcagcatgggtagcactgaggcatataagacaagctgttgactttgtggtaatttctctgaagccgataaggacatgggaagagatatgcaatgatatttgcccggctctcagtttgcagcagctagagcggatagtcggtatgtattgggatgatttaaagggaacaaatgtaacttcagccgagttcatgtcaagcatgagagctatgctgcgcgaagaatcaaatagcgtctccagcttttcggtcctgctggatgatgattccagcatacccttttcgcttgaagatatttcgaagtcaatgccaaacattgaggagacgtcagttaatgacctgctgcctttcatccgcgagaaccaaagctttgcgtttttattgtagtggagaggacacgaatccttagatttgttgtatgagattgcaggccagtctgtgtggagttactatccgtctgatgggtatccaatcagaccgtatccgtgtgatggatgactgtgtctgtgtaggtgtgctcgcatgagcctggccctgacagcagatatgtgatttttacctgtatcggcgtatgtaggcaaaaagctaccgcaaatacgtgagttgcatcatgcatgtctaatcgagtgcgtgcagttaacccaacatgctctcggagctagtcaacgcatacaaagagccatgttag

SEQ ID NO: 218584 - DNA, 7090 bp, Zea Mays
ccgcaaccatcccgctgctctccgttccatcaccttgcgtcttgcgctcggcagcctcgtctcccccctctttcggcgaatgccacgccgcctcgaatcgcgcgctcatggcccgagcgatcagcctcttaccacctctccacccccaatccatcagcgccaaaaatagataggggatgaggaatcgcctctggtgcctggttcgcaccccattcccctccgcctcccggttcgatgctggtatcgcgcgcctctgcacgcgctcgagtcggaccacacggcgtgcctacttggcggcgaggcaaccggcgaccggcgcaagggagggagccgacgccgctgccgaacctgattcgacctcgccgacgacagccgtcgcgttttggtgatcgcattacgcatggctgccacattaaagattgttgtaggctctcatatatggctggaggataaagatttagtttggattgatggcgaggttttccgaactgaaggtcaaaatgtccatgtccacactaccaatggaaagacggttactgtgagcatatcagacattcatccaaaggacacagaagtgccatctgatggcattgatgacatgacaaggctatcatacttgcatgaacctggtgttctaaataatcttgctgttcgatatgcaaaaaatataatttatacctatactggcaatattctgattgcaattaatccattccaaagtctgccccatctttctgaaccccgtaccatggagaagtacaaaggtgcaaattttggtgagctcgaccctcacgtgtttgcaattgccgatgtttcttacaggcagatgatgaatgagggaaagagcaactccattttggtgagcggtgaaagcggtgctggtaaaactgaaaccacaaagatgctaatgagatatcttgcttttttgggcggacggtctaaaacaggggggaggacagttgaacaacaagttttagaatctaatccagtccttgaagcttttggcaatgcaaagactgtccgtaacaacaactcaagtcgatttggaaaatttgttgaaatccaatttgacaagagtgggaagatatcaggtgctgccattagaacatatttgcttgaaagatctcgtgtttgccaaatcaatagtccagagagaaactaccattgcttttactttctatgtgcagcaccgttggaggatatcaaaagttataagcttggtgacccatcatcattccactatctcaaccaatctacgtgcattaaacttgacgaaattagtgatgctaaggagtatcttgcaacacgaagtgcaatgaatacagttggcattactgagcaggaacaggaggctatattccgggtagttgctgctgtgcttcatctcgggaacatcagttttgtgaaagggagagaggcagattcatctgtaataaaggacgagaaagctaggttccatcttaatgcaacagcagagctcttgatgtgcgattgtggaaatctggagaacgcattaataaagaggaaaataaatacaccagaaggagttataaccacaacagttgatcctaattctgctactgttagcagggatggcttagcaaagcaaatatattctcagctatttgactggctcgtaaacagactaaatgcctccataggacacgatacatcctctgaccgattgattggagtacttgatatctatggtttcgaaagttttaagactaatagctttgaacaattatgcatcaatttcaccaatgaaaaacttcaacagcattttaatcagaatgtcttcaaaatggagcaggaagagtataacagggagcagattgactggagctacatagaatttgttgacaaccaagatgttctagacttgattgagaagaagcctggtggaattattgcacttcttgatgaagcttgtatgtttcctaagtgcacacacgaatcattttctcagaagttgtatgagaaattcaggaataacaaaagattttgcaaaccaaagctttctcgcactgcatttaccatacagcattatgcaggagaagtaacttaccaatctgatcagttcctggacaaaaacagagactatgtagttgtagaacatcaagaattactgaatgcttccaagtgctcttttgtgtcagggttattcccatcagtactagagaacacaaaagcatcgaagtcctccattgctactcgcttcaagtggcaactccaagaactaatggagactttgagttctacagaaccacattacatcagatgtattaagcccaataatcatcttaagcctgctacttttgagaacatcaatgttctgcagcaacttcggtgttcaggtgttcttgaagctattagaatcagctgtgctggatatcctacaagaaaaatatttcatgattttctctgtcgattttgcattcttgctcctgaagttttcacagaaagaaacaatgaaaagttaatatgccaaaagattttggacaatattggactccatggttatcagattggaagaacaaaggtgtttctgagagctggtcagatggctgaattagatgctagaagaactgaagtgcggaataaagcagctataaccgttcagagtagatttcgcactcatgttgctcgtgagcaattccttgcattacgcatgacatcaatatcttttcaatcttttgttagagtgatattggcctgtaagttacatgttttcctcagaaaacaagctgcagtactgcatatacagaaaagttaccgctgctattttgcttggaagacttactcggagctatgttcttcagccattacattgcagacaggtttaagggcctttggtgcttataacgagtacattatcagaaaacaaaataaagcttctatttgtgtccaggcttgttggcgttgccatagagatcatttgaattaccttaaaatgaaaagatcagtgttaatttatcagtgtgcatggagaagacggattgctagagaagaactcagaaagctcaaaatggctgcgagggacacagaagccctgaaggtggagaaggagaaacttgaggagcacgtggaagagctgactagccgtttgagcttcgaaaagaatcttaggattgatctagagaagagcaaggcaagagaaatttgcaaactacaggccactcttcgtgagatggaacagcgggttgaagaagccatagagatgcatgaaagagaattagccaaaaaggctattgaggaagctttagctcaagaaagggaaaagatcaccgtattgactaatgaagtcgatgagttgaaggtattactatcaagagaacgagaagaaaacagtgcaactaagagtgcactcgttgttgttcgtgaagaaaatgatgtgctgaataagaaaattgtggttgcagatgcaagcatggagcagcttagagatactgtaacgaggttgcaagaaagtttaattgagggagaagctactttgcttgcagaaagaaaagaaagtgatgcagccaagaaatcactcactgaagctcatgtaaaaaacgaggaactattcaataaaattgaagtagctgagcataacgttagtatcttccaagacgacatccaaagacttgaagaaactgcagctacattggagacttcattgttatctgagaaacaacagagtactgcaatcatttcacaattaactgaagcacaacaggacatccaagtactgcagaagaaatttgcagatgccaataagacaattgagctgcttcaagattctttgaaaaggtgtgaggacagcacaaccacaagggatgccttatatgtagcagaaagacaggagcatggtcaaaccaaacaagcactttccaaagctcaggaaagaaatttggaattgcttaggaaagttgatgatagtgagaaaactttaaacaagatgctggagaatgctcagagacttgagaaacatgcaacagcaagggaatccttgcttcttaagacaaagcagaatcttgactgcactacaaaagcgctaactgaagcacgagggagaaaccgagacttattgacaagttttgaggattcagctaaaaaaatcaatatgcttgaggattcacttaacagactagaagaatgcacagcagagaaagactctttgttggcagtagaaagaaaacaaaacaaaacgaccaaagaagaactggccaatgcccagaaaacaatcgatgaattagtacatgagtcacagcagtcccaggaaataagaaatcaattggaagataccatcaagaggtttaaagcagaatcgactgccagagacacaatattattatcagagaaacaggcacatgagacgaccaagaaagttctaactgaaattcagtcgagaaatgaagagttaatcaagaaaattcaggattgtgataaaaatattcttgagcttcagctaactgtggagaggcttcaggaaaacacatctactacagaggctttactgttgagagaacgagaacaaaacaatgcaaccatgaaggcacaagctgaaactcaagaaataaatttgcagttactgaacaagcttgaggacgttgagacaaaaattggtcttcttcaaggaagtgtacaaaggcttggtgataatacagcgaaagacactttgctgctatctgagaaacgtgagaaggatgccctgaaggaagcacttactgagtctgaatacaaaaatgaagagttactgataaaaactgaagaagccaacaaaaaagttgagcatcttcaaaacactataaattcgcttaaggagaacatggcagcttctttggaagctgaaagacaagaaaatgaagcaatcaagaggtcccttgttgaagctcaggagagaaacgatgcattatttaagaaagttagggatagcgaatacagggcccaccagcttcaagatactgtccaaaagcttcaagtagatgccatatctagactgtctagctttgtaatggagagacaagatggtgatggtgtcaagaatgcacatactgaggttcatggaacaaatgaagatctaatgaggagaaatgaaaacctcctaaaaaggaatgatgacttggtgaagaagattgaagattctgctatacttgttactgagcttagagggaacttggaaaggttagaagggaaagctgctaatttagaggctgaaaatcaattgcttcgtcaacaagcaattgcaactcctccatcaacagcaaagtcttctcaagctgcatgctctaaaatcaagatgtcaagaaagtggtcatattttaaatggcaacgtagcatatgctgaaatgaagtcctcaaccggtcaaacagaaatgagaccctcgatgggcagttcccttgatttgattaaccacaaggtttatgaaaatgggcaaagcttgtttaatgatgtatatcagcaccagcaaccccagaatcatcaacagttattgctgaaatatattacccaatatcttggattctctgggagaaaacctattgctgcgtctcttatatactactgtcttcttcattggagatcttttgaagaagcaaagacaactgtctttgacagtattatacaaattgtaaactcagcaactgaggctcaacatgatacgagaagcttggcctactggctgtccaacttatccacattgtcagttctcctgcaacgttcatttaaagccaccagggcaactgcctcaactccacatagacgaagaatttcctgtgaaaggatttttcaagccaatcaaacttcaagcagtggacttgcttgtctcagtgctcaatcagtggatggaggtaccgtgtttcaccaaattgaagcaaggtatccggcttcgctcttcaagcagcagctagtggatcaggttgaaaaggtgtatggagtgataagcgataaaataaaaaaggagctaaacccattacttgagttgtgcatacaggatccaagaacttactcaaatcaagcaaaggccttgatgtctccttctagtggcttgggccaacaggatcaactcatgcattggctgagcatcgtgaaaatcttcaacagctatttgcatgtcctcagagccaatcatgttccctcaattttggtccacaaattgcttacccaaatattttctgtggtcaatgtgcaattgtttaacaggctcctcttgaggcgtgaatgctgttcctttagcaatgggcaatacatcaaagatgggctaactcaactaagatattggtgcaatgacgtcagtcaagagtttgcagactcagcatgggtagcactgaggcatataagacaagctgttgactttgtggtaatttctctgaagccgataaggacatgggaagagatatgcaatgatatttgcccggctctcagtttgcagcagctagagcggatagtcggtatgtattgggatgatttaaagggaacaaatgtaacttcagccgagttcatgtcaagcatgagagctatgctgcgcgaagaatcaaatagcgtctccagcttttcggtcctgctggatgatgattccagcatacccttttcgcttgaagatatttcgaagtcaatgccaaacattgaggagacgtcagttaatgacctgctgcctttcatccgcgagaaccaaagctttgcgtttttattgtagtggagaggacacgaatccttagatttgttgtatgagattgcaggccagtctgtgtggagttactatccgtctgatgggtatgcgttgactttacacgtgctactgtttgattacctagcttacctgcatccacaggaactctcaaaactgacgtatccattcggccaccctcacgggagcctgcaggtatccaatcagaccgtatccgtgtgatggatgactgtgtctgtgtaggtgtgctcgcatgagcctggccctgacagcagatatgtgatttttacctgtatcggcgtatgtaggcaaaaagctaccgcaaatacgtgagttgcatcatgcatgtctaatcgagtgcgtgcagttaacccaacatgctctcggagctagtcaacgcatacaaagagccatgttag

SEQ ID NO: 218585 - DNA, 6887 bp, Zea Mays
ccgcaaccatcccgctgctctccgttccatcaccttgcgtcttgcgctcggcagcctcgtctcccccctctttcggcgaatgccacgccgcctcgaatcgcgcgctcatggcccgagcgatcagcctcttaccacctctccacccccaatccatcagcgccaaaaatagataggggatgaggaatcgcctctggtgcctggttcgcaccccattcccctccgcctcccggttcgatgctggtatcgcgcgcctctgcacgcgctcgagtcggaccacacggcgtgcctacttggcggcgaggcaaccggcgaccggcgcaagggagggagccgacgccgctgccgaacctgattcgacctcgccgacgacagccgtcgcgttttggtgatcgcattacgcatggctgccacattaaagattgttgtaggctctcatatatggctggaggataaagatttagtttggattgatggcgaggttttccgaactgaaggtcaaaatgtccatgtccacactaccaatggaaagacggttactgtgagcatatcagacattcatccaaaggacacagaagtgccatctgatggcattgatgacatgacaaggctatcatacttgcatgaacctggtgttctaaataatcttgctgttcgatatgcaaaaaatataatttatacctatactggcaatattctgattgcaattaatccattccaaagtctgccccatctttctgaaccccgtaccatggagaagtacaaaggtgcaaattttggtgagctcgaccctcacgtgtttgcaattgccgatgtttcttacaggcagatgatgaatgagggaaagagcaactccattttggtgagcggtgaaagcggtgctggtaaaactgaaaccacaaagatgctaatgagatatcttgcttttttgggcggacggtctaaaacaggggggaggacagttgaacaacaagttttagaatctaatccagtccttgaagcttttggcaatgcaaagactgtccgtaacaacaactcaagtcgatttggaaaatttgttgaaatccaatttgacaagagtgggaagatatcaggtgctgccattagaacatatttgcttgaaagatctcgtgtttgccaaatcaatagtccagagagaaactaccattgcttttactttctatgtgcagcaccgttggaggatatcaaaagttataagcttggtgacccatcatcattccactatctcaaccaatctacgtgcattaaacttgacgaaattagtgatgctaaggagtatcttgcaacacgaagtgcaatgaatacagttggcattactgagcaggaacaggaggctatattccgggtagttgctgctgtgcttcatctcgggaacatcagttttgtgaaagggagagaggcagattcatctgtaataaaggacgagaaagctaggttccatcttaatgcaacagcagagctcttgatgtgcgattgtggaaatctggagaacgcattaataaagaggaaaataaatacaccagaaggagttataaccacaacagttgatcctaattctgctactgttagcagggatggcttagcaaagcaaatatattctcagctatttgactggctcgtaaacagactaaatgcctccataggacacgatacatcctctgaccgattgattggagtacttgatatctatggtttcgaaagttttaagactaatagctttgaacaattatgcatcaatttcaccaatgaaaaacttcaacagcattttaatcagaatgtcttcaaaatggagcaggaagagtataacagggagcagattgactggagctacatagaatttgttgacaaccaagatgttctagacttgattgagaagaagcctggtggaattattgcacttcttgatgaagcttgtatgtttcctaagtgcacacacgaatcattttctcagaagttgtatgagaaattcaggaataacaaaagattttgcaaaccaaagctttctcgcactgcatttaccatacagcattatgcaggagaagtaacttaccaatctgatcagttcctggacaaaaacagagactatgtagttgtagaacatcaagaattactgaatgcttccaagtgctcttttgtgtcagggttattcccatcagtactagagaacacaaaagcatcgaagtcctccattgctactcgcttcaagtggcaactccaagaactaatggagactttgagttctacagaaccacattacatcagatgtattaagcccaataatcatcttaagcctgctacttttgagaacatcaatgttctgcagcaacttcggtgttcaggtgttcttgaagctattagaatcagctgtgctggatatcctacaagaaaaatatttcatgattttctctgtcgattttgcattcttgctcctgaagttttcacagaaagaaacaatgaaaagttaatatgccaaaagattttggacaatattggactccatggttatcagattggaagaacaaaggtgtttctgagagctggtcagatggctgaattagatgctagaagaactgaagtgcggaataaagcagctataaccgttcagagtagatttcgcactcatgttgctcgtgagcaattccttgcattacgcatgacatcaatatcttttcaatcttttgttagagtgatattggcctccattacattgcagacaggtttaagggcctttggtgcttataacgagtacattatcagaaaacaaaataaagcttctatttgtgtccaggcttgttggcgttgccatagagatcatttgaattaccttaaaatgaaaagatcagtgttaatttatcagtgtgcatggagaagacggattgctagagaagaactcagaaagctcaaaatggctgcgagggacacagaagccctgaaggtggagaaggagaaacttgaggagcacgtggaagagctgactagccgtttgagcttcgaaaagaatcttaggattgatctagagaagagcaaggcaagagaaatttgcaaactacaggccactcttcgtgagatggaacagcgggttgaagaagccatagagatgcatgaaagagaattagccaaaaaggctattgaggaagctttagctcaagaaagggaaaagatcaccgtattgactaatgaagtcgatgagttgaaggtattactatcaagagaacgagaagaaaacagtgcaactaagagtgcactcgttgttgttcgtgaagaaaatgatgtgctgaataagaaaattgtggttgcagatgcaagcatggagcagcttagagatactgtaacgaggttgcaagaaagtttaattgagggagaagctactttgcttgcagaaagaaaagaaagtgatgcagccaagaaatcactcactgaagctcatgtaaaaaacgaggaactattcaataaaattgaagtagctgagcataacgttagtatcttccaagacgacatccaaagacttgaagaaactgcagctacattggagacttcattgttatctgagaaacaacagagtactgcaatcatttcacaattaactgaagcacaacaggacatccaagtactgcagaagaaatttgcagatgccaataagacaattgagctgcttcaagattctttgaaaaggtgtgaggacagcacaaccacaagggatgccttatatgtagcagaaagacaggagcatggtcaaaccaaacaagcactttccaaagctcaggaaagaaatttggaattgcttaggaaagttgatgatagtgagaaaactttaaacaagatgctggagaatgctcagagacttgagaaacatgcaacagcaagggaatccttgcttcttaagacaaagcagaatcttgactgcactacaaaagcgctaactgaagcacgagggagaaaccgagacttattgacaagttttgaggattcagctaaaaaaatcaatatgcttgaggattcacttaacagactagaagaatgcacagcagagaaagactctttgttggcagtagaaagaaaacaaaacaaaacgaccaaagaagaactggccaatgcccagaaaacaatcgatgaattagtacatgagtcacagcagtcccaggaaataagaaatcaattggaagataccatcaagaggtttaaagcagaatcgactgccagagacacaatattattatcagagaaacaggcacatgagacgaccaagaaagttctaactgaaattcagtcgagaaatgaagagttaatcaagaaaattcaggattgtgataaaaatattcttgagcttcagctaactgtggagaggcttcaggaaaacacatctactacagaggctttactgttgagagaacgagaacaaaacaatgcaaccatgaaggcacaagctgaaactcaagaaataaatttgcagttactgaacaagcttgaggacgttgagacaaaaattggtcttcttcaaggaagtgtacaaaggcttggtgataatacagcgaaagacactttgctgctatctgagaaacgtgagaaggatgccctgaaggaagcacttactgagtctgaatacaaaaatgaagagttactgataaaaactgaagaagccaacaaaaaagttgagcatcttcaaaacactataaattcgcttaaggagaacatggcagcttctttggaagctgaaagacaagaaaatgaagcaatcaagaggtcccttgttgaagctcaggagagaaacgatgcattatttaagaaagttagggatagcgaatacagggcccaccagcttcaagatactgtccaaaagcttcaagtagatgccatatctagactgtctagctttgtaatggagagacaagatggtgatggtgtcaagaatgcacatactgaggttcatggaacaaatgaagatctaatgaggagaaatgaaaacctcctaaaaaggaatgatgacttggtgaagaagattgaagattctgctatacttgttactgagcttagagggaacttggaaaggttagaagggaaagctgctaatttagaggctgaaaatcaattgcttcgtcaacaagcaattgcaactcctccatcaacagcaaagtcttctcaagctgcatgctctaaaatcagtatgatccatagatgtcaagaaagtggtcatattttaaatggcaacgtagcatatgctgaaatgaagtcctcaaccggtcaaacagaaatgagaccctcgatgggcagttcccttgatttgattaaccacaaggtttatgaaaatgggcaaagcttgtttaatgatgtatatcagcaccagcaaccccagaatcatcaacagttattgctgaaatatattacccaatatcttggattctctgggagaaaacctattgctgcgtctcttatatactactgtcttcttcattggagatcttttgaagaagcaaagacaactgtctttgacagtattatacaaattgtaaactcagcaactgaggctcaacatgatacgagaagcttggcctactggctgtccaacttatccacattgtcagttctcctgcaacgttcatttaaagccaccagggcaactgcctcaactccacatagacgaagaatttcctgtgaaaggatttttcaagccaatcaaacttcaagcagtggacttgcttgtctcagtgctcaatcagtggatggaggtaccgtgtttcaccaaattgaagcaaggtatccggcttcgctcttcaagcagcagctagtggatcaggttgaaaaggtgtatggagtgataagcgataaaataaaaaaggagctaaacccattacttgagttgtgcatacaggatccaagaacttactcaaatcaagcaaaggccttgatgtctccttctagtggcttgggccaacaggatcaactcatgcattggctgagcatcgtgaaaatcttcaacagctatttgcatgtcctcagagccaatcatgttccctcaattttggtccacaaattgcttacccaaatattttctgtggtcaatgtgcaattgtttaacaggctcctcttgaggcgtgaatgctgttcctttagcaatgggcaatacatcaaagatgggctaactcaactaagatattggtgcaatgacgtcagtcaagagtttgcagactcagcatgggtagcactgaggcatataagacaagctgttgactttgtggtaatttctctgaagccgataaggacatgggaagagatatgcaatgatatttgcccggctctcagtttgcagcagctagagcggatagtcggtatgtattgggatgatttaaagggaacaaatgtaacttcagccgagttcatgtcaagcatgagagctatgctgcgcgaagaatcaaatagcgtctccagcttttcggtcctgctggatgatgattccagcatacccttttcgcttgaagatatttcgaagtcaatgccaaacattgaggagacgtcagttaatgacctgctgcctttcatccgcgagaaccaaagctttgcgtttttattgtagtggagaggacacgaatccttagatttgttgtatgagattgcaggccagtctgtgtggagttactatccgtctgatgggtatccaatcagaccgtatccgtgtgatggatgactgtgtctgtgtaggtgtgctcgcatgagcctggccctgacagcagatatgtgatttttacctgtatcggcgtatgtaggcaaaaagctaccgcaaatacgtgagttgcatcatgcatgtctaatcgagtgcgtgcagttaacccaacatgctctcggagctagtcaacgcatacaaagagccatgttag

SEQ ID NO: 218586 - DNA, 4579 bp, Zea Mays
cgtattgttcacctatttatagattggaagaacaaaggtgtttctgagagctggtcagatggctgaattagatgctagaagaactgaagtgcggaataaagcagctataaccgttcagagtagatttcgcactcatgttgctcgtgagcaattccttgcattacgcatgacatcaatatcttttcaatcttttgttagagtgatattggcctgtaagttacatgttttcctcagaaaacaagctgcagtactgcatatacagaaaagttaccgctgctattttgcttggaagacttactcggagctatgttcttcagccattacattgcagacaggtttaagggcctttggtgcttataacgagtacattatcagaaaacaaaataaagcttctatttgtgtccaggcttgttggcgttgccatagagatcatttgaattaccttaaaatgaaaagatcagtgttaatttatcagtgtgcatggagaagacggattgctagagaagaactcagaaagctcaaaatggctgcgagggacacagaagccctgaaggtggagaaggagaaacttgaggagcacgtggaagagctgactagccgtttgagcttcgaaaagaatcttaggattgatctagagaagagcaaggcaagagaaatttgcaaactacaggccactcttcgtgagatggaacagcgggttgaagaagccatagagatgcatgaaagagaattagccaaaaaggctattgaggaagctttagctcaagaaagggaaaagatcaccgtattgactaatgaagtcgatgagttgaaggtattactatcaagagaacgagaagaaaacagtgcaactaagagtgcactcgttgttgttcgtgaagaaaatgatgtgctgaataagaaaattgtggttgcagatgcaagcatggagcagcttagagatactgtaacgaggttgcaagaaagtttaattgagggagaagctactttgcttgcagaaagaaaagaaagtgatgcagccaagaaatcactcactgaagctcatgtaaaaaacgaggaactattcaataaaattgaagtagctgagcataacgttagtatcttccaagacgacatccaaagacttgaagaaactgcagctacattggagacttcattgttatctgagaaacaacagagtactgcaatcatttcacaattaactgaagcacaacaggacatccaagtactgcagaagaaatttgcagatgccaataagacaattgagctgcttcaagattctttgaaaaggtgtgaggacagcacaaccacaagggatgccttatatgtagcagaaagacaggagcatggtcaaaccaaacaagcactttccaaagctcaggaaagaaatttggaattgcttaggaaagttgatgatagtgagaaaactttaaacaagatgctggagaatgctcagagacttgagaaacatgcaacagcaagggaatccttgcttcttaagacaaagcagaatcttgactgcactacaaaagcgctaactgaagcacgagggagaaaccgagacttattgacaagttttgaggattcagctaaaaaaatcaatatgcttgaggattcacttaacagagaaagactctttgttggcagtagaaagaaaacaaaacaaaacgaccaaagaagaactggccaatgcccagaaaacaatcgatgaattagtacatgagtcacagcagtcccaggaaataagaaatcaattggaagataccatcaagaggtttaaagcagaatcgactgccagagacacaatattattatcagagaaacaggcacatgagacgaccaagaaagttctaactgaaattcagtcgagaaatgaagagttaatcaagaaaattcaggattgtgataaaaatattcttgagcttcagctaactgtggagaggcttcaggaaaacacatctactacagaggctttactgttgagagaacgagaacaaaacaatgcaaccatgaaggcacaagctgaaactcaagaaataaatttgcagttactgaacaagcttgaggacgttgagacaaaaattggtcttcttcaaggaagtgtacaaaggcttggtgataatacagcgaaagacactttgctgctatctgagaaacgtgagaaggatgccctgaaggaagcacttactgagtctgaatacaaaaatgaagagttactgataaaaactgaagaagccaacaaaaaagttgagcatcttcaaaacactataaattcgcttaaggagaacatggcagcttctttggaagctgaaagacaagaaaatgaagcaatcaagaggtcccttgttgaagctcaggagagaaacgatgcattatttaagaaagttagggatagcgaatacagggcccaccagcttcaagatactgtccaaaagcttcaagtagatgccatatctagactgtctagctttgtaatggagagacaagatggtgatggtgtcaagaatgcacatactgaggttcatggaacaaatgaagatctaatgaggagaaatgaaaacctcctaaaaaggaatgatgacttggtgaagaagattgaagattctgctatacttgttactgagcttagagggaacttggaaaggttagaagggaaagctgctaatttagaggctgaaaatcaattgcttcgtcaacaagcaattgcaactcctccatcaacagcaaagtcttctcaagctgcatgctctaaaatcaatgcatttcaacagagatgtcaagaaagtggtcatattttaaatggcaacgtagcatatgctgaaatgaagtcctcaaccggtcaaacagaaatgagaccctcgatgggcagttcccttgatttgattaaccacaaggtttatgaaaatgggcaaagcttgtttaatgatgtatatcagcaccagcaaccccagaatcatcaacagttattgctgaaatatattacccaatatcttggattctctgggagaaaacctattgctgcgtctcttatatactactgtcttcttcattggagatcttttgaagaagcaaagacaactgtctttgacagtattatacaaattgtaaactcagcaactgaggctcaacatgatacgagaagcttggcctactggctgtccaacttatccacattgtcagttctcctgcaacgttcatttaaagccaccagggcaactgcctcaactccacatagacgaagaatttcctgtgaaaggatttttcaagccaatcaaacttcaagcagtggacttgcttgtctcagtgctcaatcagtggatggaggtaccgtgtttcaccaaattgaagcaaggtatccggcttcgctcttcaagcagcagctagtggatcaggttgaaaaggtgtatggagtgataagcgataaaataaaaaaggagctaaacccattacttgagttgtgcatacaggatccaagaacttactcaaatcaagcaaaggccttgatgtctccttctagtggcttgggccaacaggatcaactcatgcattggctgagcatcgtgaaaatcttcaacagctatttgcatgtcctcagagccaatcatgttccctcaattttggtccacaaattgcttacccaaatattttctgtggtcaatgtgcaattgtttaacaggctcctcttgaggcgtgaatgctgttcctttagcaatgggcaatacatcaaagatgggctaactcaactaagatattggtgcaatgacgtcagtcaagagtttgcagactcagcatgggtagcactgaggcatataagacaagctgttgactttgtggtaatttctctgaagccgataaggacatgggaagagatatgcaatgatatttgcccggctctcagtttgcagcagctagagcggatagtcggtatgtattgggatgatttaaagggaacaaatgtaacttcagccgagttcatgtcaagcatgagagctatgctgcgcgaagaatcaaatagcgtctccagcttttcggtcctgctggatgatgattccagcatacccttttcgcttgaagatatttcgaagtcaatgccaaacattgaggagacgtcagttaatgacctgctgcctttcatccgcgagaaccaaagctttgcgtttttattgtagtggagaggacacgaatccttagatttgttgtatgagattgcaggccagtctgtgtggagttactatccgtctgatgggtatgcgttgactttacacgtgctactgtttgattacctagcttacctgcatccacaggaactctcaaaactgacgtatccattcggccaccctcacgggagcctgcaggtatccaatcagaccgtatccgtgtgatggatgactgtgtctgtgtaggtgtgctcgcatgagcctggccctgacagcagatatgtgatttttacctgtatcggcgtatgtaggcaaaaagctaccgcaaatacgtgagttgcatcatgcatgtctaatcgagtgcgtgcagttaacccaacatgctctcggagctagtcaacgcatacaaagagccatgttag

SEQ ID NO: 218587 - DNA, 1737 bp, Zea Mays
gttctggacctcgatttcagctcggagtagtttactcccttgagaggggggagatctgagattgtttttgtttcaccaactggtgaggaaattaacaacaagaggcaattacttcagtacctaaaggcacaccctggaggccctgctgtttcatagcttgattgtggaactggtgataccccaaggcgttctgctcgtattagcgagaaagtcaaggtatttgatagcccagagggcgagaagatcccgaagcgcagcaggaactccagtggtaggaagggtaagcaggggaagaaggaaacccctgagaccgaagaagccaaagatgctgaaactggcaaggaggcagaggaggccccaagcgaagatgccgcaaaggagactgatgtggagatgaagcctgctgaagaggtgaagggggcctctgctgaaacagaagatgctgacatggctgatgctcctgcaccagcaccaatggaagaagataagaaacaaactgaagaactggcagaagctattgcagctcctcctgtgccatcggaggagaagaaagatgtcaagccagctgagcctgaagctgcagcaagcaacccaactgaggattcggcccctgctcctgctgaacctgctgatgttgctgctccagctgctgagcccaaatcagacgccaaacctgctgctgttgctgctccagtgcctgagaccaaatcagacgccgagcctgctgctgttgctgctccagcgcctgagaccaaatcagacgctgagcctgctgctgttgctgctccagctcctgagaccaaatcagtagccgagcctgctgctgttgctgctccagcgcctgagaccaaatcagatgccgagcctgctgctgttgctgctccagtgcctgagaccaaatcagatgccgagcctgctgctgttgctgctccagtgcctgaaacgaaatcagatgctgagcctgctgctgatgctgctccagttcctgagatgaaatcagagtccgagcctgctgctgttgctgctccagcgtctgaaaccaaatcagacgccgagcctgctgccgttgctgctccagcgcctgagaccaaatcagatgccgagcctgctgctgctgctgctccagtgcctggaaccaactcagatgctgctgctactgatccagcacctggaaccaaggccactgccgccgatccagcacctggagctccagcagagaactccaccgacaaagacggaagccaggagagccagcccgtgaacaatggacagctgccgcactcgacggtgaagtgcacctgaagccgcaacgccggaaaaacctgaaccccttccggcgccgtgtatctcatttaggaacaaacattcgcattcgcattcacattgttatcagttaaaaagtctatggaacggtaagcatgttaattagtcagtctgacgctgctgggtgacaggttggtaattaggctctgcatttagctgttttgtatggctgctgtcgccgccatacatgtatcatcttcttgtggttgtatggtacctaaccgcgtaaacatgttaaccttaggccatgtattaattactccgctctaatgtttgtatgtgtattgtcaaacttgcagaaccagttgcatgcatgaaaaataataagtgtctgggtatctatgggtgcggggtacccatctccgcaccagcgcacccagccagaaacagcagtttgtttggatctaatcagaa

SEQ ID NO: 218588 - DNA, 739 bp, Zea Mays
ggcagagttggcacggcccacagcagcgtgaagtcgacggggcagaaccctcaggccgccgggttaccgcagcagctgaacaacggcaccaccatggtcttcttcggcggcaacacacagaccagcagcgccgccgcctcatctgccaactctctcttcgccgtcaccgtcaccatcacagcagccgtcgcgctcgcgctctcgcgctcgactcgcctgtgaccggtcatcatcgctgtcaggtgggccacgcttatcagaagaccggtgagcatacatacagtatgttgagcccctagcgactgcgacggaacatgagcatagtattctaggcttgtagcttaggtaggacgagtagaatttcttcttttgttttttggcttcgaaaatattcttttcatccgttgggcagagactacaggtggtgtggggcaattctttcactgttctttctcctagttaggtcgtatgcatcgggaggatgtgctgtaacctcaaaagcgattattggttgattgattcgattggggggataatcaaaatttaagcttctttcttctcacacttcattacgctctcaacatttttcaacaaccgacagcaactatgccagtgaatgattgggagtgctcgggtgctaaataatcaacgtgttgtcgcgagccggctatattcctggactcgtgtattgacactagttaaatatctgcacgtcacatacagaaaataaaataacaca

SEQ ID NO: 218589 - DNA, 1883 bp, Zea Mays
gcggccgcggagaaatggcggagcgagaccgggtcttggagagagagcgaaggcagatggagcagatcctagagctggatatggaggagctccaggtagaggaggtcgacgacgacggctcatcctcctcctccgacgtcgacaccttccttagaaatactcatggagatggagggattaacacttatgaggagctttcaatcgatacatctactgtttccttgcaggatcacacctatcttggggcaaaggttgatggtgcccgaggcaaatttgctttcctgcatggagacagagtcctcaatctgccaatgttttatctccaaggagttgttttgtttcctgaagcttccctacatcttcgagtattccagcctagattagtggaagctattgacaaggctattaatcatgttgatgctccatgcatgataggtttatgtttatcgacacacaaatgatggacattatactattgcttctgtcgggacaatggcagagatactgaaaattcaacagctgtatgatggttcatcatgtattttctcccatggtcagcagcggtttcgtcttttgcgccattggttggatgtcgacggagtaccatggggtgaagtccaaattattgaagaagatacacctcaaagaactccaagagatgcttttgcacaattagctgcacctaacagtttcaggcaatgtgcttcatcgataatgcccagtttgcatgtgtattgttctacacaacttgatcatgtggattctgatatggacagggattcactatcacccactagcacttcaagcgatcactcaataacagataaaagaatataccttttaggttcccgctccagtggtttggtaaggtgtggtattgcggatgaatcctcaaatgaaggccaaaattctgtacatgaacagtcttgtcagagccatgactctgttaaagaaattgatgggtatggtcagccagataagaatacaaacacaggagatgaggataatctttgtttcatatcctccaaatcatttcagagaacaagaaagaaagataccaaacagcagaaacactacttcacaacgaaaaatgcttcacaggctccattgtcattttggcctcactgggcttatgagatgtatgattcgtattcactttccaggagagctgcaggaaaactctatatctttatattatagagagataagtcctgttatacgaaagggcatctagcgtaatggttaagccttccgagtagcacctctaggtcctgggttcgatccctctcggtggcgaatttctggcttggttaaaaaagttccctcactgtgcctcgcccgctcccggattacgccttgtgcgctaccctccggctgggccgttgcagagtgggcggtgacggcccgctagtgatgggggttagggttaaaggattttctcggctgggaccatgtttcggtctcttcttaatataataccgggagggcggtctttccctccccggccgagttttttgataagtcctgttatgtcaaagtataaatatgtgcagttgtgatttaagtgttgttgtatgtatgatcttgaattttcttcatggcagatttgtggagacaagtaattttaaacccaagcatggatgatcatgtgagaaaaccaaattatttgtcatattgcattggaagcaaacttcctatctcagaatctctgaggcaagaattgcttgagattgatggagtctaaaaaaaaacttgacctgcggggggtaagacagcccccgggcattgtattaagaagaagaccttctcacacaggtcaagaaaacccccgaacccctaccccacccatacacagcggcatcaaagcccatgtgagaacgacc

SEQ ID NO: 218590 - DNA, 3101 bp, Zea Mays
ccgcggagaaatggcggagcgagaccgggtcttggagagagagcgaaggcagatggagcagatcctagagctggatatggaggagctccaggtagaggaggtcgacgacgacggctcatcctcctcctccgacgtcgacaccttccttagaaatactcatggagatggagggattaacacttatgaggagctttcaatcgatacatctactgtttccttgcaggatcacacctatcttggggcaaaggttgatggtgcccgaggcaaatttgctttcctgcatggagacagagtcctcaatctgccaatgttttatctccaaggagttgttttgtttcctgaagcttccctacatcttcgagtattccagcctagattagtggaagctattgacaaggctattaatcatgttgatgctccatgcatgataggtgtggtttatgtttatcgacacacaaatgatggacattatactattgcttctgtcgggacaatggcagagatactgaaaattcaacagctgtatgatggttcatcatgtattttctcccatggtcagcagcggtttcgtcttttgcgccattggttggatgtcgacggagtaccatggggtgaagtccaaattattgaagaagatacacctcaaagaactccaagagatgcttttgcacaattagctgcacctaacagtttcaggcaatgtgcttcatcgataatgcccagtttgcatgtgtattgttctacacaacttgatcatgtggattctgatatggacagggattcactatcacccactagcacttcaagcgatcactcaataacagataaaagaatataccttttaggttcccgctccagtggtttggtaaggtgtggtattgcggatgaatcctcaaatgaaggccaaaattctgtacatgaacagtcttgtcagagccatgactctgttaaagaaattgatgggtatggtcagccagataagaatacaaacacaggagatgaggataatctttgtttcatatcctccaaatcatttcagagaacaagaaagaaagataccaaacagcagaaacactacttcacaacgaaaaatgcttcacaggctccattgtcattttggcctcactgggcttatgagatgtatgattcgtattcactttccaggagagctgcagattgatggagtctcatatcgactacagcgggagattcagctgctcaaagccttcaatatcatacgatgtagaaattgcctggtaatgtttactttcttttaaaaaaaacagttactttttcaaagtttctgatcatacttcatttcttcaattgtctcacatggctaagacttgtggccttatctttatccagtctgcagttagagccagtggtaatgcatcatgcatagtggtgacatgaaaatgaaactggacctggggtttcaaattttgttgtgatttagggtttcttcaggatttcaacattttgttttgcataagtgcagtgtctcgaatacctaataaaaagaagaagaaaaatgaagctggctcattatttacatagagatggtgaaagctcactggtcaacttttggcgaattgatttttgagaatcagcagagaaactcttgcttggttcttatcccatctgattcatggatctggggtagtcctggggatatcagctataaaactgatcaaataatttctgcatagttttgattaatacaagaggtgacaggctcatttcttgccgtagatccgtattgcaagacgaagtgacatggtggtgacgtccagtgacagccctatgtctttgcacagcaggcctcacggttttgtgaaagagattattacagtatacaatgccactggccttgcactgcgtggcgacccttccaaaactcacagctggtttccagaatacacatggacgatcgcgttgtgcaatgcctgccagtccaatataggctggctgttcagagtcgatgacaagaacctgcatccgagatccttctgggcgatacgcagttcccaaatttcagacgatacacagtcaagagatagaactgatcagaccatccatgtataagctgcgtgaccatttgttgaaattccaacaatccattaacatctgccttccattattctctgcgagattcaatttggctgcatggtgtccccaagtggctaaggtttctagtaaaatgaaactgaaaacaaagatactgagatcataagcttaacccgccacatgggcacctacgttacctgaaaccttcctttgtggggtacaatcaggcctttctcaatatgctccgggtgtattcagcacgacagatttatctaagggctagtttgagagtccaaaaaccggagaggattggaggggctaaaatcaactttattttagcccctttaatctcctctgtttttgtgacttccaaattagccctaaaagctactatctgtctggatatctccaaagctaccagttcagcaaggcccttaccagggtgcaagacagacagatggaccttcagactgcaatgctcgtacttctggcaagtttcccccactgttggtatatacacaactggaagcagacattgtcaatcaggagcttgactcattatttatctcctggaaaacaaatgcatcgttcaatcaacaagataaaagcactcccaactgaaataataacctggctagcaattgactctgtgaatccaaattttctcttggagaagtcgattagcgtagtgcagcgcagcgctacaagcctacaaagggaccttgaactgccgaacattctgcaacgtcctgttctttggtacaagatgcacaagcttcactgaaatcacgaactgctaaggcaggtgttagatttagacgtgtttagtttatagagactaatttttagtcccttcattttattccattggcgtctagaacggattggttatacccgttggggtaccggatatgagtagtgcaaatacccgtttttttggatacggattcgggtagttttatattcgggacggatacgtgtaaatacccggatactgtagcttcggattcgggtcggatacagagcaagaa

SEQ ID NO: 218591 - DNA, 3666 bp, Zea Mays
agcaaaagcacttcgagtactccacaccacaccagtccagctgtccgcccccgccacttcgagttcggttggaggcttggaggcttgggcaaaaccctcctcgtcgtcgcgcgctccgcctgcaccacccgccgccgaagagctctctttcaaaaactagcaaagatggtacaatgtactcaacctcctccccagttaaagctcccagagagtaagatcacagaaccgacagatgatgagaaccaagatttgccaccaaaacctgagaaaaggactaggatgcaccacattgagaggcacagatcttgtgttgtgaccttatctgacatagaacttaatggtctgcaacctcgtcatctgcaccaacccattgagatcagcccaggaggatcacagtgttcgctccatgaagaaacacctacagatactaatgcatcacacaggcatgcaattgcagatgctgcttgggaagccctcaaaaggtcaatggtttacttcagaggccaaccaattggaactgttgccgcaatagacaagtctcagggggcagcactgaactatgaccaggttttcatgagggatttcattcctagcgcattggcttttcttatgaaaggagagcacttgattgtgaagaactttctggtagaaactgcacgccttcagtcaagggagaagatggttgaccttttcaagcttggtcagggtgtgatgcctgcaagctttaaggtgcatcatcgcaaccctactcagaagacagaaagcttactggctgattttggtgaaactgccattgggagggttgctcctgtagattctggcttatggtggattattctccttcgtgcttacaccaaatggacaggggacaattctctggctgaaagtactaactgccaaagggccatgcaccttattctcaggttgtgtctctcagaggggtgtgatacttctccagccttgctttgtgctgatggatgctccatgatagaccgaagaatgggcatatatggctacccaattgaaatccaggctctctttttcatggctatgagatgcgccctgagtctgttgaaacaagagtccgatgctgacttcgtgaaccacatcacaaaaagaatccaagctctgagctaccacttgcacagttactactggttggacttccagagacttaatgacatataccgctacaagaccgaagagtactcacagacagctctgaacaagttcaacgtgatgcccgaatcgatacctgactggatatttgacttcatgcctagccgtggtgggtacttcattggcaacgttagtcccgcgaggatggatttccgctggttctgcctaggcaacttcatcgcgattctgtcgtcgttggctaccggagagcaggctgaagcgatactggatcttgtggaggagcgctggcaagaactcatcggtgagatgccgctcaagatctgttaccctgcgatggaaaatcaggaatggcagatagtcactggatgcgacccgaagaacaccaggtggagctatcacaacggaggctcgtggccagtgctgctgtggctgctggtggcggtgagcgtgaagctggggcggccgcacctggcgcggagagccgtggagctgatggagcagcggctggccaaggacgacttccccgagtactacgacggcaaggccgggcggtacgtggggaagcaggcgcgcaagttccagacgtggtccgtggccggctacctggtggccaagatgctcctggacgacccctctcacctgcgaatcgtggcgctggagggcgacagccactccagggcccccttcctcaagcgctccaactcgtgcccatgacccccaggccccagcacagcacaggccgcatgcattacctttccacgcaccagtttgcccacaccgagactacgagagtaaaaagtttcgtttcgatgcagtgcattcttcttactacataagtatgtataatcaagcggtagtagtgtgatgtgctaccaagaggaggatgacagggacaggataccgagtatgtatgtactgtctccatttgccagatcagatgccactaaactggttaacattttggaatgtcaggggctcacggctagcaatgcgtctggtagctgaggaaatgtaaaaactccatgtgctgatatactgtttcttagacctgacggcatgcggtcctggtgctgataaaaagctattgatattcaccatcttcatgttagcttctgtagctgctggagaagtacacgctggacaggaccggccctgccgccctggtggctacttctccagctggaccccggcctggccctgctggccacacgctatcggctatcctctcccctctatccttttcttcactccccccacacactgtcactgccagcctccccttcgcttcgcttagctcgccgtcaccatggcgacctccaccttctctccgcgccccgccaccctcaagcccctgcgggcacgcgccaagcccgccggcctccagctccacctcctccccttcccgcgcctccgcgtcgcctgcgccaccgccgccggggaggcgccgcccgttgagcagcgggacgaggtggagccggcctctgccgcggcatccaacgggactgccgttaaggtcgaggcgtccgccgcgaagcccgagtccccgcccgcgcccgcgccggtcccggccttccgcgacgccaggtgggtcaacggcacctgggacctcaccaagttcgacaagggcggcggcgtcgactgggacgccgtcatcgacgccgaggccaggagaaggaaatggctcgaagactacccggaggcgacgagcacagacgatgccgtcgtcttcgacacctccattatcccgtggtgggcatggatgaagcggttccaccttcctgaagccgagaagctaaacggtcgggccgccatggttggcttcttcatggcctacttcgtggacagcttgacgggcgtgggcctcgtcgaccagatgggcaacttcttctgcaagacgctgctgttcgtcgccgtcgccggcgtgctgctggtcaggaagaacgaggacgtggagtcgctcaagaagctcatcgacgagactacgttctacgacaggcagtggcaggctacctggcaagatgacccaaccgaggggccaaagaattagttcggcgttgggggtgcaaacgcagaatgctcgcttcttgtggtgtgtctttgcctctttcttcggcccctttttgtttcaccgtttagtcaggcttggaggaactttttgatgaacgtcataatctatctacgtgatcttgtgcaaaaacaaaaggtatgggagtactttctgtgctagagataataatcatgttgcagtttcactggtttatgctttctgtcaacacgcgtcaaggtgctcgtcgaagaagactttgagcaaatcgcaaataatttgatgtcagacatggaattcgctcacatatcgatcaaataaatgccatgtcaaggtactcgtcgaagaagattagtctgaaaccaacctgtgagacacaaagcgaaaaggcatgcctgttgatggttaacttttcacgtactactacttgctttgatctggcatggaattcaagtcaggcatgacacgactgaataaattac

SEQ ID NO: 218592 - DNA, 2423 bp, Zea Mays
agcaaaagcacttcgagtactccacaccacaccagtccagctgtccgcccccgccacttcgagttcggttggaggcttggaggcttgggcaaaaccctcctcgtcgtcgcgcgctccgcctgcaccacccgccgccgaagagctctctttcaaaaactagcaaagatggtacaatgtactcaacctcctccccagttaaagctcccagagagtaagatcacagaaccgacagatgatgagaaccaagatttgccaccaaaacctgagaaaaggactaggatgcaccacattgagaggcacagatcttgtgttgtgaccttatctgacatagaacttaatggtctgcaacctcgtcatctgcaccaacccattgagatcagcccaggaggatcacagtgttcgctccatgaagaaacacctacagatactaatgcatcacacaggcatgcaattgcagatgctgcttgggaagccctcaaaaggtcaatggtttacttcagaggccaaccaattggaactgttgccgcaatagacaagtctcagggggcagcactgaactatgaccaggttttcatgagggatttcattcctagcgcattggcttttcttatgaaaggagagcacttgattgtgaagaactttctggtagaaactgcacgccttcagtcaagggagaagatggttgaccttttcaagcttggtcagggtgtgatgcctgcaagctttaaggtgcatcatcgcaaccctactcagaagacagaaagcttactggctgattttggtgaaactgccattgggagggttgctcctgtagattctggcttatggtggattattctccttcgtgcttacaccaaatggacaggggacaattctctggctgaaagtactaactgccaaagggccatgcaccttattctcaggttgtgtctctcagaggggtgtgatacttctccagccttgctttgtgctgatggatgctccatgatagaccgaagaatgggcatatatggctacccaattgaaatccaggctctctttttcatggctatgagatgcgccctgagtctgttgaaacaagagtccgatgctgacttcgtgaaccacatcacaaaaagaatccaagctctgagctaccacttgcacagttactactggttggacttccagagacttaatgacatataccgctacaagaccgaagagtactcacagacagctctgaacaagttcaacgtgatgcccgaatcgatacctgactggatatttgacttcatgcctagccgtggtgggtacttcattggcaacgttagtcccgcgaggatggatttccgctggttctgcctaggcaacttcatcgcgattctgtcgtcgttggctaccggagagcaggctgaagcgatactggatcttgtggaggagcgctggcaagaactcatcggtgagatgccgctcaagatctgttaccctgcgatggaaaatcaggaatggcagatagtcactggatgcgacccgaagaacaccaggtggagctatcacaacggaggctcgtggccagaggccaggagaaggaaatggctcgaagactacccggaggcgacgagcacagacgatgccgtcgtcttcgacacctccattatcccgtggtgggcatggatgaagcggttccaccttcctgaagccgagaagctaaacggtcgggccgccatggttggcttcttcatggcctacttcgtggacagcttgacgggcgtgggcctcgtcgaccagatgggcaacttcttctgcaagacgctgctgttcgtcgccgtcgccggcgtgctgctggtcaggaagaacgaggacgtggagtcgctcaagaagctcatcgacgagactacgttctacgacaggcagtggcaggctacctggcaagatgacccaaccgaggggccaaagaattagttcggcgttgggggtgcaaacgcagaatgctcgcttcttgtggtgtgtctttgcctctttcttcggcccctttttgtttcaccgtttagtcaggcttggaggaactttttgatgaacgtcataatctatctacgtgatcttgtgcaaaaacaaaaggtatgggagtactttctgtgctagagataataatcatgttgcagtttcactggtttatgctttctgtcaacacgcgtcaaggtgctcgtcgaagaagactttgagcaaatcgcaaataatttgatgtcagacatggaattcgctcacatatcgatcaaataaatgccatgtcaaggtactcgtcgaagaagattagtctgaaaccaacctgtgagacacaaagcgaaaaggcatgcctgttgatggttaacttttcacgtactactacttgctttgatctggcatggaattcaagtcaggcatgacacgactgaataaattac

SEQ ID NO: 218593 - DNA, 3055 bp, Zea Mays
agcaaaagcacttcgagtactccacaccacaccagtccagctgtccgcccccgccacttcgagttcggttggaggcttggaggcttgggcaaaaccctcctcgtcgtcgcgcgctccgcctgcaccacccgccgccgaagagctctctttcaaaaactagcaaagatggtacaatgtactcaacctcctccccagttaaagctcccagagagtaagatcacagaaccgacagatgatgagaaccaagatttgccaccaaaacctgagaaaaggactaggatgcaccacattgagaggcacagatcttgtgttgtgaccttatctgacatagaacttaatggtctgcaacctcgtcatctgcaccaacccattgagatcagcccaggaggatcacagtgttcgctccatgaagaaacacctacagatactaatgcatcacacaggcatgcaattgcagatgctgcttgggaagccctcaaaaggtcaatggtttacttcagaggccaaccaattggaactgttgccgcaatagacaagtctcagggggcagcactgaactatgaccaggttttcatgagggatttcattcctagcgcattggcttttcttatgaaaggagagcacttgattgtgaagaactttctggtagaaactgcacgccttcagtcaagggagaagatggttgaccttttcaagcttggtcagggtgtgatgcctgcaagctttaaggtgcatcatcgcaaccctactcagaagacagaaagcttactggctgattttggtgaaactgccattgggagggttgctcctgtagattctggcttatggtggattattctccttcgtgcttacaccaaatggacaggggacaattctctggctgaaagtactaactgccaaagggccatgcaccttattctcaggttgtgtctctcagaggggtgtgatacttctccagccttgctttgtgctgatggatgctccatgatagaccgaagaatgggcatatatggctacccaattgaaatccaggctctctttttcatggctatgagatgcgccctgagtctgttgaaacaagagtccgatgctgacttcgtgaaccacatcacaaaaagaatccaagctctgagctaccacttgcacagttactactggttggacttccagagacttaatgacatataccgctacaagaccgaagagtactcacagacagctctgaacaagttcaacgtgatgcccgaatcgatacctgactggatatttgacttcatgcctagccgtggtgggtacttcattggcaacgttagtcccgcgaggatggatttccgctggttctgcctaggcaacttcatcgcgattctgtcgtcgttggctaccggagagcaggctgaagcgatactggatcttgtggaggagcgctggcaagaactcatcggtgagatgccgctcaagatctgttaccctgcgatggaaaatcaggaatggcagatagtcactggatgcgacccgaagaacaccaggtggagctatcacaacggaggctcgtggccagtgctgctgtggctgctggtggcggtgagcgtgaagctggggcggccgcacctggcgcggagagccgtggagctgatggagcagcggctggccaaggacgacttccccgagtactacgacggcaaggccgggcggtacgtggggaagcaggcgcgcaagttccagacgtggtccgtggccggctacctggtggccaagatgctcctggacgacccctctcacctgcgaatcgtggcgctggagggcgacagccactccagggcccccttcctcaagcgctccaactcgtgcccatgacccccaggccccagcacagcacaggccgcatgcattacctttccacgcaccagtttgcccacaccgagactacgagagtaaaaagtttcgtttcgatgcagtgcattcttcttactacataagtatgtataatcaagcggtagtagtgtgatgtgctaccaagaggaggatgacagggacaggataccgagtataggccaggagaaggaaatggctcgaagactacccggaggcgacgagcacagacgatgccgtcgtcttcgacacctccattatcccgtggtgggcatggatgaagcggttccaccttcctgaagccgagaagctaaacggttctctcaccaagcgcctctctccttttgtcctgtcattttaagctaactgctgcatatgacgggttgctttgaacagcggttggatacgatgtgttcggttccacttcaaaccctagttcttctcgtctgatgcgtgcaggtcgggccgccatggttggcttcttcatggcctacttcgtggacagcttgacgggcgtgggcctcgtcgaccagatgggcaacttcttctgcaagacgctgctgttcgtcgccgtcgccggcgtgctgctggtcaggaagaacgaggacgtggagtcgctcaagaagctcatcgacgagactacgttctacgacaggcagtggcaggctacctggcaagatgacccaaccgaggggccaaagaattagttcggcgttgggggtgcaaacgcagaatgctcgcttcttgtggtgtgtctttgcctctttcttcggcccctttttgtttcaccgtttagtcaggcttggaggaactttttgatgaacgtcataatctatctacgtgatcttgtgcaaaaacaaaaggtatgggagtactttctgtgctagagataataatcatgttgcagtttcactggtttatgctttctgtcaacacgcgtcaaggtgctcgtcgaagaagactttgagcaaatcgcaaataatttgatgtcagacatggaattcgctcacatatcgatcaaataaatgccatgtcaaggtactcgtcgaagaagattagtctgaaaccaacctgtgagacacaaagcgaaaaggcatgcctgttgatggttaacttttcacgtactactacttgctttgatctggcatggaattcaagtcaggcatgacacgactgaataaattac

SEQ ID NO: 218594 - DNA, 1867 bp, Zea Mays
agcaaaagcacttcgagtactccacaccacaccagtccagctgtccgcccccgccacttcgagttcggttggaggcttggaggcttgggcaaaaccctcctcgtcgtcgcgcgctccgcctgcaccacccgccgccgaagagctctctttcaaaaactagcaaagatggtacaatgtactcaacctcctccccagttaaagctcccagagagtaagatcacagaaccgacagatgatgagaaccaagatttgccaccaaaacctgagaaaaggactaggatgcaccacattgagaggcacagatcttgtgttgtgaccttatctgacatagaacttaatggtctgcaacctcgtcatctgcaccaacccattgagatcagcccaggaggatcacagtgttcgctccatgaagaaacacctacagatactaatgcatcacacaggcatgcaattgcagatgctgcttgggaagccctcaaaaggtcaatggtttacttcagaggccaaccaattggaactgttgccgcaatagacaagtctcagggggcagcactgaactatgaccaggttttcatgagggatttcattcctagcgcattggcttttcttatgaaaggagagcacttgattgtgaagaactttctggtagaaactgcacgccttcagtcaagggagaagatggttgaccttttcaagcttggtcagggtgtgatgcctgcaagctttaaggtgcatcatcgcaaccctactcagaagacagaaagcttactggctgattttggtgaaactgccattgggagggttgctcctgtagattctggcttatggtggattattctccttcgtgcttacaccaaatggacaggggacaattctctggctgaaagtactaactgccaaagggccatgcaccttattctcaggttgtgtctctcagaggggtgtgatacttctccagccttgctttgtgctgatggatgctccatgatagaccgaagaatgaggccaggagaaggaaatggctcgaagactacccggaggcgacgagcacagacgatgccgtcgtcttcgacacctccattatcccgtggtgggcatggatgaagcggttccaccttcctgaagccgagaagctaaacggtcgggccgccatggttggcttcttcatggcctacttcgtggacagcttgacgggcgtgggcctcgtcgaccagatgggcaacttcttctgcaagacgctgctgttcgtcgccgtcgccggcgtgctgctggtcaggaagaacgaggacgtggagtcgctcaagaagctcatcgacgagactacgttctacgacaggcagtggcaggctacctggcaagatgacccaaccgaggggccaaagaattagttcggcgttgggggtgcaaacgcagaatgctcgcttcttgtggtgtgtctttgcctctttcttcggcccctttttgtttcaccgtttagtcaggcttggaggaactttttgatgaacgtcataatctatctacgtgatcttgtgcaaaaacaaaaggtatgggagtactttctgtgctagagataataatcatgttgcagtttcactggtttatgctttctgtcaacacgcgtcaaggtgctcgtcgaagaagactttgagcaaatcgcaaataatttgatgtcagacatggaattcgctcacatatcgatcaaataaatgccatgtcaaggtactcgtcgaagaagattagtctgaaaccaacctgtgagacacaaagcgaaaaggcatgcctgttgatggttaacttttcacgtactactacttgctttgatctggcatggaattcaagtcaggcatgacacgactgaataaattac

SEQ ID NO: 218595 - DNA, 2556 bp, Zea Mays
agcaaaagcacttcgagtactccacaccacaccagtccagctgtccgcccccgccacttcgagttcggttggaggcttggaggcttgggcaaaaccctcctcgtcgtcgcgcgctccgcctgcaccacccgccgccgaagagctctctttcaaaaactagcaaagatggtacaatgtactcaacctcctccccagttaaagctcccagagagtaagatcacagaaccgacagatgatgagaaccaagatttgccaccaaaacctgagaaaaggactaggatgcaccacattgagaggcacagatcttgtgttgtgaccttatctgacatagaacttaatggtctgcaacctcgtcatctgcaccaacccattgagatcagcccaggaggatcacagtgttcgctccatgaagaaacacctacagatactaatgcatcacacaggcatgcaattgcagatgctgcttgggaagccctcaaaaggtcaatggtttacttcagaggccaaccaattggaactgttgccgcaatagacaagtctcagggggcagcactgaactatgaccaggttttcatgagggatttcattcctagcgcattggcttttcttatgaaaggagagcacttgattgtgaagaactttctggtagaaactgcacgccttcagtcaagggagaagatggttgaccttttcaagcttggtcagggtgtgatgcctgcaagctttaaggtgcatcatcgcaaccctactcagaagacagaaagcttactggctgattttggtgaaactgccattgggagggttgctcctgtagattctggcttatggtggattattctccttcgtgcttacaccaaatggacaggggacaattctctggctgaaagtactaactgccaaagggccatgcaccttattctcaggttgtgtctctcagaggggtgtgatacttctccagccttgctttgtgctgatggatgctccatgatagaccgaagaatgggcatatatggctacccaattgaaatccaggctctctttttcatggctatgagatgcgccctgagtctgttgaaacaagagtccgatgctgacttcgtgaaccacatcacaaaaagaatccaagctctgagctaccacttgcacagttactactggttggacttccagagacttaatgacatataccgctacaagaccgaagagtactcacagacagctctgaacaagttcaacgtgatgcccgaatcgatacctgactggatatttgacttcatgcctagccgtggtgggtacttcattggcaacgttagtcccgcgaggatggatttccgctggttctgcctaggcaacttcatcgcgattctgtcgtcgttggctaccggagagcaggctgaagcgatactggatcttgtggaggagcgctggcaagaactcatcggtgagatgccgctcaagatctgttaccctgcgatggaaaatcaggaatggcagatagtcactggatgcgacccgaagaacaccaggtggagctatcacaacggaggctcgtggccagtgctgctgtggctgctggtggcggtgagcgtgaagctggggcggccgcacctggcgcggagagccgtggagctgatggagcagcggctggccaaggacgacttccccgagtactacgacggcaaggccgggcgaggccaggagaaggaaatggctcgaagactacccggaggcgacgagcacagacgatgccgtcgtcttcgacacctccattatcccgtggtgggcatggatgaagcggttccaccttcctgaagccgagaagctaaacggtcgggccgccatggttggcttcttcatggcctacttcgtggacagcttgacgggcgtgggcctcgtcgaccagatgggcaacttcttctgcaagacgctgctgttcgtcgccgtcgccggcgtgctgctggtcaggaagaacgaggacgtggagtcgctcaagaagctcatcgacgagactacgttctacgacaggcagtggcaggctacctggcaagatgacccaaccgaggggccaaagaattagttcggcgttgggggtgcaaacgcagaatgctcgcttcttgtggtgtgtctttgcctctttcttcggcccctttttgtttcaccgtttagtcaggcttggaggaactttttgatgaacgtcataatctatctacgtgatcttgtgcaaaaacaaaaggtatgggagtactttctgtgctagagataataatcatgttgcagtttcactggtttatgctttctgtcaacacgcgtcaaggtgctcgtcgaagaagactttgagcaaatcgcaaataatttgatgtcagacatggaattcgctcacatatcgatcaaataaatgccatgtcaaggtactcgtcgaagaagattagtctgaaaccaacctgtgagacacaaagcgaaaaggcatgcctgttgatggttaacttttcacgtactactacttgctttgatctggcatggaattcaagtcaggcatgacacgactgaataaattac

SEQ ID NO: 218596 - DNA, 1067 bp, Zea Mays
atctactgcgtcgtcgtcctctgttctcgacccttccccgacccacgcggccacgcccatcttcattttcctctccatcacgcgcggtggtgcatgcgatctatcactcgtgaggaagagggcgtcgggaagtcatggcttgggctggggataggcggcggcagcggcggctgcgatctgatgcagcggaataaccgaccaccggtgcagttcgacctgctgttcccgccgcagggcgtcgtggaaggagttgccgcgagcaagaaggcggagaaaggcggtggtggacggaagaggctcaaggtcgttacgggcacggccgacgaggatggccagcagcccccaggcgcgaggaagaagctccggctcaccaaggcgcagtcgacgctgctcgaggacaccttccgcgcccacagcatactctccaacgcgcagaagcaggagctcgcacgacaagtggatctcagcgccaggcaggtggaagtatggttccagaacaggagggcaagaacgaagctgaagcaaacggaggcggactgcgagatcctgaagcgctgctgcgagagcctgaccggcgagaaccagcggctgaggctggagctcgcgcagctgcaggggtcggaggctgggctctacctccagtcgtcgttcccgccgctggccgcggccatggcgagcgtctgtccgtcgtgcgacaaggtcatcaccgtggcgagcggcggcgagacaagcggcagaagctcgactagctactcctcgtgatgcgctgggttcaataatgggcagtcgttgagacctgaccatttgagaggataatgggcatttgcgataatggcgcaggcagcaggattggcagacagtgccactgccctagctaaccggttgcgcgctctctcctctctctctcaagaatatttgtcgaatcggcaagcagggcaggcagagaagaaggcagctgtatttcttttctatcaattggaggtaggcagcaattcaggtctccgtctctccatctctcatcctctctctgtaatatgcggattaattataacgttatccacttcttc

SEQ ID NO: 218597 - DNA, 3088 bp, Zea Mays
ctggcatcttccatgcgtcaaatgtagtgcacactccagccgcgtggacaaagtgatatagcaaagagtgtttcgagaggaagctacgccacacatctacacgttactatcaaaacaactgttagcgccttccttcaattccttggagttctctccttcccacactctcatctctccccttctggccacatattctatccaagaacataaattcatcggcataagaaactccgatccgaccaatccagaatcgccgattgctgcccagatcagccataggaataaaatgccttcatgatccgcatgtgcatgcgctccgcccttgcaatctgactcttgccacccatcctcatcgatctcccaataaaatgtggctgacggacccagagtatggcctgtcacccaagaacaccatcggcatcgacgtgtacaaccctccaccgctgcactggacgagcctcctggttctggcgtaccagagctgcggcgttgtgtatggcgacctgagcacgtcgccgctgtacgtgtacaagggcaccttctccgggtcgctgcacaggttcctggacgaggagacggtgttcggcgtcttctccgtggtgttctggaccatcacgctcatcccgctgctcaagtacgtgttcatcgtcctcagcgccgacgactgcggcgaaggcggcacgttcgcgctctactcgctgctggtgcggcacgccaagttcagcctgatgcccaaccagcaggccgccgacgaggagctgtcggcgtactacaggcccgggtactcgacggaggagacgcccatcctcaaggcgctgcggaacttcctggagaagcacaggaagtcgcgcacgttcctgctcctcatggtcctcttcggcgcctcgctcgtcatcggcgacggcgtcctcacgccagccatgtcagtgctgtcgtcattctctggtctccaggtccactccaacgcgttgacacacggtgaggtggtgctactgtcgtgcatcgtgctggtgtgcctcttcaccctgcagcactggggcacgcgccgcgtggccttcctgttcgcgcccgtggtcgtcctttggctgctcttgctcgcggcactcggcatctacaacatcgccgtctggaacccgaggatcctgcgcgcgctctctccctactacgtcgtcaggttcttccagcgcaccggcaaagacggctggatctcgctgggaggagtgctactctccatgactggcaccgaagctatgtatgcagatcttggccacttcactgctgcatccataaggtacatgggacaggcggccttcctgtccaagtctcccgactgcaacatccacttcatcttcttcgagtccattccccgccccatcttctggcctgttctggtgatcgcgacgctggcggcgatcgtgggcagtcaggcggtcatctcagcgaccttctccatcgtgcgccagtgcaccgcgttgggctgctttccgcgcgtcaagatcgtgcacacctctaaccgcatccacgggcagatctacagccccgagatcaactggatcctcatgctcatctgcctcggtgtcaccgtcggcttccgtgacaccgacctcatcggcaacgcctacgggatggcgtgcgcgggagtcatggtggtcaccacgctcctcatggcgctcgtcatggtcttcgtgtggcagcagggcttcatcctggcagccatgttcctgctggccttcggctccgtcgagtctgtctacctgtccgccgcgctcatgaaggtgccgcagggcgggtggctgccgctcgccctgtctctggtggtggtggccatcatgtacgtgtggcactacggcacgcggcggaggcacctgttcgacgtccagaacaaggtgtcgctcaagtggctgcacgcgcttggccccagccttggcatcgtgcgcgtccccggcatcggcctcatctactccgagctcgccaccggcgtgcctgccatcttttcgcacttcgtcaccaacctgccggcgttccaccaggtgctggtcttcgtctgcgtcaaggccgtgcccatcccccacgtccgctgctacgagcgccacctcatcgggcgcatcggcccgcgcgagttccgcatgtaccgctgcgtcatcaggcacggctacaaggacgtcccgggcgacgacaacgacttcgagaacgacctggtcgttcgcatcgccgagttcgtacacatggaggctgctgaggccgccgcccacgccgacgccccgcgctgcagcgacgcctcggtcgacgggcgcatggccgtcgtcaaccgcccgttcgacctgtcccggacgggcctgctcatgcgggcaccgctccccaacccggaggacagcgtcgtcgtgcgcgcggccacggccgtcaccactgctggcgacagcagcaagacggaaacgatgcagtcgctgcagaccatgtacgaggccgagtctccggggttcgccatccggcggcgcatccggttcgagatcgacgactccacgagcgagagtatggacccggcggtgaaggaggagctcagcgcgctcgtggaggccaagcacgccggcgtcgcctacatcatggggcattcatacatcaaggcaaggaagagctcgtcgatcgtcaagaagttggccatcgacgtggcttactccttccttcgcaagaactgtaggggccccgccgtggcgctcaacattccgcacatcagcctcatcgaggttggcatgatctactacgtctagtagccagcgttattttattttatgtcttcatcagatgattcaattgtttagcctgaggcaaatttaattaggtttcggaatgcttgattaactctgcacaacgtaggatgatccaaacatgcttactagtatttgatcagtcagttgtactctgcatcactattttatattctttagtgtgaataaacagaacatttctatgaagtcccttctctcgcaaatggaaggctttcaacaacgtccccgcaacatgatttgaccggaaagcgtgattacgtaaatggcctcggatcaaaatttgtgactaaaaatatagacggtga

SEQ ID NO: 218598 - DNA, 611 bp, Zea Mays
attccgttaatttcccacgtccaggaaaaatatcgaaacaaggacgaaaaacacgaagaattacggaagagcaccccatcttcggtttctttcctccggacttcttcctgcttgcggcgtccgccaattcccttccctacccaaaccctagagcaaagctgaatggccctcgccacgagctcgcgagagactctgcgccgccgccggtgactgctgatccgcccgccgccgccgcgcccggtgctttgtcacgcaggaggcgacggtatggcgtcgaggcagcacaatgcacagttccacaaatccaagacgctcgacaacaaatacatgctcggagatgagatagggaagggggcgtacggccgcgtatacaaggggcttgacctggagaatggcgatttcgtggccatcaaacaggtctcgctggagaacattccgcaggaggatctcaacataataatggttttgttttgtcacattgttcacgagaaaaaaaatctgcagtttctacaccatgactaatagtgacttcagccttatatgcctttgcaagcaacaatgagattttgaacctctgcaacttttctgcaattgatggattagtcttttgc

SEQ ID NO: 218599 - DNA, 611 bp, Zea Mays
acgtccaggaaaaatatcgaaacaaggacgaaaaacacgaagaattacggaagagcaccccatcttcggtttctttcctccggacttcttcctgcttgcggcgtccgccaattcccttccctacccaaaccctagagcaaagctgaatggccctcgccacgagctcgcgagagactctgcgccgccgccggtgactgctgatccgcccgccgccgccgcgcccggtgctttgtcacgcaggaggcgacggtatggcgtcgaggcagcacaatgcacagttccacaaatccaagacgctcgacaacaaatacatgctcggagatgagatagggaagggggcgtacggccgcgtatacaaggggcttgacctggagaatggcgatttcgtggccatcaaacaggaactgacgaccagcagacgtgaggaattgcgtgaaatgtggtttcgggcggagctgtgtgcctgtgtacacagcggctgcagtgcagctataatatggagtttgagccatgcagctcgcccttttgtagtgtactttttttgctgtgagattacatcccatggataggttctgctagcttactcatgtgagttgtaagcaagctctctg

SEQ ID NO: 218600 - DNA, 2213 bp, Zea Mays
gggacgtaggttttcaagaatttgccgagaaaaaggcactcctgtatttagcaaggtggtcagaacaaaaccatgctcaaactgcacacttacacatcaccgaatattgtatgggaagagttcaagatcgctggtccccactactccccaattatttgcaaaaaaaccgcaatttggccgccggaaaccattcgctcatcaaggcgaggagatgagatcttgcagcggagagcatatgcctacaaagttctcaccccagctggttccctccaatattcccctccgacgatggaatatccccgcagttccaacccaggtagaacacaagcgccgtgcacgcttgcgcaagcccaaggattgccgctctgctctgtctcctccggtggccgcaggggcaatggcgattggcgggaaggaggtcaaggatgacctggaggaggcgccgccgccggtcctggacgaggccatgcggccgcgccgcgtcgcgctcttcgtcgagccgtctccgttcgcatacatctctgggtataagaaccggttccagaacttcatcaaacatttgcgagaaatgggggacgaggtcattgttgtgaccaatcatgagggagttccccaagagttccatggcgccaaggttataggttcatggagcttcccatgccccatgtatggaaaagtacctctttcgctggcactcagtcctaggatcatttcggaggttgcgaagttcaaacctgacattattcatgcgtcttctcctggaattatggtttttggagctctagctattgccaagctactcggtgtgcccctagtcatgtcctatcacacccatgttccagtatacatacctagatatacatttagctggcttgtggagccaatgtggcaagtcataagattccttcatagagctgctgatttaactttagtaccatctgctgctatcagcaaagattttgaaactgcccaggtcatatcagctaatagaatacgcctttggaacaaaggtgttgattctgcaagcttccatcctagattccgcagtcatgagatgcgagtcaggctaagtgacggtgagcctgaaaaaccactggtaattcatgtcggacgttttgggcgtgagaaaagtttggattttttgaagatggtaatggaaaggttgcctggagtaagaattgcatttattggagatggaccatataggggtgaactagagaagatgtttgaaggaatgccagcagtgttcacaggaatgatgcagggtgaagagctctcgcaggcgtacgccagcggcgatgttttcatcatgccatcggagtcagaaacgctcggccaagtggtcctagagtccatgtcgtcgggggtgcccgtcgtcgcggcccgtgcaggcgggatccccgacataatcccggaggaccaggagggcaggacgagcttcctgttcacccctggtgacctggacgactgcctcggcaaggtccagcagctgctgacgaacagggagtttagagaaaacatggggcggacggccagatccgagatggagaagtgcgactggcgggcagcgtccaagacgatccgcaacgagttctacaatgctgctatctggtactggcgaaagaagcatgcggagctggtgaagccgctgcagtggctggcacagatgttcctgccggcgcctgaggtccgcagcatcatgcaatgctgagtgaggatgctgttgcttgcagacatgatccagacaattgatggacggatgggcagatgcatatgcactccttgtaaattgaaattgtatgatgtatagtgctgtgtcgataggtgagatagttccccgtttttgtatggaaactggtattggactgtgattggtgtggcaattccatcgattacatgtgtcttgtgtagcaaaacaaaattggaattgtgctatatcttgctggacattgtaacctgtaaattatgatcatgccattttatttaaccgaagcggcaggagctttggcataattgtaaataggaaaaatatatttatatagtgtaaataggaaagatatatttataaggctgtgtctagcagatcgtgtatgtagtcatgtaaaatacggttttgaactgtagactacacattgcactgtttatatagtgaagtttgaaatagaggatgtgatgagatacataatgaagtttgaaataagagataagattag

SEQ ID NO: 218601 - DNA, 1728 bp, Zea Mays
cataatggtcagttatataacttgtaagatacatctctgggtataagaaccggttccagaacttcatcaaacatttgcgagaaatgggggacgaggtcattgttgtgaccaatcatgagggagttccccaagagttccatggcgccaaggttataggttcatggagcttcccatgccccatgtatggaaaagtacctctttcgctggcactcagtcctaggatcatttcggaggttgcgaagttcaaacctgacattattcatgcgtcttctcctggaattatggtttttggagctctagctattgccaagctactcggtgtgcccctagtcatgtcctatcacacccatgttccagtatacatacctagatatacatttagctggcttgtggagccaatgtggcaagtcataagattccttcatagagctgctgatttaactttagtaccatctgctgctatcagcaaagattttgaaactgcccaggtcatatcagctaatagaatacgcctttggaacaaaggtgttgattctgcaagcttccatcctagattccgcagtcatgagatgcgagtcaggctaagtgacggtgagcctgaaaaaccactggtaattcatgtcggacgttttgggcgtgagaaaagtttggattttttgaagatggtaatggaaaggttgcctggagtaagaattgcatttattggagatggaccatataggggtgaactagagaagatgtttgaaggaatgccagcagtgttcacaggaatgatgcagggtgaagagctctcgcaggcgtacgccagcggcgatgttttcatcatgccatcggagtcagaaacgctcggccaagtggtcctagagtccatgtcgtcgggggtgcccgtcgtcgcggcccgtgcaggcgggatccccgacataatcccggaggaccaggagggcaggacgagcttcctgttcacccctggtgacctggacgactgcctcggcaaggtccagcagctgctgacgaacagggagtttagagaaaacatggggcggacggccagatccgagatggagaagtgcgactggcgggcagcgtccaagacgatccgcaacgagttctacaatgctgctatctggtactggcgaaagaagcatgcggagctggtgaagccgctgcagtggctggcacagatgttcctgccggcgcctgaggtccgcagcatcatgcaatgctgagtgaggatgctgttgcttgcagacatgatccagacaattgatggacggatgggcagatgcatatgcactccttgtaaattgaaattgtatgatgtatagtgctgtgtcgataggtgagatagttccccgtttttgtatggaaactggtattggactgtgattggtgtggcaattccatcgattacatgtgtcttgtgtagcaaaacaaaattggaattgtgctatatcttgctggacattgtaacctgtaaattatgatcatgccattttatttaaccgaagcggcaggagctttggcataattgtaaataggaaaaatatatttatatagtgtaaataggaaagatatatttataaggctgtgtctagcagatcgtgtatgtagtcatgtaaaatacggttttgaactgtagactacacattgcactgtttatatagtgaagtttgaaatagaggatgtgatgagatacataatgaagtttgaaataagagataagattag

SEQ ID NO: 218602 - DNA, 3692 bp, Zea Mays
gaccaaagaagggggtggaaagaatgaaccatctccccccagaaaagaagcgagagtgagacgaccagtccgcgacctaccatgttttcacccatgcctcctccgtcctcctgcagaaccgaaaccaaacaaacacttccgcaaaccgcgccacccattaaaagcaccgaagatgtgtttgccatggcctggccgcaccaagaaaaccacaacagtacagcactggaaacagaaaggtggaccaaggagcgcccgtgcggtgacaatgacggacactggcagcacggacgccaacggcaagagccagggctcaaggggcaaggcgatgctgctcgccttgggcaagggcttccctgaccaagtcctgccccaggagaaggttgcggcgagctacctccaagaaagcagctgcgacgatcccgacaccagggccaagctcgagcgcctttgcacgaccaccacagtgaggacaaggtacactgttatgtccaaggagcttctggataagcacccagagctgaagatggagggtactccaacattgacaccccgccttgacatctgcaatgccgcggtgatcgaccttggtgctgctgcagctcgtgctgccctccacgaatggggccgccctgcagctgatatcacccacctcatctacatctcatccagtgaacttcgtctcccggggggtgaccttcacctggctgctcgccttggccttagtccaaacaccgtgcgcacttcccttctcttccttggctgctccggtggtgctgctgccctccgcactgccaaggacatcgctgagaacaacccagggagccgtgtcctagtaacggctgctgagaccactgtgctaggcttccggccacccagttatgaccgtccttatgaccttgttggtgctgccctgtttggtgatggagcctcagctgtgattataggagcaggccccatggcaccagctgaaaatcctttcttggagcttcagttctccacacaggagttcctacctggcactgataaagtgatcgatggcaacatctcagaggaaggaattaattttaaactggggcgtgatttgcctgagaagattgaaagccgcatagaagggttctgcaggactctcatgaaccaggtagggataaaggatttcaacgatgtgttttgggctgtgcatcctggcggaccagcaatactaaacaggcttgagatctgccttcaacttcagccagagaagctcaagattagcaggaaggctttgatgaactacggaaatgtgagcagcaatacaatcttctatgtgctggagtacttgagggacgagttaaagaaagggacaataagtgaagactggggattgatcttggcttttggcccaggcatcaccttcgaaggacttctagtccaaggtgttaagaaaacattcacaagctaatataacagagggaaggtttgcatagcaagcataaagattaatcatatatacagaaacataggataaagagcatagatgcattggtgaaagctgtgcaccgcgtagtacatcgctaacattttactgtatttatgtgtttatctatcaaacaatgtaagtagttgagtttgcctccaagaaaaacattgcagaaataaggcattatacagcctgttgttccactgtactatgcactaattgcaggatttacttcaatacagatttatgcatgagtcaactgattacatcgcagctatcatattttcaaaggaaaagcagagcaattatgtgatgaggcatcaaacacacattacaacaaacatgttaagatgatagatagatagatagatagtatatgtatcatgtatcaggatctcctaagcacttcaacaaatataaactttaacatcatttcaaaattattaaaagacaaaattcagcaagttcttacagtaaagggagcatccattacatcctgatctaaccacggaccttgcaaaataaactccagtgacaacaagaaggcaactttggatcccatgttgaaagcctatcttctttgccatcatcattccaagtccaaaatgcatgaaagcctagcaaatcatggattcaaatttgttgttccctctttgaaaaaaaaattcgccaacaaccttctcccaagcaagtttagcatcgcctttcacaagaaaggccatcttggcaacaacatccttggcctctgctgacctgcctgccttcaccaaaccctctaccaaacctttaacagcctcaaatggtggtgctgccttcattgcaaagcagctcttaaaaatccacagcgcatcaccaaacttctgtttctccaccaaactcctaaacagcaccacatatatctgcgaatgagcagacacacccaagtcacttctcccctcccgcctcttcatcaccttcatcttcttgaacacacgcatcgctgcgccgacattcccctccttgcaatacccctgcatgatagcattgtagagcaaccggcgaggacagtgttgtaagatatgatgtctggggcagggcggtgcttcgacttgttgttggccatttcgtcgagcagcatccgagcagcagcaagctcagagttcttgaccagcgcgtggaggagcacattgtgggaagcgcggccgggcgtgaccccgtgcgaggactccgccagggtaatagtggacttgatgtcatcgagtcggccggcgcggaggaacgccgagagggaaacgtcggagcgggtggcgggggcagacgaggagaaggcccggagcgcatcgtcgggtcccgggtagagggagagcgcccgcgcaaggagccccggggagggcggggcggaggcaaggaggaggtcgaggagcgaggcggcgaggtcggggcggcggaggcggttcaagcgagaagtggccagagaaaagagctggcgcgaggtatggaggcgcgggaagtcatcgctggagagcgcggaggcgacgagggagtagatgtgggctggatcagactccgcgcgcactgcgagctggaggtcgaccacggaggcgcgggcgggaggacggcgatggctcggccgccaccgaccgctcgtgccccggctgcggcgacgacgagcgcgggggaggaggaggtggccccgcacgcggccccgcccagggcattcccgctgccgtcgctggcgcggcgcagggtggagcccaccaccatggagatctccaccacacatggatttctccggcggcggcggcggccgcagccacgccgagccggcccggtggctcgagatcgcccggaagctactcgtcgcgcgggacctggtcggctgcaagcgactggcggagcgcgcggttgaggctgacccgtacctccccggtgcggacgagctcctcaccgtcgccgacgtcctcctcgcctcccagcgcctgctcccctccggccgccccaatccggtcggcgtgctccagctccagcccgccccgggccttgaccccaccgccgccaagcgctccttccaccgcctctcgcagctcgtgtcttccccgcgtaatcctcgtcccgccgcggacaccgctcttcatttcatccaagaagcctttgctgatctctccagcaacgcctcgtctgctcctgccgttcgcggacacgatcacccctgccctggacgagctgtacaggaggagcggcgaccagccggagaccg

SEQ ID NO: 218603 - DNA, 3531 bp, Zea Mays
ccaccccggactacgctgccttctctcccgcgagggcgaaatacacgacacttcgatttcacaaaaccctaggccccaaccacctccctaacatggcgacgctggcgtcggccgtctccgacgtgggcgtcgaagaaccctctccagcaaaggcagctgacccgaaggaaccagcggccgccgtggaggaaccagcggccgccgcggcggaattggcaggggcatccattccatctcccgtcgcggccgcagacgctggagatgcctcttccggtcccgcgcttgccaccactcctcccgcttcacctgccacgtccgcagcgcctcctcccgtttctcccgccccgctagtttctcctgccccgcccgcagagccagggccgccgcggtcgcaatttgcaggctccctatcctacatagcgccagggacaccgtctccgtcggcagctttttcttataacgtactgccgagagcgccaccagcgccccaagttggcggcgctgcagcttcactacagccatgctcttctccggctcttatggttgctcctatacccgcgtcagctcttcagccaccagccccagggcaatattttgggaacagaccttctttctcatataacgtagtttcgcatgctaatgctagattgcctactgggagcaaatcttgctggtccaatttctagatttgttccaccaggttccttgcagcctcccacccctgggcacataactcgccctagtacagcgttcccaggatctatggcaccaaatcctcctggatctattcagttgccgttttcagtgccaagaccatccaatattccttttggtgctattgcacaacagggcagctcagacattaataatttgaaatcggactccccaagggcaccagaggttacaccccaagccatgcagttatctactggcatgccatcaaaatctccttcaacaatcgcaagtgcttctggaagtccttcaatccccatccagacactaacaaattcatcggtgccacctcgccctgaggtatttggagccactagaccatctgtacctgcacaaccttctgcaactgtctctaatccaacaggtttccttgggaggcctatagttccacctgctgctcctttgccccaaacaccaccaccaattgcaacccaaggtggcacaccacagaattctcaacgaccgttttacccgtcctatccttcaggacctggtattgtcccacctcaacctttatggccacaccctcatcctccacaacctactggatttcagcagcctcccttccagtactatccagctggtcctgtaggctctcttggcaggccaataactggggcttctgctgcaactatggcctttgccaatgtgcaaccacctggcgtgtcaactggtggggataggaaagtacaagcatcaacaaatgcaggatctgaacagtccactcatgctgcagctgagccagattctacaggacatggaggtcaagtcactgagcagctggaggacaatagaaatactggagttcaggattcagatgcatggtctgctcacaaaactgaaactggtgttgtatattattacaatgctttgacaggagagtcgacttaccagaaaccaaccggttataagggggagcttgagaaggttgcaacagaaccagttccagtttcttgggataaattggctggtactaactggagcatagtaactacaagtgatggaaagaaatattattatgataacaaacaaaaggttagcagctggcaacttccgccagaggtgtgtgagatcctcaagaatgcggaatctggttccttaaaagaaggttcaacttcactgcaggatgctgcaactatagagaataagggagtaataagcattgatgcaagtactcctgccatacagacaggatgctggtgcttccagtgcgccttcagctctggctacttcatctgctacctctgaattgaatggatccaaaccagctgatgctgcacttaaggggcaactagtggcgaataatggtgagaaattaaaagataacaatggtgatgtgaatatctcagattcttcttcagattcagatgatgaggaacatggaccaagtaaagaggactgcattcgtcagtttaaggtgatgctaaaggaacgaggagttgcaccattttcgaagtgggagaaggaacttccaaaaatagtttttgacccacgctttaaggctattcctagtcactcaacaaggcgggctatatttgaccactatgttcgcacacgtgctgaagaggagcggaaagagaaaagagctgccctgaaggctgcagtagaggcgtataaagaattacttgaagaagcatccgaggacatcaaccagaaaacagactaccaagaattcaaaagaaaatggggtgctgatacaaggtttgaagccttggatcgaaaggaaagggagattctttttagtgagaaagtcaaggctgttcaagaaaaagtccaatcaatgcgcaaagctgtcatagctaatttcaaatcaatgcttcgagaaagtaaagatataacttcaactagccgatgggcaaaagttaaagaaaatttccgtagtgatccaaggtacaaagccatgaagcatgaagaaagggagactatatttaatgaatacatagtggaactaaaatctgctgaacaggaagcagagcaagctgccaaggccaaagtggatgagcaagccaagttaaaggagagggaacgtgaaacacgtaaaaggaaagaaagagaggagcaggagatggaaagagtaaaaatgaagatacgtagaaaagaggctgtgtcatcataccaagctttacttgttgaaatgattaaggatcccaaggcatcgtggactgaatccaaaccaaaacttgaaaaagatccacaaggtcgtgctcgaaatcctgacttaggccaaggtgatgcagaaaagttgtttcgtgaccatgtcaaggacctatatgagcggtgtgtacgtgatttccgggcacttctatctgaggttatcactccagaggtagcagcacggacaacagctgaggggaagacggcaatcaactcctggagtgaggcaaaaggtcatctaagatctgatctaaggtacaataagctaccgagtaaagacaaagagtctatttggcggcgctatgctgatgacttgacgaggaaactcagacaatcagacacgaaggagaaggacaaatcggatacagatgggaaacaacctaggtcctctgatccacctaggcggaggtagcttgtagtaacagtcacttgtacttcctaggtgctgctcctatatttcttactgttgatagttaagggtctgctcgcactcgtctgcaacatttgaatagtcactggctcactgccacttttgatactgagagtttctgtgttgtagggtgttttccttgcaaatgtttttcccgttctggatcagatgatatatttttgcagtatgagtctgacattgcaaaaaaaaaacaa

SEQ ID NO: 218604 - DNA, 3557 bp, Zea Mays
cttccaccccggactacgctgccttctctcccgcgagggcgaaatacacgacacttcgatttcacaaaaccctaggccccaaccacctccctaacatggcgacgctggcgtcggccgtctccgacgtgggcgtcgaagaaccctctccagcaaaggcagctgacccgaaggaaccagcggccgccgtggaggaaccagcggccgccgcggcggaattggcaggggcatccattccatctcccgtcgcggccgcagacgctggagatgcctcttccggtcccgcgcttgccaccactcctcccgcttcacctgccacgtccgcagcgcctcctcccgtttctcccgccccgctagtttctcctgccccgcccgcagagccagggccgccgcggtcgcaatttgcaggctccctatcctacatagcgccagggacaccgtctccgtcggcagctttttcttataacgtactgccgagagcgccaccagcgccccaagttggcggcgctgcagcttcactacagccatgctcttctccggctcttatggttgctcctatacccgcgtcagctcttcagccaccagccccagggcaatattttgggaacagaccttctttctcatataacgtagtttcgcatgctaatgctagattgcctactggtcagcagtttcaaccggtcactggagcaaatcttgctggtccaatttctagatttgttccaccaggttccttgcagcctcccacccctgggcacataactcgccctagtacagcgttcccaggatctatggcaccaaatcctcctggatctattcagttgccgttttcagtgccaagaccatccaatattccttttggtgctattgcacaacagggcagctcagacattaataatttgaaatcggactccccaagggcaccagaggttacaccccaagccatgcagttatctactggcatgccatcaaaatctccttcaacaatcgcaagtgcttctggaagtccttcaatccccatccagacactaacaaattcatcggtgccacctcgccctgaggtatttggagccactagaccatctgtacctgcacaaccttctgcaactgtctctaatccaacaggtttccttgggaggcctatagttccacctgctgctcctttgccccaaacaccaccaccaattgcaacccaaggtggcacaccacagaattctcaacgaccgttttacccgtcctatccttcaggacctggtattgtcccacctcaacctttatggccacaccctcatcctccacaacctactggatttcagcagcctcccttccagtactatccagctggtcctgtaggctctcttggcaggccaataactggggcttctgctgcaactatggcctttgccaatgtgcaaccacctggcgtgtcaactggtggggataggaaagtacaagcatcaacaaatgcaggatctgaacagtccactcatgctgcagctgagccagattctacaggacatggaggtcaagtcactgagcagctggaggacaatagaaatactggagttcaggattcagatgcatggtctgctcacaaaactgaaactggtgttgtatattattacaatgctttgacaggagagtcgacttaccagaaaccaaccggttataagggggagcttgagaaggttgcaacagaaccagttccagtttcttgggataaattggctggtactaactggagcatagtaactacaagtgatggaaagaaatattattatgataacaaacaaaaggttagcagctggcaacttccgccagaggtgtgtgagatcctcaagaatgcggaatctggttccttaaaagaaggttcaacttcactgcaggatgctgcaactatagagaataagggagtaataagcattgatgcaagtactcctgccatacagacaggatgctggtgcttccagtgcgccttcagctctggctacttcatctgctacctctgaattgaatggatccaaaccagctgatgctgcacttaaggggcaactagtggcgaataatggtgagaaattaaaagataacaatggtgatgtgaatatctcagattcttcttcagattcagatgatgaggaacatggaccaagtaaagaggactgcattcgtcagtttaaggtgatgctaaaggaacgaggagttgcaccattttcgaagtgggagaaggaacttccaaaaatagtttttgacccacgctttaaggctattcctagtcactcaacaaggcgggctatatttgaccactatgttcgcacacgtgctgaagaggagcggaaagagaaaagagctgccctgaaggctgcagtagaggcgtataaagaattacttgaagaagcatccgaggacatcaaccagaaaacagactaccaagaattcaaaagaaaatggggtgctgatacaaggtttgaagccttggatcgaaaggaaagggagattctttttagtgagaaagtcaaggctgttcaagaaaaagtccaatcaatgcgcaaagctgtcatagctaatttcaaatcaatgcttcgagaaagtaaagatataacttcaactagccgatgggcaaaagttaaagaaaatttccgtagtgatccaaggtacaaagccatgaagcatgaagaaagggagactatatttaatgaatacatagtggaactaaaatctgctgaacaggaagcagagcaagctgccaaggccaaagtggatgagcaagccaagttaaaggagagggaacgtgaaacacgtaaaaggaaagaaagagaggagcaggagatggaaagagtaaaaatgaagatacgtagaaaagaggctgtgtcatcataccaagctttacttgttgaaatgattaaggatcccaaggcatcgtggactgaatccaaaccaaaacttgaaaaagatccacaaggtcgtgctcgaaatcctgacttaggccaaggtgatgcagaaaagttgtttcgtgaccatgtcaaggacctatatgagcggtgtgtacgtgatttccgggcacttctatctgaggttatcactccagaggtagcagcacggacaacagctgaggggaagacggcaatcaactcctggagtgaggcaaaaggtcatctaagatctgatctaaggtacaataagctaccgagtaaagacaaagagtctatttggcggcgctatgctgatgacttgacgaggaaactcagacaatcagacacgaaggagaaggacaaatcggatacagatgggaaacaacctaggtcctctgatccacctaggcggaggtagcttgtagtaacagtcacttgtacttcctaggtgctgctcctatatttcttactgttgatagttaagggtctgctcgcactcgtctgcaacatttgaatagtcactggctcactgccacttttgatactgagagtttctgtgttgtagggtgttttccttgcaaatgtttttcccgttctggatcagatgatatatttttgcagtatgagtctgacattgcaaaaaaaaaacaa

SEQ ID NO: 218605 - DNA, 1898 bp, Zea Mays
aaaacttttgtgttataaccgtctcattggttgcagtagcagccagccagtcacgctgttcgagcagagccccatcccctgatccccgtgccaggccgctcggccctcgacgccgtgagtcaggcaggcaggcgcctctttctgtccctccactcgggtctccacgccgccgccgccgccgccgcctcgaccgccccacgcatccgccgctcctctacccatcctcggcccgcggcccagggagaagaccgcacgggcgggcgagatggaaaaccataatccattacattctcagattgctgaagtgaaaatggacatctcagcatcagcttctgttgcatcagggaacaaattctgcaagggtggtgcctgtgatttctctgattccagtaactcctcgaaagatgccaaggagagatccacgtccatgaggaagcttataatcgcagtgatcctttgcatcatattcatgacggtggaagtggtcgggggcatcaaagcaaacagtcttgccatcttaactgatgcggcgcaccttctttctgatgtggcagcatttgccatatcgttattctctctctgggctgctggatgggaagcaacaccgcagcagtcatatgggttcttccggattgagattcttggtgccttggtctccattcagctcatatggctacttgctggcatactggtatatgaggctattgtaaggctcattaacgagagtggcgatgtgcagggctccctcatgtttgctgtgtcggcgtttggactgtttgtcaacattataatggctgtattgctaggccatgaccacgggcacggccatggacacagccatggacatccacatgaccatggtcatggtgattcagacgatggccattctcaccatgaagaaccagaacagggccatgttcatcatcatgagcatagccatggaagttctattactgtcacaacacatcaccaccaccactcaggcactggacaacaccatgacgctgaggagccactgatcaagcacgaggccgactgtgagggcacccaatctgctgctaagaagcctcgacgcaatataaacgtacacagcgcttaccttcatgtgcttggggactccatccagagcatcggggtgatgatcggcggggctatcatctggtacaagcccgagtggaaaatcatcgatctgatctgcaccctcatcttctcggtggtcgtgctgttcaccacgatcaggatgctgcgcaacatcctcgaggtcctgatggaaagcacgccccgtgagatcgacgccaccaggctggagagggggctctgcgagatggaaggcgtggttgccgtccacgagctgcatatctgggccatcacagtggggaaggtgctactggcttgccatgtgacggtcgccagggaagccgacgcagacgagatccttgacaaggtgattgggtacatcaagacggagtacaacatcagccatgtgaccattcaggtcgagcgtgaatagagggggagctgtcttttgggctgtcagggcataaatggcgtcacgccttcactggttatcttactctgtcggttaaaacttttttttggcacctgggaaggcatcaggcagccatcggagtcttgatgtgcttgcaagttcatctgtggttcaagctttgatggtcagtagtgttatctgttactactagtctattaggcgggggtaggcgtcaaccagtgtgtacgggtttgattttcggtcatgctgttaacagcattgcggttcgtcgaactggatatgtagtttagtacgctgtgtcatcacctcttgtgtaagggaacgcttcttttctgtggtatggaagatgtgaacttcgtgatataaacaaaatagtaatataaagcaa

SEQ ID NO: 218606 - DNA, 1663 bp, Zea Mays
cggaggacgaatgaaagaaaggaaaaaaagatggaaaaccataatccattacattctcagattgctgaagtgaaaatggacatctcagcatcagcttctgttgcatcagggaacaaattctgcaagggtggtgcctgtgatttctctgattccagtaactcctcgaaagatgccaaggagagatccacgtccatgaggaagcttataatcgcagtgatcctttgcatcatattcatgacggtggaagtggtcgggggcatcaaagcaaacagtcttgccatcttaactgatgcggcgcaccttctttctgatgtggcagcatttgccatatcgttattctctctctgggctgctggatgggaagcaacaccgcagcagtcatatgggttcttccggattgagattcttggtgccttggtctccattcagctcatatggctacttgctggcatactggtatatgaggctattgtaaggctcattaacgagagtggcgatgtgcagggctccctcatgtttgctgtgtcggcgtttggactgtttgtcaacattataatggctgtattgctaggccatgaccacgggcacggccatggacacagccatggacatccacatgaccatggtcatggtgattcagacgatggccattctcaccatgaagaaccagaacagggccatgttcatcatcatgagcatagccatggaagttctattactgtcacaacacatcaccaccaccactcaggcactggacaacaccatgacgctgaggagccactgatcaagcacgaggccgactgtgagggcacccaatctgctgctaagaagcctcgacgcaatataaacgtacacagcgcttaccttcatgtgcttggggactccatccagagcatcggggtgatgatcggcggggctatcatctggtacaagcccgagtggaaaatcatcgatctgatctgcaccctcatcttctcggtggtcgtgctgttcaccacgatcaggatgctgcgcaacatcctcgaggtcctgatggaaagcacgccccgtgagatcgacgccaccaggctggagagggggctctgcgagatggaaggcgtggttgccgtccacgagctgcatatctgggccatcacagtggggaaggtgctactggcttgccatgtgacggtcgccagggaagccgacgcagacgagatccttgacaaggtgattgggtacatcaagacggagtacaacatcagccatgtgaccattcaggtcgagcgtgaatagagggggagctgtcttttgggctgtcagggcataaatggcgtcacgccttcactggttatcttactctgtcggttaaaacttttttttggcacctgggaaggcatcaggcagccatcggagtcttgatgtgcttgcaagttcatctgtggttcaagctttgatggtcagtagtgttatctgttactactagtctattaggcgggggtaggcgtcaaccagtgtgtacgggtttgattttcggtcatgctgttaacagcattgcggttcgtcgaactggatatgtagtttagtacgctgtgtcatcacctcttgtgtaagggaacgcttcttttctgtggtatggaagatgtgaacttcgtgatataaacaaaatagtaatataaagcaa

SEQ ID NO: 218607 - DNA, 1627 bp, Zea Mays
gttccatttctccccctcctccggcctagtcggcgcctcgctgacatgtgggccccacccgcggcgtcgccgacaggggcattcccctcgctccggccgtcgaggacggcggtggtccgcgtcctagtcacgctgcctgccgctgcgcggccgcaggatcagccgcggcggcggctctgtctcgcggtaccacggcccgctccggagatggcctctgcggctgctgaaggggagggggaggaggaggacgtggtggtggtggaaggggacacggggaagaagacggcggtggagatggacgcgacggtgaggcgggagctggcgatccggagactgcgagaggaggccgaggaggaggcgaacgaggcggggacgaggaggaggagcagcagaagggatttcgccgtgttcgagaccgccaggggcgacgcgctcttcacgcaatcgtggactccggccgccgacgatcgcctcaagggcgttgttatactgttgcatggtctaaatgagcatagtggaaggtacagccatttcgcaaaactgttgaatgatcaagggcttaaagtttatgccatggactggattggacatggtggaagtgatggagttcatggatatgtttcgtcacttgatcatgctgttggtgacttgttccttcctgtgcagaaagaatttctggaggatgttgtattggaggaaaaccatggtttgccgtgcttcttatttgggcactccacaggtggagctattgttttgaaggccgcgctggatccttctgtagaacttcatgtagaaggtgtggtcttaacgtcgccagctattcatgttcaaccatctcatccaatcatcaaagttgttgcaccaatattctccatgttagctccaaaataccgtgtcagtgctttgcataagagaggacctcctgtttcccgcgatccagaggctctgaagatgaaatattcagatcccctggtgtatactggaccaattagagtcagaactggcaatgaaatcctccggatatcatcatttctgcaaagaaacttgagcagagttactgtcccttttcttgttctacatggtacagctgacacaataactgatccaagagcatccgagcgattataccaaacatcaatgtcaacaaataaatcaataaaattatatgatgggtatttacatgatctcctctttgaacctgaaagggatgatatcgcaaatgatatcatcaattggttgagcgcaagacttagtgttcttcagagatggtgagctgaatcaagtatgaactacaaggtgcttccccttatgtagttaccggcggttttactggaactgtatacatggcatagagtgcagaatagtgtaaatgtaaactaggatgttatcattatgtcttcacggtcacggtcatttcttgtcttcagctctgctgtataagtttgggaagagcctacatgagatgtaaataatattagagttaagctgaaaataatgtatctcctaatacacaggtagttcagtgtcactttttttttaaaaggacttggttcgcatctttttctgaattgctctcggtcattctctcacatcttttttacttcaccattagagatgaatatttcag

SEQ ID NO: 218608 - DNA, 1644 bp, Zea Mays
cttgccctgtcccttgtcccattccgtgcttccaaagttccatttctccccctcctccggcctagtcggcgcctcgctgacatgtgggccccacccgcggcgtcgccgacaggggcattcccctcgctccggccgtcgaggacggcggtggtccgcgtcctagtcacgctgcctgccgctgcgcggccgcaggatcagccgcggcggcggctctgtctcgcggtaccacggcccgctccggagatggcctctgcggctgctgaaggggagggggaggaggaggacgtggtggtggtggaaggggacacggggaagaagacggcggtggagatggacgcgacggtgaggcgggagctggcgatccggagactgcgagaggaggccgaggaggaggcgaacgaggcggggacgaggaggaggagcagcagaagggatttcgccgtgttcgagaccgccaggggcgacgcgctcttcacgcaatcgtggactccggccgccgacgatcgcctcaagggcgttgttatactgttgcatggtctaaatgagcatagtggaaggtacagccatttcgcaaaactgttgaatgatcaagggcttaaagtttatgccatggactggattggacatggtggaagtgatggagttcatggatatgtttcgtcacttgatcatgctgttggtgacttgaatttctggaggatgttgtattggaggaaaaccatggtttgccgtgcttcttatttgggcactccacaggtggagctattgttttgaaggccgcgctggatccttctgtagaacttcatgtagaaggtgtggtcttaacgtcgccagctattcatgttcaaccatctcatccaatcatcaaagttgttgcaccaatattctccatgttagctccaaaataccgtgtcagtgctttgcataagagaggacctcctgtttcccgcgatccagaggctctgaagatgaaatattcagatcccctggtgtatactggaccaattagagtcagaactggcaatgaaatcctccggatatcatcatttctgcaaagaaacttgagcagagttactgtcccttttcttgttctacatggtacagctgacacaataactgatccaagagcatccgagcgattataccaaacatcaatgtcaacaaataaatcaataaaattatatgatgggtatttacatgatctcctctttgaacctgaaagggatgatatcgcaaatgatatcatcaattggttgagcgcaagacttagtgttcttcagagatggtgagctgaatcaagtatgaactacaaggtgcttccccttatgtagttaccggcggttttactggaactgtatacatggcatagagtgcagaatagtgtaaatgtaaactaggatgttatcattatgtcttcacggtcacggtcatttcttgtcttcagctctgctgtataagtttgggaagagcctacatgagatgtaaataatattagagttaagctgaaaataatgtatctcctaatacacaggtagttcagtgtcactttttttttaaaaggacttggttcgcatctttttctgaattgctctcggtcattctctcacatcttttttacttcaccattagagatgaatatttcag

SEQ ID NO: 218609 - DNA, 1703 bp, Zea Mays
atgggagatttctttcttatataaccatcatcggggaagcttctattccgagatcccttgccctgtcccttgtcccattccgtgcttccaaagttccatttctccccctcctccggcctagtcggcgcctcgctgacatgtgggccccacccgcggcgtcgccgacaggggcattcccctcgctccggccgtcgaggacggcggtggtccgcgtcctagtcacgctgcctgccgctgcgcggccgcaggatcagccgcggcggcggctctgtctcgcggtaccacggcccgctccggagatggcctctgcggctgctgaaggggagggggaggaggaggacgtggtggtggtggaaggggacacggggaagaagacggcggtggagatggacgcgacggtgaggcgggagctggcgatccggagactgcgagaggaggccgaggaggaggcgaacgaggcggggacgaggaggaggagcagcagaagggatttcgccgtgttcgagaccgccaggggcgacgcgctcttcacgcaatcgtggactccggccgccgacgatcgcctcaagggcgttgttatactgttgcatggtctaaatgagcatagtggaaggtacagccatttcgcaaaactgttgaatgatcaagggcttaaagtttatgccatggactggattggacatggtggaagtgatggagttcatggatatgtttcgtcacttgatcatgctgttggtgacttgaaagaatttctggaggatgttgtattggaggaaaaccatggtttgccgtgcttcttatttgggcactccacaggtggagctattgttttgaaggccgcgctggatccttctgtagaacttcatgtagaaggtgtggtcttaacgtcgccagctattcatgttcaaccatctcatccaatcatcaagttgttgcaccaatattctccatgttagctccaaaataccgtgtcagtgctttgcataagagaggacctcctgtttcccgcgatccagaggctctgaagatgaaatattcagatcccctggtgtatactggaccaattagagtcagaactggcaatgaaatcctccggatatcatcatttctgcaaagaaacttgagcagagttactgtcccttttcttgttctacatggtacagctgacacaataactgatccaagagcatccgagcgattataccaaacatcaatgtcaacaaataaatcaataaaattatatgatgggtatttacatgatctcctctttgaacctgaaagggatgatatcgcaaatgatatcatcaattggttgagcgcaagacttagtgttcttcagagatggtgagctgaatcaagtatgaactacaaggtgcttccccttatgtagttaccggcggttttactggaactgtatacatggcatagagtgcagaatagtgtaaatgtaaactaggatgttatcattatgtcttcacggtcacggtcatttcttgtcttcagctctgctgtataagtttgggaagagcctacatgagatgtaaataatattagagttaagctgaaaataatgtatctcctaatacacaggtagttcagtgtcactttttttttaaaaggacttggttcgcatctttttctgaattgctctcggtcattctctcacatcttttttacttcaccattagagatgaatatttcag

SEQ ID NO: 218610 - DNA, 4666 bp, Zea Mays
atataataatatttagaaaccggagtccgtaccaaattgccttagtgtgtatatatatagcgagccatcgtcccggccgtcgtgacgtacgtacctgcagcagaggtagatagatagtttcgatctgttaattagcttctatagtccgctggtgatatggagctcgccggcgtcggcggcctcgaggacgaggactggtacgatgtgggcacgacgacggcgccggccgcgacgaagccgccgccgctcacccacgacgacaaccgcggcttcctccggatgcttcgcgagaagaaagagagatatgagttgcaaagtccggccctgatgaactggctggcatggtcggagcgcaggctgggcgtggaggcgcacaaggtggaggtgcggttcgagaggctcgccgtggaggcggacgtccgcgtcggcagccgcgccgtcccgacgctgctcaactccgccgtcaacgccgcccaggaattagcgacgtctgtccatatgtgtgttaccaggaaaagacctatgagaatcataaacgaagtaagcggggtcatccggccgtcaaggatgacgctccttctgggagcgcctggatcaggcaagacgactcttctaaaagcgttggcaggaaaactggattcttctttgaagttcaagggaaaagtcatgtacaatggagaagaaatgaatcactcaacaccgcagtacctgcgtgcttatgttagccagtatgatctccatcatgctgagatgacagtgagggagacaatcaacttctcttctaagatgttcggaaccaataacgaattcgagatgctaggagaagcaataagaagaaaaaagggtgtcatcaataaagtggaccaagatcttgattcgttcattaaggccaccacctttggagaaggaagcaacctcacaacaaactacattatcaagatacttggcctgtctgagtgtgctgataccctagtaggagacgagatgaggagaggaatatctggagggcaaaagaaaagagccacaattggggagatgctggttggtctagcaaggtgcttctttatggatgatatatcaacaggtctagatagctccacgacatttgagatcatgaagtttctccaacagatggcccatttgatggatctcacaatggttatttccttgctgcaaccacctcctgagacattggaattatttgacgacattatacttttatgtgaggggcaaattgtgtatcatggtcctcgagaaaatgctacggacttctttgaaagtatgggattcaaatgccctgacagaaagaatgtagccgatttccttcaagaggtaacctctaagatggaccaaaagcaatactgggctggtgatcaaaacaagtatcagtaccatacaattgaaaattttgcacaatccttcaggacgtcctatctccctcttctagtagaagacaaacagtgcagttcaaacaatactggaaagaaaaaggtggtaaaagtgaatgcaagtcgccgaatatccagatggaatattttcaaagcatgcttttcaagggaagtactgctgctgaaaagaaactctccagtccatatattcaagaccattcagataactgttatggctttggtgatctccacacttttcctgagaacaaaaatgagtcacgattctgtacttgatgccaacaagtacatgggagcactttttatggctgtggtcatagtaaacttcaatggaatgactgaaattgcaatgacaataaagcggcttcccaccttctacaagcaaagagagctactagcattgccaggatgggcactcctttgttcagtttaccttattagcataccaatatcgcttcttgagacaggcctttggacatgcttaacctactatgtgattggatatgcaccttccattatcaggttcttccagcactttctggtacttttttccatgcatcaaatgtcaatgggcctgtatcgcttcttagcggccataggaaggacgcaagtgatggccaacatgctagggactgcagctcttattgcaatatacatacttggaggattcgtcatatcaaaagatgatctccaaccatggttgcgctggggatattggacgtccccattcacctatgcacagaatgcaatcgccctcaatgagttccatgacaaaagatgggctacggaattttattataataatgcaaacaccgtcggtgaagctatcctcatgatcagagggctgctcacagagtggcactggtactggatttgtgtcgccattttatttggatactcgctggtcttcaacatattcagcatatttgcattggagttcatgaactctccacacaaacatcaacttaacatcaagaccacaaaagcgaatttcgtgaaccaccggcagatggctgaaaatggcaattcatcaaatgatcaagctatcctcccatttcgacccctctcccttgtctttgatcatatccactattttgttgacatgcctaagaaaagaaaacgaatgtcccaccaggagatcgcaaacaatggagcaacggagaaaaagcttcagctgctgcaagatgtcagtggtgcttttagaccaggagtactaacagctctgatgggaataactggcgctggaaagacaacattgcttgatgtattagctggaaggaaaactgggggatatattgaagggactattaagatagcaggctaccctaagaagcaggagacgttctcaaggatatcaggttactgtgaacagagtgacattcactcccctaatcttactgttcatgagtcactgaaattttctgcatggcttcgtctgccttcaaatgttaaacctcatcaaagagatatgttcattgaagaagtcatgagccttgttgagctcactgacttaaagaatgccatggtaggcatcccaggagcaactggcctgtcagccgagcagcgtaaaagactaacaatagctgtggagctggtggctagtccctccattatattcatggatgagccaaccaccggcttggatgctcgtgctgcagcaatcgtcatgagaacagtacgaaagacggtagacactggacgaactgttgtctgcacaattcatcagccaagcatcgagatatttgaatcttttgatgagcttctgctcatgaaaagaggtggtcagcttatatacagtggttcactaggtccactctctagcaacatgataaagtatttcgaggccataccaggcgttcctaaaataaacaagggccaaaacccagcagcatgggtgttagacatcagttcacacataacagaatatgaaattggagtggactatgcagaaatttatcgcaactcctccctgtacagggagaacaggcttctaattgatgaattggaacaaccagaaccaaacacagatgatctgcattttcctcagggttactggcaaaactttacgacacaatgtgcggcatgcttgtggaagcaaaattgtgcatactggaaaaactcagaacacaatgttgtccggttcataaacacttttgctgtttcaatcatgtttggagttgtattctggaaaattggctcgaacatcaaggttgagcaagatgtattcaacatacttggaatcgtatatgggtcagcattgttcctgggtttcatgaactgcagcatcctacagccagtggtggcaatggagagagttgtgctctaccgtgaaaaggcggcaggcatgtactccaccatggcatacgctatcgctcaggtggcggtggaattaccttacatgttggtgcaagtgctgatcttctcatcgattgtgtacccgatgattgggttccagctgtctgcggccaagttcttctggttcttcctatacctggtgatgagcttcatgtactacactctgtacgggatgatgacggtggccctgacccccaacatcgagatcgccatggggctgtcgttcctcatcttcatcttctggaacgtcttctctggcttcatcatcgcgagagagctgatgcccgtgtggtggcggtgggtgtactgggccgatccagcggcatggacagtttacgggctgatgttctcacagctcgcagaccggacggagcagatcctggtgccagggctcggggtgcagacggtgcgtgagttcctggaggggtacctaggcctgcaggatcgctactttgagctggtgacctgcctccatctcgcaatcattggcctcttcgccttcctcttcttcctcgccatcaagcacctcaatttccagcgcaggaatacgagtaggttcaaggggattttgcaaaatgtgtaatgattaagattcagaaaatggaaatgtgttgtttgccattgtttcagtttttgaatcttcagagatggatggaatggaactgctgcaatcctcagctctgtgtgatgtttttatgggcaagacataccatactgatgctcgatttcttcatatttccctggctgtattaagtgattggcagcgatcatagtagcaggacctcgtgtgtaaggctgtcttcaacaagcgatctatacggtgctctgaaccgaaaatgggctgtaacacaccagttgcaggcctccaacagcagaccgaaacagaagacccaaatatagagcag

SEQ ID NO: 218611 - DNA, 4572 bp, Zea Mays
tcccggccgtcgtgacgtacgtacctgcagcagaggtagatagatagtttcgatctgttaattagcttctatagtccgctggtgatatggagctcgccggcgtcggcggcctcgaggacgaggactggtacgatgtgggcacgacgacggcgccggccgcgacgaagccgccgccgctcacccacgacgacaaccgcggcttcctccggatgcttcgcgagaagaaagagagatatgagttgcaaagtccggccctgatgaactggctggcatggtcggagcgcaggctgggcgtggaggcgcacaaggtggaggtgcggttcgagaggctcgccgtggaggcggacgtccgcgtcggcagccgcgccgtcccgacgctgctcaactccgccgtcaacgccgcccaggaattagcgacgtctgtccatatgtgtgttaccaggaaaagacctatgagaatcataaacgaagtaagcggggtcatccggccgtcaaggatgacgctccttctgggagcgcctggatcaggcaagacgactcttctaaaagcgttggcaggaaaactggattcttctttgaagttcaagggaaaagtcatgtacaatggagaagaaatgaatcactcaacaccgcagtacctgcgtgcttatgttagccagtatgatctccatcatgctgagatgacagtgagggagacaatcaacttctcttctaagatgttcggaaccaataacgaattcgagatgctaggagaagcaataagaagaaaaaagggtgtcatcaataaagtggaccaagatcttgattcgttcattaaggccaccacctttggagaaggaagcaacctcacaacaaactacattatcaagatacttggcctgtctgagtgtgctgataccctagtaggagacgagatgaggagaggaatatctggagggcaaaagaaaagagccacaattggggagatgctggttggtctagcaaggtgcttctttatggatgatatatcaacaggtctagatagctccacgacatttgagatcatgaagtttctccaacagatggcccatttgatggatctcacaatggttatttccttgctgcaaccacctcctgagacattggaattatttgacgacattatacttttatgtgaggggcaaattgtgtatcatggtcctcgagaaaatgctacggacttctttgaaagtatgggattcaaatgccctgacagaaagaatgtagccgatttccttcaagaggtaacctctaagatggaccaaaagcaatactgggctggtgatcaaaacaagtatcagtaccatacaattgaaaattttgcacaatccttcaggacgtcctatctccctcttctagtagaagacaaacagtgcagttcaaacaatactggaaagaaaaaggtggtaaaagtgaatgcaagtcgccgaatatccagatggaatattttcaaagcatgcttttcaagggaagtactgctgctgaaaagaaactctccagtccatatattcaagaccattcagataactgttatggctttggtgatctccacacttttcctgagaacaaaaatgagtcacgattctgtacttgatgccaacaagtacatgggagcactttttatggctgtggtcatagtaaacttcaatggaatgactgaaattgcaatgacaataaagcggcttcccaccttctacaagcaaagagagctactagcattgccaggatgggcactcctttgttcagtttaccttattagcataccaatatcgcttcttgagacaggcctttggacatgcttaacctactatgtgattggatatgcaccttccattatcaggttcttccagcactttctggtacttttttccatgcatcaaatgtcaatgggcctgtatcgcttcttagcggccataggaaggacgcaagtgatggccaacatgctagggactgcagctcttattgcaatatacatacttggaggattcgtcatatcaaaagatgatctccaaccatggttgcgctggggatattggacgtccccattcacctatgcacagaatgcaatcgccctcaatgagttccatgacaaaagatgggctacggaattttattataataatgcaaacaccgtcggtgaagctatcctcatgatcagagggctgctcacagagtggcactggtactggatttgtgtcgccattttatttggatactcgctggtcttcaacatattcagcatatttgcattggagttcatgaactctccacacaaacatcaacttaacatcaagaccacaaaagcgaatttcgtgaaccaccggcagatggctgaaaatggcaattcatcaaatgatcaagctatcctcccatttcgacccctctcccttgtctttgatcatatccactattttgttgacatgcctaaggagatcgcaaacaatggagcaacggagaaaaagcttcagctgctgcaagatgtcagtggtgcttttagaccaggagtactaacagctctgatgggaataactggcgctggaaagacaacattgcttgatgtattagctggaaggaaaactgggggatatattgaagggactattaagatagcaggctaccctaagaagcaggagacgttctcaaggatatcaggttactgtgaacagagtgacattcactcccctaatcttactgttcatgagtcactgaaattttctgcatggcttcgtctgccttcaaatgttaaacctcatcaaagagatatgttcattgaagaagtcatgagccttgttgagctcactgacttaaagaatgccatggtaggcatcccaggagcaactggcctgtcagccgagcagcgtaaaagactaacaatagctgtggagctggtggctagtccctccattatattcatggatgagccaaccaccggcttggatgctcgtgctgcagcaatcgtcatgagaacagtacgaaagacggtagacactggacgaactgttgtctgcacaattcatcagccaagcatcgagatatttgaatcttttgatgagcttctgctcatgaaaagaggtggtcagcttatatacagtggttcactaggtccactctctagcaacatgataaagtatttcgaggccataccaggcgttcctaaaataaacaagggccaaaacccagcagcatgggtgttagacatcagttcacacataacagaatatgaaattggagtggactatgcagaaatttatcgcaactcctccctgtacagggagaacaggcttctaattgatgaattggaacaaccagaaccaaacacagatgatctgcattttcctcagggttactggcaaaactttacgacacaatgtgcggcatgcttgtggaagcaaaattgtgcatactggaaaaactcagaacacaatgttgtccggttcataaacacttttgctgtttcaatcatgtttggagttgtattctggaaaattggctcgaacatcaaggttgagcaagatgtattcaacatacttggaatcgtatatgggtcagcattgttcctgggtttcatgaactgcagcatcctacagccagtggtggcaatggagagagttgtgctctaccgtgaaaaggcggcaggcatgtactccaccatggcatacgctatcgctcaggtggcggtggaattaccttacatgttggtgcaagtgctgatcttctcatcgattgtgtacccgatgattgggttccagctgtctgcggccaagttcttctggttcttcctatacctggtgatgagcttcatgtactacactctgtacgggatgatgacggtggccctgacccccaacatcgagatcgccatggggctgtcgttcctcatcttcatcttctggaacgtcttctctggcttcatcatcgcgagagagctgatgcccgtgtggtggcggtgggtgtactgggccgatccagcggcatggacagtttacgggctgatgttctcacagctcgcagaccggacggagcagatcctggtgccagggctcggggtgcagacggtgcgtgagttcctggaggggtacctaggcctgcaggatcgctactttgagctggtgacctgcctccatctcgcaatcattggcctcttcgccttcctcttcttcctcgccatcaagcacctcaatttccagcgcaggaatacgagtaggttcaaggggattttgcaaaatgtgtaatgattaagattcagaaaatggaaatgtgttgtttgccattgtttcagtttttgaatcttcagagatggatggaatggaactgctgcaatcctcagctctgtgtgatgtttttatgggcaagacataccatactgatgctcgatttcttcatatttccctggctgtattaagtgattggcagcgatcatagtagcaggacctcgtgtgtaaggctgtcttcaacaagcgatctatacggtgctctgaaccgaaaatgggctgtaacacaccagttgcaggcctccaacagcagaccgaaacagaagacccaaatatagagcag

SEQ ID NO: 218612 - DNA, 5115 bp, Zea Mays
tagatagatagtttcgatctgttaattagcttctatagtccgctggtgatatggagctcgccggcgtcggcggcctcgaggacgaggactggtacgatgtgggcacgacgacggcgccggccgcgacgaagccgccgccgctcacccacgacgacaaccgcggcttcctccggatgcttcgcgagaagaaagagagatatgagttgcaaagtccggccctgatgaactggctggcatggtcggagcgcaggctgggcgtggaggcgcacaaggtggaggtgcggttcgagaggctcgccgtggaggcggacgtccgcgtcggcagccgcgccgtcccgacgctgctcaactccgccgtcaacgccgcccaggaattagcgacgtctgtccatatgtgtgttaccaggaaaagacctatgagaatcataaacgaagtaagcggggtcatccggccgtcaaggatgacgctccttctgggagcgcctggatcaggcaagacgactcttctaaaagcgttggcaggaaaactggattcttctttgaagttcaagggaaaagtcatgtacaatggagaagaaatgaatcactcaacaccgcagtacctgcgtgcttatgttagccagtatgatctccatcatgctgagatgacagtgagggagacaatcaacttctcttctaagatgttcggaaccaataacgaattcgagatgctaggagaagcaataagaagaaaaaagggtgtcatcaataaagtggaccaagatcttgattcgttcattaagctcgtctctcaggccaccacctttggagaaggaagcaacctcacaacaaactacattatcaagatacttggcctgtctgagtgtgctgataccctagtaggagacgagatgaggagaggaatatctggagggcaaaagaaaagagccacaattggggagatgctggttggtctagcaaggtgcttctttatggatgatatatcaacaggtctagatagctccacgacatttgagatcatgaagtttctccaacagatggcccatttgatggatctcacaatggttatttccttgctgcaaccacctcctgagacattggaattatttgacgacattatacttttatgtgaggggcaaattgtgtatcatggtcctcgagaaaatgctacggacttctttgaaagtatgggattcaaatgccctgacagaaagaatgtagccgatttccttcaagaggtaacctctaagatggaccaaaagcaatactgggctggtgatcaaaacaagtatcagtaccatacaattgaaaattttgcacaatccttcaggacgtcctatctccctcttctagtagaagacaaacagtgcagttcaaacaatactggaaagaaaaaggtggtaaaagtgaatgcaagtcgccgaatatccagatggaatattttcaaagcatgcttttcaagggaagtactgctgctgaaaagaaactctccagtccatatattcaagaccattcagataactgttatggctttggtgatctccacacttttcctgagaacaaaaatgagtcacgattctgtacttgatgccaacaagtacatgggagcactttttatggctgtggtcatagtaaacttcaatggaatgactgaaattgcaatgacaataaagcggcttcccaccttctacaagcaaagagagctactagcattgccaggatgggcactcctttgttcagtttaccttattagcataccaatatcgcttcttgagacaggcctttggacatgcttaacctactatgtgattggatatgcaccttccattatcaggtactcatctcttggtacttatatgctgaatgacctctggtgcttcaatagacggaagttcttccagcactttctggtacttttttccatgcatcaaatgtcaatgggcctgtatcgcttcttagcggccataggaaggacgcaagtgatggccaacatgctagggactgcagctcttattgcaatatacatacttggaggattcgtcatatcaaaagatgatctccaaccatggttgcgctggggatattggacgtccccattcacctatgcacagaatgcaatcgccctcaatgagttccatgacaaaagatgggctacggaattttattataataatgcaaacaccgtcggtgaagctatcctcatgatcagagggctgctcacagagtggcactggtactggatttgtgtcgccattttatttggatactcgctggtcttcaacatattcagcatatttgcattggagttcatgaactctccacacaaacatcaacttaacatcaagaccacaaaagcgaatttcgtgaaccaccggcagatggctgaaaatggcaattcatcaaatgatcaagctatcctcccatttcgacccctctcccttgtctttgatcatatccactattttgttgacatgcctaagaaaagaaaacgaatgtcccaccaggagatcgcaaacaatggagcaacggagaaaaagcttcagctgctgcaagatgtcagtggtgcttttagaccaggagtactaacagctctgatgggaataactggcgctggaaagacaacattgcttgatgtattagctggaaggaaaactgggggatatattgaagggactattaagatagcaggctaccctaagaagcaggagacgttctcaaggatatcaggttactgtgaacagagtgacattcactcccctaatcttactgttcatgagtcactgaaattttctgcatggcttcgtctgccttcaaatgttaaacctcatcaaagagatatgttcattgaagaagtcatgagccttgttgagctcactgacttaaagaatgccatggtaggcatcccaggagcaactggcctgtcagccgagcagcgtaaaagactaacaatagctgtggagctggtggctagtccctccattatattcatggatgagccaaccaccggcttggatgctcgtgctgcagcaatcgtcatgagaacagtacgaaagacggtagacactggacgaactgttgtctgcacaattcatcagccaagcatcgagatatttgaatcttttgatgaggtatgaacaagttcagatggtatagccatataggtagacaaaaatatagccacaccaagcaattgagaaacatgaatacatgattagtccagtgctggagtggtgtcaaagtaattacataagtaaaacaaacatgattcttgacaaacaaattgaagtgtatagaagtatgcataaagttgtaaaatgcagtcgaaacctaaagtagaaaacgatcaaagaactacatgataaactggtccttcttttattaaagtaggcataggcactacaaaatagccattctgaattttaagttcaatttgcgtttttaagtgcatggaaaacagctattcatgtgcccgaaacttgattgtggttttattgggtttttaactctagcctacccccaacttggttgggataaaaggctcggttgttgttgttattgagttttaagttcaatttggccaattgcagcttctgctcatgaaaagaggtggtcagcttatatacagtggttcactaggtccactctctagcaacatgataaagtatttcgaggccataccaggcgttcctaaaataaacaagggccaaaacccagcagcatgggtgttagacatcagttcacacataacagaatatgaaattggagtggactatgcagaaatttatcgcaactcctccctgtacagggagaacaggcttctaattgatgaattggaacaaccagaaccaaacacagatgatctgcattttcctcagggttactggcaaaactttacgacacaatgtgcggcatgcttgtggaagcaaaattgtgcatactggaaaaactcagaacacaatgttgtccggttcataaacacttttgctgtttcaatcatgtttggagttgtattctggaaaattggctcgaacatatctaacacagatatcatgtgcaacagcaaggttgagcaagatgtattcaacatacttggaatcgtatatgggtcagcattgttcctgggtttcatgaactgcagcatcctacagccagtggtggcaatggagagagttgtgctctaccgtgaaaaggcggcaggcatgtactccaccatggcatacgctatcgctcaggtggcggtggaattaccttacatgttggtgcaagtgctgatcttctcatcgattgtgtacccgatgattgggttccagctgtctgcggccaagttcttctggttcttcctatacctggtgatgagcttcatgtactacactctgtacgggatgatgacggtggccctgacccccaacatcgagatcgccatggggctgtcgttcctcatcttcatcttctggaacgtcttctctggcttcatcatcgcgagagagctgatgcccgtgtggtggcggtgggtgtactgggccgatccagcggcatggacagtttacgggctgatgttctcacagctcgcagaccggacggagcagatcctggtgccagggctcggggtgcagacggtgcgtgagttcctggaggggtacctaggcctgcaggatcgctactttgagctggtgacctgcctccatctcgcaatcattggcctcttcgccttcctcttcttcctcgccatcaagcacctcaatttccagcgcaggaatacgagtaggttcaaggggattttgcaaaatgtgtaatgattaagattcagaaaatggaaatgtgttgtttgccattgtttcagtttttgaatcttcagagatggatggaatggaactgctgcaatcctcagctctgtgtgatgtttttatgggcaagacataccatactgatgctcgatttcttcatatttccctggctgtattaagtgattggcagcgatcatagtagcaggacctcgtgtgtaaggctgtcttcaacaagcgatctatacggtgctctgaaccgaaaatgggctgtaacacaccagttgcaggcctccaacagcagaccgaaacagaagacccaaatatagagcag

SEQ ID NO: 218613 - DNA, 4603 bp, Zea Mays
atagatagtttcgatctgttaattagcttctatagtccgctggtgatatggagctcgccggcgtcggcggcctcgaggacgaggactggtacgatgtgggcacgacgacggcgccggccgcgacgaagccgccgccgctcacccacgacgacaaccgcggcttcctccggatgcttcgcgagaagaaagagaggctgggcgtggaggcgcacaaggtggaggtgcggttcgagaggctcgccgtggaggcggacgtccgcgtcggcagccgcgccgtcccgacgctgctcaactccgccgtcaacgccgcccaggaattagcgacgtctgtccatatgtgtgttaccaggaaaagacctatgagaatcataaacgaagtaagcggggtcatccggccgtcaaggatgacgctccttctgggagcgcctggatcaggcaagacgactcttctaaaagcgttggcaggaaaactggattcttctttgaagttcaagggaaaagtcatgtacaatggagaagaaatgaatcactcaacaccgcagtacctgcgtgcttatgttagccagtatgatctccatcatgctgagatgacagtgagggagacaatcaacttctcttctaagatgttcggaaccaataacgaattcgagatgctaggagaagcaataagaagaaaaaagggtgtcatcaataaagtggaccaagatcttgattcgttcattaagctcgtctctcaggccaccacctttggagaaggaagcaacctcacaacaaactacattatcaagatacttggcctgtctgagtgtgctgataccctagtaggagacgagatgaggagaggaatatctggagggcaaaagaaaagagccacaattggggagatgctggttggtctagcaaggtgcttctttatggatgatatatcaacaggtctagatagctccacgacatttgagatcatgaagtttctccaacagatggcccatttgatggatctcacaatggttatttccttgctgcaaccacctcctgagacattggaattatttgacgacattatacttttatgtgaggggcaaattgtgtatcatggtcctcgagaaaatgctacggacttctttgaaagtatgggattcaaatgccctgacagaaagaatgtagccgatttccttcaagaggtaacctctaagatggaccaaaagcaatactgggctggtgatcaaaacaagtatcagtaccatacaattgaaaattttgcacaatccttcaggacgtcctatctccctcttctagtagaagacaaacagtgcagttcaaacaatactggaaagaaaaaggtggtaaaagtgaatgcaagtcgccgaatatccagatggaatattttcaaagcatgcttttcaagggaagtactgctgctgaaaagaaactctccagtccatatattcaagaccattcagataactgttatggctttggtgatctccacacttttcctgagaacaaaaatgagtcacgattctgtacttgatgccaacaagtacatgggagcactttttatggctgtggtcatagtaaacttcaatggaatgactgaaattgcaatgacaataaagcggcttcccaccttctacaagcaaagagagctactagcattgccaggatgggcactcctttgttcagtttaccttattagcataccaatatcgcttcttgagacaggcctttggacatgcttaacctactatgtgattggatatgcaccttccattatcaggtactcatctcttggtacttatatgctgaatgacctctggtgcttcaatagacggaagtaagaaaatgatctccattgcttatggcaggttcttccagcactttctggtacttttttccatgcatcaaatgtcaatgggcctgtatcgcttcttagcggccataggaaggacgcaagtgatggccaacatgctagggactgcagctcttattgcaatatacatacttggaggattcgtcatatcaaaagatgatctccaaccatggttgcgctggggatattggacgtccccattcacctatgcacagaatgcaatcgccctcaatgagttccatgacaaaagatgggctacggaattttattataataatgcaaacaccgtcggtgaagctatcctcatgatcagagggctgctcacagagtggcactggtactggatttgtgtcgccattttatttggatactcgctggtcttcaacatattcagcatatttgcattggagttcatgaactctccacacaaacatcaacttaacatcaagaccacaaaagcgaatttcgtgaaccaccggcagatggctgaaaatggcaattcatcaaatgatcaagctatcctcccatttcgacccctctcccttgtctttgatcatatccactattttgttgacatgcctaagaaaagaaaacgaatgtcccaccaggagatcgcaaacaatggagcaacggagaaaaagcttcagctgctgcaagatgtcagtggtgcttttagaccaggagtactaacagctctgatgggaataactggcgctggaaagacaacattgcttgatgtattagctggaaggaaaactgggggatatattgaagggactattaagatagcaggctaccctaagaagcaggagacgttctcaaggatatcaggttactgtgaacagagtgacattcactcccctaatcttactgttcatgagtcactgaaattttctgcatggcttcgtctgccttcaaatgttaaacctcatcaaagagatatgttcattgaagaagtcatgagccttgttgagctcactgacttaaagaatgccatggtaggcatcccaggagcaactggcctgtcagccgagcagcgtaaaagactaacaatagctgtggagctggtggctagtccctccattatattcatggatgagccaaccaccggcttggatgctcgtgctgcagcaatcgtcatgagaacagtacgaaagacggtagacactggacgaactgttgtctgcacaattcatcagccaagcatcgagatatttgaatcttttgatgagcttctgctcatgaaaagaggtggtcagcttatatacagtggttcactaggtccactctctagcaacatgataaagtatttcgaggccataccaggcgttcctaaaataaacaagggccaaaacccagcagcatgggtgttagacatcagttcacacataacagaatatgaaattggagtggactatgcagaaatttatcgcaactcctccctgtacagggagaacaggcttctaattgatgaattggaacaaccagaaccaaacacagatgatctgcattttcctcagggttactggcaaaactttacgacacaatgtgcggcatgcttgtggaagcaaaattgtgcatactggaaaaactcagaacacaatgttgtccggttcataaacacttttgctgtttcaatcatgtttggagttgtattctggaaaattggctcgaacatcaaggttgagcaagatgtattcaacatacttggaatcgtatatgggtcagcattgttcctgggtttcatgaactgcagcatcctacagccagtggtggcaatggagagagttgtgctctaccgtgaaaaggcggcaggcatgtactccaccatggcatacgctatcgctcaggtggcggtggaattaccttacatgttggtgcaagtgctgatcttctcatcgattgtgtacccgatgattgggttccagctgtctgcggccaagttcttctggttcttcctatacctggtgatgagcttcatgtactacactctgtacgggatgatgacggtggccctgacccccaacatcgagatcgccatggggctgtcgttcctcatcttcatcttctggaacgtcttctctggcttcatcatcgcgagagagctgatgcccgtgtggtggcggtgggtgtactgggccgatccagcggcatggacagtttacgggctgatgttctcacagctcgcagaccggacggagcagatcctggtgccagggctcggggtgcagacggtgcgtgagttcctggaggggtacctaggcctgcaggatcgctactttgagctggtgacctgcctccatctcgcaatcattggcctcttcgccttcctcttcttcctcgccatcaagcacctcaatttccagcgcaggaatacgagtaggttcaaggggattttgcaaaatgtgtaatgattaagattcagaaaatggaaatgtgttgtttgccattgtttcagtttttgaatcttcagagatggatggaatggaactgctgcaatcctcagctctgtgtgatgtttttatgggcaagacataccatactgatgctcgatttcttcatatttccctggctgtattaagtgattggcagcgatcatagtagcaggacctcgtgtgtaaggctgtcttcaacaagcgatctatacggtgctctgaaccgaaaatgggctgtaacacaccagttgcaggcctccaacagcagaccgaaacagaagacccaaatatagagcag

SEQ ID NO: 218614 - DNA, 2398 bp, Zea Mays
ttcaggatgcactttctacccttttctctctgtacattcgtgatcttggccctgctgttgaatttggagatgcacactggcttggaagacagggtattgcattagcgctccactctaccgctgatgttttggccgctaaagatcttcctgttgtcatgacatttctcatctcacgtgccttggctgatccaaatgttgatgttcgtggtagaatgattaatgctgggatccttattattgataggcatggaaaggaaaatgttcctttgctatttcctatttttgagagctacttgaataaaagggcatcagacgaggaaacatatgatcttgtgagggaaggtgttgttattttcactggtgctctggccaaacatctatcaaaggatgatcccaaagttcatagtgtcattgagaagttgttagatgtccttaacaccccatcggaggcagttcaacgtgctgtctcagattgtttgtccccacttatggtatccaaacaggaagagggtcaaactcttgtttctagactcttggatcggatgatgaaatgtgaaaaatatggtgagcgacgtggtgcagcttttggccttgctggtgtggttaaaggatttggaatttcttccttgaaaaaatatggcattgctgcaacattgcagaaaaatttggaagacagaatgtctgcgaaatctcgtgaaggagctttacttgggtttgagtgcctgtgtgagaagctcggcaaactatttgagccgtatgtcattcaaatgcttccattcctacttgtgtctttctctgatcaagtcctagcagtgcgtgaagctgccgagtgtgctgctcgggcaatgatgtctcagctcactggtcctggtgtgaagcttgtccttccttcacttcttaagggtctagaagataaagcatggcgtactaagcaaagcagcgttcaacttcttggtgccatggcatattgcgctcctcaacagctatctcagtgtcttccaaagattgttccaaagttaacagaggtactaacagacacacatcctaaagtccaagcgtctggacagacagctctccaggaggttggaagtgtcataaagaatcctgaaatttctgcactagtccctattcttctgtcagctctgatggatccaaatgcccacactaaacactctcttgacatccttcttcagactacttttattaactccatagacgcaccatcgcttgcactgcttgtgcctattgtgcatagaggactgagggagagaggtgttgagactaaaaagaaagctgctcaaatagttggaaacatgtcttctttagttacagaaccaaaggatatgatcccatacattagtttgctcctaccagaagttaagaaggttctagtggatcctatacctgaagtgagggcagtggctgctcgagctctggggtctcttataagtggaatgggtgaagaaatcttcccagatcttgtgccatggttattagatactctgaaatcagataatagtaatgttgaacgatctggtgcggcccagggattgagtgaggttttagctgctcttggccaagattattttgaccatattcttcctgacatcatccggaactgttcccaccaaaaggcttccgttcgtgatggacatcttacacttttccggtatttgccaaggtccttgggtggtgttttccagaattatctgcaggctgttcttcctgctatattagatgggcttgctgatgagaacgaatctgttcgtgatgctgcactttctgctggtcattacctctgttgcttcctgctattgaggatgggatcttcagtgataattggcgtatccgacaaagttccgttgaacttcttggggatctcttatttaaggtcgctggaacttctgggaaggcaatccttgaaggtggaagtgatgatgaaggtgctagtacagaggctcaggggcgtgctattattgaagtacttggaagggagaaacgcaatgaagttcttgccgccatttatatggttcgttctgatgtcagcttgactgtccggcaggctgcgttacatgtctggaagacgattgtagcaaatactccaagaactctgaaagagataatgccagtacttatggacacacttatttcgtctcttgcatcatcttcctccgaaagacgtcaggttgctggaagatcacttggtgagcttgtaaggaagcttggtgaaagagttttgccctcaattattccaatcctgtcacagggactcaaagacccaagtgctagcagaagacaaggagtttgcattggtttgagtgaggttatgggcagtgctggaaaacaccagctattaagttttatggatgaacttattcctaccattcgtactgctcta

SEQ ID NO: 218615 - DNA, 2418 bp, Zea Mays
ggatgcactttctacccttttctctctgtacattcgtgatcttggccctgctgttgaatttggagatgcacactggcttggaagacagggtattgcattagcgctccactctaccgctgatgttttggccgctaaagatcttcctgttgtcatgacatttctcatctcacgtgccttggctgatccaaatgttgatgttcgtggtagaatgattaatgctgggatccttattattgataggcatggaaaggaaaatgttcctttgctatttcctatttttgagagctacttgaataaaagggcatcagacgaggaaacatatgatcttgtgagggaaggtgttgttattttcactggtgctctggccaaacatctatcaaaggatgatcccaaagttcatagtgtcattgagaagttgttagatgtccttaacaccccatcggaggcagttcaacgtgctgtctcagattgtttgtccccacttatggtatccaaacaggaagagggtcaaactcttgtttctagactcttggatcggatgatgaaatgtgaaaaatatggtgagcgacgtggtgcagcttttggccttgctggtgtggttaaaggatttggaatttcttccttgaaaaaatatggcattgctgcaacattgcagaaaaatttggaagacagaatgtctgcgaaatctcgtgaaggagctttacttgggtttgagtgcctgtgtgagaagctcggcaaactatttgagccgtatgtcattcaaatgcttccattcctacttgtgtctttctctgatcaagtcctagcagtgcgtgaagctgccgagtgtgctgctcgggcaatgatgtctcagctcactggtcctggtgtgaagcttgtccttccttcacttcttaagaagataaagcatggcgtactaagcaaagcagcgttcaacttcttggtgccatggcatattgcgctcctcaacagctatctcagtgtcttccaaagattgttccaaagttaacagaggtactaacagacacacatcctaaagtccaagcgtctggacagacagctctccaggaggttggaagtgtcataaagaatcctgaaatttctgcactagtccctattcttctgtcagctctgatggatccaaatgcccacactaaacactctcttgacatccttcttcagactacttttattaactccatagacgcaccatcgcttgcactgcttgtgcctattgtgcatagaggactgagggagagaggtgttgagactaaaaagaaagctgctcaaatagttggaaacatgtcttctttagttacagaaccaaaggatatgatcccatacattagtttgctcctaccagaagttaagaaggttctagtggatcctatacctgaagtgagggcagtggctgctcgagctctggggtctcttataagtggaatgggtgaagaaatcttcccagatcttgtgccatggttattagatactctgaaatcagataatagtaatgttgaacgatctggtgcggcccagggattgagtgaggttttagctgctcttggccaagattattttgaccatattcttcctgacatcatccggaactgttcccaccaaaaggcttccgttcgtgatggacatcttacacttttccggtatttgccaaggtccttgggtggtgttttccagaattatctgcaggctgttcttcctgctatattagatgggcttgctgatgagaacgaatctgttcgtgatgctgcactttctgctggtcatgtctttgtggagcattatgcaactacgtcattacctctgttgcttcctgctattgaggatgggatcttcagtgataattggcgtatccgacaaagttccgttgaacttcttggggatctcttatttaaggtcgctggaacttctgggaaggcaatccttgaaggtggaagtgatgatgaaggtgctagtacagaggctcaggggcgtgctattattgaagtacttggaagggagaaacgcaatgaagttcttgccgccatttatatggttcgttctgatgtcagcttgactgtccggcaggctgcgttacatgtctggaagacgattgtagcaaatactccaagaactctgaaagagataatgccagtacttatggacacacttatttcgtctcttgcatcatcttcctccgaaagacgtcaggttgctggaagatcacttggtgagcttgtaaggaagcttggtgaaagagttttgccctcaattattccaatcctgtcacagggactcaaagacccaagtgctagcagaagacaaggagtttgcattggtttgagtgaggttatgggcagtgctggaaaacaccagctattaagttttatggatgaacttattcctaccattcgtactgctcta

SEQ ID NO: 218616 - DNA, 2267 bp, Zea Mays
gatgcactttctacccttttctctctgtacattcgtgatcttggccctgctgttgaatttggagatgcacactggcttggaagacagggtattgcattagcgctccactctaccgctgatgttttggccgctaaagatcttcctgttgtcatgacatttctcatctcacgtgccttggctgatccaaatgttgatgttcgtggtagaatgattaatgctgggatccttattattgataggcatggaaaggaaaatgttcctttgctatttcctatttttgagagctacttgaataaaagggcatcagacgaggaaacatatgatcttgtgagggaaggtgttgttattttcactggtgctctggccaaacatctatcaaaggatgatcccaaagttcatagtgtcattgagaagttgttagatgtccttaacaccccatcggaggcagttcaacgtgctgtctcagattgtttgtccccacttatggtatccaaacaggaagagggtcaaactcttgtttctagactcttggatcggatgatgaaatgtgaaaaatatgaatgtctgcgaaatctcgtgaaggagctttacttgggtttgagtgcctgtgtgagaagctcggcaaactatttgagccgtatgtcattcaaatgcttccattcctacttgtgtctttctctgatcaagtcctagcagtgcgtgaagctgccgagtgtgctgctcgggcaatgatgtctcagctcactggtcctggtgtgaagcttgtccttccttcacttcttaagggtctagaagataaagcatggcgtactaagcaaagcagcgttcaacttcttggtgccatggcatattgcgctcctcaacagctatctcagtgtcttccaaagattgttccaaagttaacagaggtactaacagacacacatcctaaagtccaagcgtctggacagacagctctccaggaggttggaagtgtcataaagaatcctgaaatttctgcactagtccctattcttctgtcagctctgatggatccaaatgcccacactaaacactctcttgacatccttcttcagactacttttattaactccatagacgcaccatcgcttgcactgcttgtgcctattgtgcatagaggactgagggagagaggtgttgagactaaaaagaaagctgctcaaatagttggaaacatgtcttctttagttacagaaccaaaggatatgatcccatacattagtttgctcctaccagaagttaagaaggttctagtggatcctatacctgaagtgagggcagtggctgctcgagctctggggtctcttataagtggaatgggtgaagaaatcttcccagatcttgtgccatggttattagatactctgaaatcagataatagtaatgttgaacgatctggtgcggcccagggattgagtgaggttttagctgctcttggccaagattattttgaccatattcttcctgacatcatccggaactgttcccaccaaaaggcttccgttcgtgatggacatcttacacttttccggtatttgccaaggtccttgggtggtgttttccagaattatctgcaggctgttcttcctgctatattagatgggcttgctgatgagaacgaatctgttcgtgatgctgcactttctgctggtcatgtctttgtggagcattatgcaactactgataattggcgtatccgacaaagttccgttgaacttcttggggatctcttatttaaggtcgctggaacttctgggaaggcaatccttgaaggtggaagtgatgatgaaggtgctagtacagaggctcaggggcgtgctattattgaagtacttggaagggagaaacgcaatgaagttcttgccgccatttatatggttcgttctgatgtcagcttgactgtccggcaggctgcgttacatgtctggaagacgattgtagcaaatactccaagaactctgaaagagataatgccagtacttatggacacacttatttcgtctcttgcatcatcttcctccgaaagacgtcaggttgctggaagatcacttggtgagcttgtaaggaagcttggtgaaagagttttgccctcaattattccaatcctgtcacagggactcaaagacccaagtgctagcagaagacaaggagtttgcattggtttgagtgaggttatgggcagtgctggaaaacaccagctattaagttttatggatgaacttattcctaccattcgtactgctcta

SEQ ID NO: 218617 - DNA, 1351 bp, Zea Mays
caaccgcctggaatcccccacaagccgcagcgccaccactgcgacgcctacccccgcctctgccgcgatgatcttccgtcccggcaccgccgtgtgggtggaacacccagacctcgcctgggccgaggccgaggtcgtgtcctcgcccgcctccccgtcctcgccgtcctatgtcactgtcgtcctatccaccggtgttaaggtgagagcgcaacgactcagacagcccattgtttcgatttccaagctccgctgcgtgcgttgcagcctaggtgttcgtcgaacagctaacttcgttgctgggttggtttgtccgtttggctatctctgtgtctgggctgtggtgtggcctgtgggcaggctatagtagacggtaggaaggtcctgccgcgggacactgaggccgatcttgggggcgtcgacgatatgaccaagctcgtctacctccacgagcctggggtgctctgcaacctcgcactccgatacaggctcaacgaaatctacacatacacagggcgcatcttgatcgctgtaaatccttttgcaaagctccctcatatgtatgatatgcatatgatggaacagtacagaggtgtgcagtttggtgaattgagtccacatgtttttgccattgctgatgcatcttacagagcaatggttagcgagaactgcagccagtccatattagtcagtggagaaagtggtgctggaaaaacagagaccaccaaactcattatgcgatatcttacttttgttggcgggcgtgcaattggtgatatccgctctgtggagcaacaagttctagagtcaaatccactgttggaagcttttggtaatgcacggacagtgagaaatgataactccagtcgatttgggaaatttgttgaaattcagtttaacaaatctggtagaatatctggggctgcagttcgaacttacctcttggaacggtctcgtgttgtgcaaatttctgaatccgaaaggaattaccactgcttttatcaactttgtgcatctgggaaggatgcagataaatacaagcttgctcatcctcagaacttttactacctaaatcaaagccatatgtatgaattagaaggggtcaacgatgcagaagaatatttaaaaacacggagagctatggacattgttggtatatgtttttctgatcaggaagctatattccgaattgtggctgctatccttcatctaggaaacattgaattttctcctggaaaggagtttgattcctctgttattaaggatgaaaaatgtaaattccatctccagatggctgctgatttacttatccagcttctccggggcacgttcgtggcctttgatcaggcca

SEQ ID NO: 218618 - DNA, 4815 bp, Zea Mays
cccccacaagccgcagcgccaccactgcgacgcctacccccgcctctgccgcgatgatcttccgtcccggcaccgccgtgtgggtggaacacccagacctcgcctgggccgaggccgaggtcgtgtcctcgcccgcctccccgtcctcgccgtcctatgtcactgtcgtcctatccaccggtgttaaggctatagtagacggtaggaaggtcctgccgcgggacactgaggccgatcttgggggcgtcgacgatatgaccaagctcgtctacctccacgagcctggggtgctctgcaacctcgcactccgatacaggctcaacgaaatctacacatacacagggcgcatcttgatcgctgtaaatccttttgcaaagctccctcatatgtatgatatgcatatgatggaacagtacagaggtgtgcagtttggtgaattgagtccacatgtttttgccattgctgatgcatcttacagagcaatggttagcgagaactgcagccagtccatattagtcagtggagaaagtggtgctggaaaaacagagaccaccaaactcattatgcgatatcttacttttgttggcgggcgtgcaattggtgatatccgctctgtggagcaacaagttctagagtcaaatccactgttggaagcttttggtaatgcacggacagtgagaaatgataactccagtcgatttgggaaatttgttgaaattcagtttaacaaatctggtagaatatctggggctgcagttcgaacttacctcttggaacggtctcgtgttgtgcaaatttctgaatccgaaaggaattaccactgcttttatcaactttgtgcatctgggaaggatgcagataaatacaagcttgctcatcctcagaacttttactacctaaatcaaagccatatgtatgaattagaaggggtcaacgatgcagaagaatatttaaaaacacggagagctatggacattgttggtatatgtttttctgatcaggaagctatattccgaattgtggctgctatccttcatctaggaaacattgaattttctcctggaaaggagtttgattcctctgttattaaggatgaaaaatgtaaattccatctccagatggctgctgatttacttatggttgatgtaaatcttttgctttcaactatgtgctatcgcacaattaaaactcctgaaggaaacataatcaaggcagttgacagttctgcagctgtcatcggtcgtgatactcttgcaaagactgtttatgctcgactatttgattggcttgttgacaacattaataagtccattgggcaggacatggagtccaggtcacagattggggtcttggacatctatggttttgagtgtttcaaatataacagctttgagcagttgtgcatcaattttgctaatgaaaagcttcaacaacattttaataagcatgttttcaagatggagcaggaggaatataaaacagaagaaattaattggagctacatcgactttgttgataaccaagatatattggatcttattgaaaagaaaccaataggcatagtttcacttttggatgaagcatgcatgcttggaaaatcaacacatgaaacttttgcgatgaagttatttcagaacttaagagcacacccgagacttgaaaaaccaaagctctcaaagacggatttcaccctgtcccattttgctggaaaggcatgtcctgtgaatcacatttcttaggatccattgaaatcatcttataagttttcttcagtagcttcacgatttaagcaacaactccaagcactaatggagacacttagctccacggagcctcattacatccgctgcataaaaccaaattctctgaattgccctcagaagtttgaaaatggcagtgtactacagcaactgcagagtgggggtgtacttgaagctattaggataagtcttgctggttatcctacaaggagaacatactctgaattcatcgatcgctttggacttcttgtgcaagaatatatgggtgaaagatttgatgagagatcactgacacagaggatccttacagagctaaacctggagaactttcaacttggcagaacaaaagtttttcttcgggctggtcagatagctgtgttggactctagacgtggtgagattctggacaatgctgtgaggattgtgcagagtcactttcgaacctttactgtgcgcaagaaatttctttcaacaaggaaagcttctatttctatccaaatattttgccgagggtgtttagcacgaaatgtgcttgaagctaagagacagatagccgcagctgtttcagttgaaagatatgctagaagatggttgtgtcgttgtgcatatttgcgtcttcgttctgcttctcttgtgatccagtctgggattcgctatatcttagcagttcagaggttgcggcacttaaagaatgctaaagcttctactgttatccaggcttggtggaggatgcagaagctctattatttccatcagcagtatcgatgggcaacagttctcatccagtgttgttggagacagaagcttgctaaaagggcattgcggaaccttaaacatgctgcttatgaaactggagctttacgtgaagctaaaggcaaacttgagaagagcttggaagatcttactttgcgattcacattagagaggaggcaaaggcttgctgctgaagagtcgaaggcattggagatatccaagcttctcaaaatattggaatccgtgaaatcagaattagaggcatcaaatgaagaaaataaaaatagttgcaagaaaatttcctcgctccaacatcagctagatttatcatccaaggatcaagaagctcagcaaaatattctttctcagatagaagaagtgaagagggagaatattttactacaggcaaagaacacagaaatggaacaagagctcttaaaagctcaaaaatgtagccatgataatatggacaagttgcacgatgtggaaaagaactatgttcatctccgggataacttgaaaaacttagaggataagatctcaaatttagaagatgagaatcatttattgagacagaaggccttgaatttatctcctaggcacagccgaactggggaatcttcacctgtgaaacttgcacctccccctcataaccagacagaatcaagaaggtcgaggatgaattctgatagatatgaggattaccatgatgtgctccaccgctgcatcaaagatgatatgggattcaagaagggaaaaccagttgcagcctgtatcatttacaaatgccttctctattggggagtatttgaggctgaaagaacaactatttttgacttcataattcacacaatcaataccactctgaaggcagaaaacgagaatgacattttgccctactggctagccaatacatctgctcttctatgcatgttgcaaagaaacttaaggtcaaaaggattcatcatggcagcctctcgatcgtcttcggatactcacttaagtgaaaaggcaaatgaaacattccggactcctttaagagcctttggacaacaaacaagcatgtcacacattgatgctcgatacccagccatgctatttaagcaacaactaactgcttccttggagaagatctttggcttaattcgtgacaatctaaagaaagagatatcacctcttttaagcctttgcattcaggcaccaaaacttgctcgaggaggcagtggaaggaggtcgagatcacctgatgtagccttgcagcaaccgataagtactcattgggatcggattgtgaaatttttggactcattgatggatagactacacaaaaattttgtgccttcttttttcacccgcaagctagtaactcaagttttttccttcattaatgtgcagctgttcaatagtatgctcctacgacgagaatgttgcacattttcaaatggagaatatgtgaaatctgggctttgtgtgctggagaaatggattgtggacactgaagagcatgcaggtgcagcttgggatgagctgcagttcattaggcaagcggttgactttctgatcattccacagaaaagcaaaaagaccattgagcagattaagaaaaatatttgcccggcattaagtgtgagacagatatatcgcttatgtacgatgtactgggacgacaaatatggtactcatagtgtatcagctgaggttgttgccagaatgagggacatggtgagtaatgacatgcaaaatcctgtctctaattcatttcttttagatgatgacttaagcattcctttcacaaccgaggaaattgcagagcaagtaccagatgttgacatgtcaaacatcgaaactcccgcatctcttcgtcatgttcattctgctcagttcttgacgcagcaccttcagccaccttatacgtctcgatgaattgcctaggtttttgctttggtaacaattagtgatgccgaggtagtgaacttagaggatttgataggtcggggggtaactataaccatcattgttgatttaatccatgctaatattcattccaccgtatgcttttttgttttatatttttgacatgcctcgtgtcatcatgtcaagcccaaagtagactacattctttgtaggtcgctgtcaaatttcagatccattatctagtcatcaatccatcattatgctgagtcctttatattgctaaacctgggatatacttgtggtatttttcctcatccctgacctggacaacagaagttcgtattatagtgatgacaacagaagtctagcggtaatgataatgacacaa

SEQ ID NO: 218619 - DNA, 1464 bp, Zea Mays
ctctgttgggttaaacctcctcatagctcaatatttatcagtgatgcagataaatacaagcttgctcatcctcagaacttttactacctaaatcaaagccatatgtatgaattagaaggggtcaacgatgcagaagaatatttaaaaacacggagagctatggacattgttggtatatgtttttctgatcaggaagctatattccgaattgtggctgctatccttcatctaggaaacattgaattttctcctggaaaggagtttgattcctctgttattaaggatgaaaaatgtaaattccatctccagatggctgctgatttacttatggttgatgtaaatcttttgctttcaactatgtgctatcgcacaattaaaactcctgaaggaaacataatcaaggcagttgacagttctgcagctgtcatcggtcgtgatactcttgcaaagactgtttatgctcgactatttgattggcttgttgacaacattaataagtccattgggcaggacatggagtccaggtcacagattggggtcttggacatctatggttttgagtgtttcaaatataacagctttgagcagttgtgcatcaattttgctaatgaaaagcttcaacaacattttaataagcatgttttcaagatggagcaggaggaatataaaacagaagaaattaattggagctacatcgactttgttgataaccaagatatattggatcttattgaaaagaaaccaataggcatagtttcacttttggatgaagcatgcatgcttggaaaatcaacacatgaaacttttgcgatgaagttatttcagaacttaagagcacacccgagacttgaaaaaccaaagctctcaaagacggatttcaccctgtcccattttgctggaaaggcatgtcctgtgaatcacatttcttaggatccattgaaatcatcttataagttttcttcagtagcttcacgatttaagcaacaactccaagcactaatggagacacttagctccacggagcctcattacatccgctgcataaaaccaaattctctgaattgccctcagaagtttgaaaatggcagtgtactacagcaactgcagagtgggggtgtacttgaagctattaggataagtcttgctggttatcctacaaggagaacatactctgaattcatcgatcgctttggacttcttgtgcaagaatatatgggtgaaagatttgatgagagatcactgacacagaggatccttacagagctaaacctggagaactttcaacttggcagaacaaaagtttttcttcgggctggtcagatagctgtgttggactctagacgtggtgagattctggacaatgctgtgaggattgtgcagagtcactttcgaacctttactgtgcgcaagaaatttctttcaacaaggaaagcttctatttctatccaaatattttgccgaggt

SEQ ID NO: 218620 - DNA, 2105 bp, Zea Mays
actgccatgccgataatttctagccacaattccatgccttgcccgtccagtagctcccatctcatcccatcccgacgaatcaaatctccatcaccacttcaccagtcaccaccttgcctagcctccgtctgctgcggacgccagacatcagtcagcacgagggaagcccaaactctgccgcctcttcctctgcgctgcgctaacaacgattcccgattccatggccgcgaccgccatgattaggattaccactttacgttgccgccacgacccgctctcctcccttccccgcaccacgtcggccgcctgctcctgtacccttccgcctcgatgtcgccaatgcagactgctccctccccattcttctggctgttccccttcctcctccatctttccgcgccgggtccgggtccgcccaacagcagcattgaagcgcatcggtggcggcaacaccagcttcatgggtccagccaacaatggcgccaccacgcttcagcgatcttcatcgcccgaccttcgtcgcagcctgatcgtcctcaagtctactgctggtacaggaggtggcaatgcttcctcaggactgctgcccaccattcttggggtggcgcatctgcttgtgtcgctgggcattgtgctcgccaccgataagttcctcaaacaggcatttgttgccgcgtccatcaagttcccaagcgccctcttcggcatgttctgcgtcttctctgtgctagtcgtgttcgacacattcgtgcctgctctggcgaaggcgttcatggacttctttgagcctgccacgctgttcatccagaggtggctaccgttgttctatgtcccgtcactggtcgtgctgccgctcgccgtcagggatgtcccagcggcttcaggagtcaagatttttgcaatcacttttggcggctggtttgctacccttgcggtcgcaggatatacagcattagctgtgagaaaacttgtgaaaacacagcttataccagcagagcccatgagcaaggcatcgccattttctacagtagaaacctgggcatgggctgctgtattcgttgcatcgttcggtgttgcatgtttcaatcccagagctcttggtaccacagcaagaacatgccttccctttctgctcgctgccactgtgctgggatacatggttggttctgggttaccatctggtgtcaagaaagtgttacatccaatcatcacctgcgcactttctgcagatttggcggcagtagcgtatgggtacctctccgggtgattacctcacaaaggcgccctctaatcctggagctggtgacgtactaatgggtttccttgggtctgtgatcatatcatttgcattctcaatgttcaaacagagaaagcttgtaaagaggcacgcagcagagattttcacatcaattgccattgcgtcgacattctctctgtactcaaccgctgtcatagggcgcctgattgggctggagccatcgttaaccatatccatattgccaaggtgtataactgtggcgctggctttgagcatagtatctttctttgaaggtgtaaactcttccctaaccgctgccgtggttgtcgttaccgggctcattggcgcgaatttcgtgcaagtagctatggataaacttggtctcaacgaccccatcgccagaggaatagggacagcttccagtgctcatggactggggacagcagcactgtcagccaaggaacctgaagcgcttcctttctgcgccatcgcttatggtctcacgggaatttttggctccttggtttgctcggttccagtagtgaggcaaagcttggtattcatagctggttaggagcagctcgtgatgatctgaatttgaggatctgattctttagataaaggaaatcgtttcatgtgtaaaagaagtcgtgctcagaagacgaggaagcaaaacgcccccacgttttgggtcaggatgaagaaaggtgaataattccgtaatcaggatgtaactaaaacactagagcaaggcggatccattgtttgtttgatactttgtgatatcacctttctcccttcactgacacgagagatataaagtacttgtaggtttcataaattcgac

SEQ ID NO: 218621 - DNA, 3651 bp, Zea Mays
gagcgatcaagagagtgcttgcgtgcgctgttttggtaaagtggagaggaaggcgagtagagccagctgacgagtgacgccacgcgtgcgtgcgtgctgtgcctgcctggcgggcttctggccttctcctccctctctgcacggggaaaagaatagaaaggagccttccgctctcacgacgtctcgacccgtcgaccgcttcgccaccacaaccccgccggaaccctaaccctagcagcgggagccccatccgccgggccgtaccgatgggacggtctgtgaattgaagtagcttggaagagcggtgttatgcactgggatgggagacaatgtcctaaaattcagggtggggttgttaggataaactgcattatggattctggcaacagttcgtgctctagaacacgaagtgggctttgatgtttcgagttccagaactcgaagtggccttctaaggataaagagctttctggattcccatgatggttcattttcgaggtcacaaagtgaccatgtaggaggtagccctcctattgttgaggctataaatgatgaatcagttttgaaggagtctcctgatagattgatgaaagaagagatgcctgttacaactccaaatgggcttgttagacagagctttactgaacaggctgtaaccaaggacaagtcaggcatgaggacacttctcgatggatgtttgagtgaagatatgccttctagaacacggagtggacttgtcagaagaagccctactgttaagactctaagcaaggacaaatcagtcattaaggggctggcagatgggtgtctgaaagaagacaagcctcttggaacacgaagtggccttgtgagtggaagccttgctgccaaggttccaatcaaggctgaagtactcacaaaggggcagcatgatagatggctgaaaaatgacaaggctgctgcaatgcggagtgaccatggtggcagaagattggctgccaagactgtaagcgaggacaaaagaggcgttgagggtttgcctgatggatggcaaaaagaatacagacccaggaagaatggtccatgttcagatccgtactacattgatccagtcagtggatatgaattccgctctttgaaggatgtgcacaactatcttgaaactggagatattagccaatgcgctgtgacaccaaagaagagcaccatctgcgaagatataacagaaagtcaaactcatactagtacatcaccgcagcacatgaggcctggtactgcgaataagggtattcagtgtgaaatattaacttcggatggtatcatggcgccatgggaggataatggaaatgatactgaacataccatgttaccagagcctgagagcttgaaagcaactcaagggtatggcaacaagcttgaaacttcagaacccacgagggttcaaccggtttctccacataatggttcaagacaaaccaaatctgttaaaaggaaagaatcaaatgcagaggtcaaatccaagaagcgtaaaaccagttctgctgtgactcgtgttcgagcgtcgccccgcttagctgcattaaatgctcatcttgatgtaagcatcgaacatgaagatgacatggttagcacaaatcatgtggactgggtacagactattgaagagagagccatcgatcaggcacagaaaagccaatcaggctcttttgatcagatacatggtaatctggaaagcactttcagtcagttacagttgagccaagcagaccctgctaatggaatgcaggttatacaggcaaacactaccattcattcacaaccaagccaattggatactctgagtcctacacagaaaaaacaggaaaacagttccaaacagttacaatctgtggtcacagattcttcgattccaaaacgaaccacacagaaatgcactatagatcagccaagccagccagacataaatcatatacgcacagatcaggaattcactgggaatcagttcccctcgagcctaccagttgacactgttatttcattaggggatactgaagaattcacagcgggtcactcacagccaagaaatagtgacactgcaggacaaattcaggccaatgaggaaaatactgccgatcaagtacagttgagcctggcagagacagtcattctggtaccggctattcaagaatatgctgctggttattcactgctgagcaaagctgacactactgatcaaacacaggccaatcaggaatacattgctgatcaagtacaatcgtgcctaacagacgcactcattccagtaaaagctattgaggaatacacaactgattattcacatattagtaaagctgacattacaaatcaaatacaggtcaatcaggaaagcactgatgatcacttatatttacgtcaagtagactgtctcgctgaaatgcagataattgagcaaaatttgtccaagcaacctcagctgagccaaccagacactggggatcaaatacgaattgatctggaaagcactaccaatcacttgcaaccaaactacgatgaaaattctatgctgcaatctggtttctcttgggctcctgaacagaacagaggagcccctactacagatttctggaaaaatgttgaaagtcaggcgtcatcggtttccatgccaataaatggagcgcctctttcaagctttccagcaaatgtcagattccaaaatgcagcagcagcagcagcagcagcagaacctgctttgccaccacaggttgctccaaccgaaacaggttccgatcagtctgggttggccttccaatcccttttcggaaacatctggtcagatccttgcatcgagtttgctttcaagacccttacaggcgacattcctgttctcgacgacacaacggctgtcacagactacttcccagagcaacaagacttgaataaagacccagcgccaaactgtgcaggctctgtgtttgacagttcaagaaaccacacacaagtcgacgtcaaccttccaccgcctgctccggatggtttctacgatggcagctggttccctccccaatgaatttgagtgcagggaggggaaaaatgcaataacattttgtacctgtgaaaaggcaaatcagagaaggctagtggccgaaacataaaagcaatagtcgcactcttgttagggctctgatctgaatgtctaatcccacaggacacattttgtaaaaaggcggtagcttctttagccttattagactgttaatacactcaactgaatgatgtccagttccatcaacaaggcttcaccgagactgtcgagtgactgatcaggatcatgttttttttttcacgttttgcttctgtgcagttgcctaataaacccattcgttgtaaacaagccagttctaactttaaaaaaaagggcctgtgcatggcgctctaggttattgtgcagatggaactgttcttgatattttgaacacgcaaatgtagaggctttgctgtcacagttcttcagcggaattgcgaagaggtgatccgctgtttgtgtagtgtttgctgaatcttgattttgtagttggctacttgaatctgtgtatgttttggctcgcttgtagtaattgctgggctgctggctggtaaatgcgtcgagacattagagagaatggtagatagctg

SEQ ID NO: 218622 - DNA, 3637 bp, Zea Mays
cgcgtgcgtgcgtgctgtgcctgcctggcgggcttctggccttctcctccctctctgcacggggaaaagaatagaaaggagccttccgctctcacgacgtctcgacccgtcgaccgcttcgccaccacaaccccgccggaaccctaaccctagcagcgggagccccatccgccgggccgtaccgatgggacggtctgtgaattgaagtagcttggaagagcggtgttatgcactgggatgggagacaatgtcctaaaattcagggtggggttgttaggataaactgcattatggattctggcaacagttcgtgctctagaacacgaagtgggcttgtaaggaaaaaagacacatttgctctcagtagatcttcatgttcaagaactcgaagtggacttctaagagtaaagagctctgtggattccagtgatgtttcgagttccagaactcgaagtggccttctaaggataaagagctttctggattcccatgatggttcattttcgaggtcacaaagtgaccatgtaggaggtagccctcctattgttgaggctataaatgatgaatcagttttgaaggagtctcctgatagattgatgaaagaagagatgcctgttacaactccaaatgggcttgttagacagagctttactgaacaggctgtaaccaaggacaagtcaggcatgaggacacttctcgatggatgtttgagtgaagatatgccttctagaacacggagtggacttgtcagaagaagccctactgttaagactctaagcaaggacaaatcagtcattaaggggctggcagatgggtgtctgaaagaagacaagcctcttggaacacgaagtggccttgttccaatcaaggctgaagtactcacaaaggggcagcatgatagatggctgaaaaatgacaaggctgctgcaatgcggagtgaccatggtggcagaagattggctgccaagactgtaagcgaggacaaaagaggcgttgagggtttgcctgatggatggcaaaaagaatacagacccaggaagaatggtccatgttcagatccgtactacattgatccagtcagtggatatgaattccgctctttgaaggatgtgcacaactatcttgaaactggagatattagccaatgcgctgtgacaccaaagaagagcaccatctgcgaagatataacagaaagtcaaactcatactagtacatcaccgcagcacatgaggcctggtactgcgaataagggtattcagtgtgaaatattaacttcggatggtatcatggcgccatgggaggataatggaaatgatactgaacataccatgttaccagagcctgagagcttgaaagcaactcaagggtatggcaacaagcttgaaacttcagaacccacgagggttcaaccggtttctccacataatggttcaagacaaaccaaatctgttaaaaggaaagaatcaaatgcagaggtcaaatccaagaagcgtaaaaccagttctgctgtgactcgtgttcgagcgtcgccccgcttagctgcattaaatgctcatcttgatgtaagcatcgaacatgaagatgacatggttagcacaaatcatgtggactgggtacagactattgaagagagagccatcgatcaggcacagaaaagccaatcaggctcttttgatcagatacatggtaatctggaaagcactttcagtcagttacagttgagccaagcagaccctgctaatggaatgcaggttatacaggcaaacactaccattcattcacaaccaagccaattggatactctgagtcctacacagaaaaaacaggaaaacagttccaaacagttacaatctgtggtcacagattcttcgattccaaaacgaaccacacagaaatgcactatagatcagccaagccagccagacataaatcatatacgcacagatcaggaattcactgggaatcagttcccctcgagcctaccagttgacactgttatttcattaggggatactgaagaattcacagcgggtcactcacagccaagaaatagtgacactgcaggacaaattcaggccaatgaggaaaatactgccgatcaagtacagttgagcctggcagagacagtcattctggtaccggctattcaagaatatgctgctggttattcactgctgagcaaagctgacactactgatcaaacacaggccaatcaggaatacattgctgatcaagtacaatcgtgcctaacagacgcactcattccagtaaaagctattgaggaatacacaactgattattcacatattagtaaagctgacattacaaatcaaatacaggtcaatcaggaaagcactgatgatcacttatatttacgtcaagtagactgtctcgctgaaatgcagataattgagcaaaatttgtccaagcaacctcagctgagccaaccagacactggggatcaaatacgaattgatctggaaagcactaccaatcacttgcaaccaaactacgatgaaaattctatgctgcaatctggtttctcttgggctcctgaacagaacagaggagcccctactacagatttctggaaaaatgttgaaagtcaggcgtcatcggtttccatgccaataaatggagcgcctctttcaagctttccagcaaatgtcagattccaaaatgcagcagcagcagcagcagcagcagaacctgctttgccaccacaggttgctccaaccgaaacaggttccgatcagtctgggttggccttccaatcccttttcggaaacatctggtcagatccttgcatcgagtttgctttcaagacccttacaggcgacattcctgttctcgacgacacaacggctgtcacagactacttcccagagcaacaagacttgaataaagacccagcgccaaactgtgcaggctctgtgtttgacagttcaagaaaccacacacaagtcgacgtcaaccttccaccgcctgctccggatggtttctacgatggcagctggttccctccccaatgaatttgagtgcagggaggggaaaaatgcaataacattttgtacctgtgaaaaggcaaatcagagaaggctagtggccgaaacataaaagcaatagtcgcactcttgttagggctctgatctgaatgtctaatcccacaggacacattttgtaaaaaggcggtagcttctttagccttattagactgttaatacactcaactgaatgatgtccagttccatcaacaaggcttcaccgagactgtcgagtgactgatcaggatcatgttttttttttcacgttttgcttctgtgcagttgcctaataaacccattcgttgtaaacaagccagttctaactttaaaaaaaagggcctgtgcatggcgctctaggttattgtgcagatggaactgttcttgatattttgaacacgcaaatgtagaggctttgctgtcacagttcttcagcggaattgcgaagaggtgatccgctgtttgtgtagtgtttgctgaatcttgattttgtagttggctacttgaatctgtgtatgttttggctcgcttgtagtaattgctgggctgctggctggtaaatgcgtcgagacattagagagaatggtagatagctg

SEQ ID NO: 218623 - DNA, 1843 bp, Zea Mays
cggcgtggcagtggccagtgggtgtgcgggcgcgtgcaccggcgcagacgatccgggcgagctcggcacttttttatacgtacgcagcggcgctggtaggggacacctgtccgccgccgcactctgacccccgcccccgccgcagcgagacgagatcgcccgcaccaaagcaagccgaggcggcgagcgggacaggtagcggctgcctaccaccgccagcctccgcccacccaacaacagcaccaccaccaccaccacagtccggtcccgtgccttccaattcggtcgtcccacgcatcgattgcgcccgcgcacgcgcccgtcgctttgccgtcttcgaccacccgcaagcaacctatatagcgcgccgcgaattccgcccggcttcctcgtcgcccgccgcagtgagtgagaggaggaggtcgatggatctcaaggacagcgagaggaggggggcggcggggccggggccgctgtcgaggcaggggtcgatctactcgctcacgttcgacgagttccagaacacgctcggcgggacggggggagggctcggcaaggacttcggctccatgaacatggacgagctgctgcggagcatctggacggcagaggagagccaggccatggcgtcggcctcggagcccgcggcgggggcggccggcgacggcggggcggcgctgcagaggcaggggtctctcaccctgccgcgcacgctcagcgtcaagacggtggacgaggtctggcgggacttcgcgcgggaggggacggctggcggtccggagccgcagcccaatcgacagccgaccctcggggagatgacgctggaggacttcctggtcagggcgggggtcgtccgtgacaaccctgccgccgctgctgctgctgctgctgctgtccccgcgcagccggttgcgacgcggccgcttcaggcggtcaataatggcgcctccatctttttcggcaactttggaggcgccaatgacgccggggctggagcgatggggtttgcgccggtagggatcggggatcaggccatgggcaacggcctgatgcctggggtggctgggatggcggctggtgcggtcactgttagtccggtggatatgtcggtggcccaactagattctatgggcaaggggaatggggatctgtcatcgccgatggctccagtgccctacccctttgagggagtgataaggggaaggcggagcggtgcgggtgtggagaaggtcgtggagcggcggcagagaaggatgatcaagaacagggagtctgcagctagatcccgtgcccgcttatacaatggagttggaagccgaagttcagaaactgaaggaacaaaacgaagaattgcagaagaagcaggaagaaataatggagatgcagaaaaaccaggtcgtggaagtgatcagcaatccatacgcacaaaagaaacggtgcctgcggagaacattgacaggtccctggtaaccgagctgttgacgaccgaccgggcttgacaggatatttaacattatggcacctgtacatatataccttgaggatttggagaacccgagtttccggtgtatattagcgaccaacagagtgtgagtgtacctgcgcttgacttatgctgccactgtgcctccttgactagcttctgcgctctcgtgctcctttgcactcacatcaatgagcgactagtacccatgggatttcatagatgggtctcaggcctcaatctcgccttctaaaggcaagtccggaggcgtcttgcagcttataatgggctctgtattgtatctggtgcggaagttggagacggaggaactcctgctgataatttaggagctggaagtgg

SEQ ID NO: 218624 - DNA, 4086 bp, Zea Mays
ccactccgcagcctctctgctgctggtgggccagcgttacggcgcgcaaacctccgcctctcccctcccctgtcccctccaatcctccattctccggccaccctcgcttctccgtccctcggcaatccgcttgtcccccgttgcccgctccgttcagaagcgcctcgccgctgaccggtcgtgacccgcctcgcacctccgccttctccgtccctcgcggccgcggctgccgccgaatggaagccgcctcatgctgccgcgtcttctccacgcagcggtgccgcttcccgctccgcaggctgtcggcgccgccgtggccgcagccgttctgcaccgagtccagcggcggcctcgtcaccccgtcggcctccaagcggaggtccaggggccccgtcatggccgcgaagaaggccgcggagggcgaaaaacaagaagatggaaaatacaagcacactgtggatctcccgaaaacaacatttgggctgagagcgaattctgtacagcgggagccagagctccaaaaattatgggacgataatcaggttctgaaaagggtttctgaaaggaacactgggactgcttttgttctccacgatggccctccctatgctaatggtgatcttcacatgggccatgcgctcaataaaatcctcaaggattttataaatcgctacaagctgcttcagaatcataaagtgtcctttgttcctggttgggattgccacggccttccaatagaactaaaagttttgaagtcaatggataaggaaactttgagtgctcttacacccataaaattaagacaaaaagctgcaaaatttgctaaagcaacagtcgatgcacaaatgaaatctttcaagcggtatggtgtatgggccgattgggacaacccttacctaactctgtcaccggaatacgaagctgctcagttggaagtgtttgggcaaatggttatgaaaggatatatctatagaggacgaaagcctgtccattggagtccatcatcacgtacggctttggcagaagctgaactggagtattccgaaaatcacatttccagaagcatatatgccgcattcaagattactaatccatctaaatctgggatgctagacgatttttttccaaatgtatctttggtcatatggaccaccactccatggacaattccggctaatgctgctgttgctgtgaacccaaagcttatttatgcagtagctgaggtacagtctgtatttgaaagtgagtcaacatccggtggtaaacaaagaaaagttggaaatatattgagttctgagaaaggaaaactgttcgttattgtggcttctgatcttatcacaactcttgagtccaaatggggtgtgaagcttgtagtacacaaatcatttcccggatctgccttggagcactgcaggtatgcccatcctgtgaatagcaacgaatgttccgtcattctaggaggagattacattacaactgaatcgggcactggccttgttcatactgcccctggccatggccaggaagactacataacaggtttgaagtatgggcttcctatcatttctcctgtggacgatgaagggaacttcacggctgaagctggacagttcggtggtttgtctgtcctgggggctggcaatgctgcagttgtgaagtatctggatgaacagtattcactcattttagaggaaccatacaaacacaagtacccctatgactggagatctaaagaaccaactatattccgagcaactgagcagtggtttgcatctgtggatggttttcgtgatgctgcaatggatgcaatcagacgagtaacttgggttccttctcaggcacaaaacaggattgttgccatgacctctagccgttctgattggtgtatttcacggcagagaacttggggtgtccctattccagttttttaccatgtggactcacaggaacctcttataactgaagaaacgattgaacacatcaaggctattgtgttgaagaaaggtagcgatgcatggtggtatatgacaactgaggaacttcttccagatagatatcgggacaaagcatctgaatatcgcaagggaactgatacaatggatgtttggtttgactctggctcttcatgggcagctgttttagcaaaaagggacggtcttaattttcctgcggatatttatcttgaaggttcagatcaacatcgtggatggttccagagctcattgttgactagcattgctacaacaggtatttgtgtttttttagttttcagagttattttcttgtcattgttttctgattcctctatggttatatctttcccaacaatcaatttccatgccttttcaattttttgttctagtttttttttttgacatttttctatgcagaagtgtggaaagcctgccactcatactgtttgcttttctatgatgtgtctgtagtttggaagaataacagtatttttctataactcttttttccatctaaagttccatttgtctaaatattcttcaattttttccatgagaaaacagggaaggctccctactccagtgttattacacatggatttgtactggatgaaaagggtttcaaaatgagtaaatcaattggtaatgtagtggacccagagaaaatcattgttggtggcaaaaaccatagggaagaacctggctatggagcagatgttctccgtctatgggtttctagtgttgattacactacagatgtgttgattggcccacaaatcttgcgccagatgtctgacatgtatagaaaactacgaggcacgatgcgatttcttttgtcgaatctccatgattggaagccggataattctgtgccgtacaatgatctgccaaaaatcgacaagtatgcacttttccatttggagactgtcatgacttccatgaaggatagttatgaaagttatcaattctataaagtataccagatccttcaaagatttgctactgttggtttgtccaatttctatttggatgttgcaaaggatcgcctttatgttggaggccgagtcagcttcacaaggaaaagttgtcagactgtgctcatggcacatctgctctaccttgttagggccatttccccgattatgcctcacctagctgaggatgtctggcagaacctaccctttcaatacaccttgcaggatggatcccttgcaaactttgtttttgatctgaaatggccagaaaagaatgaagaatggctctcggccccgaaggatgatgttgatttcctgggtgttatcctggagttgaggtcagaggtcaacaaaattttggagaatgctcgcactggaaagttgattggttctagcttagatgcaaaggtttatctccataccgaaagttcagatacggtattaaagctaaaggagctatcttctgcatccaatgatgcagacgctctgcatcgcctgtttatcacatctcaggtcgatattcttccaatcctaaatgaagagattacatcatctgtaccatacacaggaaagttcagtaacccacgcactggagtcatatggattggtgtgactcgtgcggatggtgcaaaatgtgagaggtgttggaattacacacaggacgttggatctttccatgaccatcctactctctgcgttcggtgctatggtgtcattgagttgcagacacaacctgcggccgcagctgtcagttgaaaggagtgatgttaacgtatcctatcgaaccatctaattttgaggatcattggtggaattcattcttttggagagctttcacgctaccatgtggcggtagcctgggactccagcttgaatcaagttttgcatgcagcaagctgtactttagattcttcatacataggtcacgagagttgtttggagcttgggtcatcgcttactttcccatactactggggggcttatttggaacagttttttacacaaaactcctgacctgtaaatcaattttggaaaaccgtatccggtggtcgatccatgtattaatagagtaataatgttactatgttcatccaaatctcaaagacgtgatggttgtgttgaaaaaacagcttgaatca

SEQ ID NO: 218625 - DNA, 3732 bp, Zea Mays
cactccgcagcctctctgctgctggtgggccagcgttacggcgcgcaaacctccgcctctcccctcccctgtcccctccaatcctccattctccggccaccctcgcttctccgtccctcggcaatccgcttgtcccccgttgcccgctccgttcagaagcgcctcgccgctgaccggtcgtgacccgcctcgcacctccgccttctccgtccctcgcggccgcggctgccgccgaatggaagccgcctcatgctgccgcgtcttctccacgcagcggtgccgcttcccgctccgcaggctgtcggcgccgccgtggccgcagccgttctgcaccgagtccagcggcggcctcgtcaccccgtcggcctccaagcggaggtccaggggccccgtcatggccgcgaagaaggccgcggagggcgaaaaacaagaagatggaaaatacaagcacactgtggatctcccgaaaacaacatttgggctgagagcgaattctgtacagcgggagccagagctccaaaaattatgggacgataatcaggttctgaaaagggtttctgaaaggaacactgggactgcttttgttctccacgatggccctccctatgctaatggtgatcttcacatgggccatgcgctcaataaaatcctcaaggattttataaatcgctacaagctgcttcagaatcataaagtgtcctttgttcctggttgggattgccacggccttccaatagaactaaaagttttgaagtcaatggataaggaaactttgagtgctcttacacccataaaattaagacaaaaagctgcaaaatttgctaaagcaacagtcgatgcacaaatgaaatctttcaagcggtatggtgtatgggccgattgggacaacccttacctaactctgtcaccggaatacgaagctgctcagttggaagtgtttgggcaaatggttatgaaaggatatatctatagaggacgaaagcctgtccattggagtccatcatcacgtacggctttggcagaagctgaactggagtattccgaaaatcacatttccagaagcatatatgccgcattcaagattactaatccatctaaatctgggatgctagacgatttttttccaaatgtatctttggtcatatggaccaccactccatggacaattccggctaatgctgctgttgctgtgaacccaaagcttatttatgcagtagctgaggtacagtctgtatttgaaagtgagtcaacatccggtggtaaacaaagaaaagttggaaatatattgagttctgagaaaggaaaactgttcgttattgtggcttctgatcttatcacaactcttgagtccaaatggggtgtgaagcttgtagtacacaaatcatttcccggatctgccttggagcactgcaggtatgcccatcctgtgaatagcaacgaatgttccgtcattctaggaggagattacattacaactgaatcgggcactggccttgttcatactgcccctggccatggccaggaagactacataacaggtttgaagtatgggcttcctatcatttctcctgtggacgatgaagggaacttcacggctgaagctggacagttcggtggtttgtctgtcctgggggctggcaatgctgcagttgtgaagtatctggatgaacagtattcactcattttagaggaaccatacaaacacaagtacccctatgactggagatctaaagaaccaactatattccgagcaactgagcagtggtttgcatctgtggatggttttcgtgatgctgcaatggatgcaatcagacgagtaacttgggttccttctcaggcacaaaacaggattgttgccatgacctctagccgttctgattggtgtatttcacggcagagaacttggggtgtccctattccagttttttaccatgtggactcacaggaacctcttataactgaagaaacgattgaacacatcaaggatagatatcgggacaaagcatctgaatatcgcaagggaactgatacaatggatgtttggtttgactctggctcttcatgggcagctgttttagcaaaaagggacggtcttaattttcctgcggatatttatcttgaaggttcagatcaacatcgtggatggttccagagctcattgttgactagcattgctacaacagggaaggctccctactccagtgttattacacatggatttgtactggatgaaaagggtttcaaaatgagtaaatcaattggtaatgtagtggacccagagaaaatcattgttggtggcaaaaaccatagggaagaacctggctatggagcagatgttctccgtctatgggtttctagtgttgattacactacagatgtgttgattggcccacaaatcttgcgccagatgtctgacatgtatagaaaactacgaggcacgatgcgatttcttttgtcgaatctccatgattggaagccggataattctgtgccgtacaatgatctgccaaaaatcgacaagtatgcacttttccatttggagactgtcatgacttccatgaaggatagttatgaaagttatcaattctataaagtataccagatccttcaaagatttgctactgttggtttgtccaatttctatttggatgttgcaaaggatcgcctttatgttggaggccgagtcagcttcacaaggaaaagttgtcagactgtgctcatggcacatctgctctaccttgttagggccatttccccgattatgcctcacctagctgaggatgtctggcagaacctaccctttcaatacaccttgcaggatggatcccttgcaaactttgtttttgatctgaaatggccagaaaagaatgaagaatggctctcggccccgaaggatgatgttgatttcctgggtgttatcctggagttgaggtcagaggtcaacaaaattttggagaatgctcgcactggaaagttgattggttctagcttagatgcaaaggtttatctccataccgaaagttcagatacggtattaaagctaaaggagctatcttctgcatccaatgatgcagacgctctgcatcgcctgtttatcacatctcaggtcgatattcttccaatcctaaatgaagagattacatcatctgtaccatacacaggaaagttcagtaacccacgcactggagtcatatggattggtgtgactcgtgcggatggtgcaaaatgtgagaggtgttggaattacacacaggacgttggatctttccatgaccatcctactctctgcgttcggtgctatggtgtcattgagttgcagacacaacctgcggccgcagctgtcagttgaaaggagtgatgttaacgtatcctatcgaaccatctaattttgaggatcattggtggaattcattcttttggagagctttcacgctaccatgtggcggtagcctgggactccagcttgaatcaagttttgcatgcagcaagctgtactttagattcttcatacataggtcacgagagttgtttggagcttgggtcatcgcttactttcccatactactggggggcttatttggaacagttttttacacaaaactcctgacctgtaaatcaattttggaaaaccgtatccggtggtcgatccatgtattaatagagtaataatgttactatgttcatccaaatctcaaagacgtgatggttgtgttgaaaaaacagcttgaatca

SEQ ID NO: 218626 - DNA, 3588 bp, Zea Mays
gttgcccgctccgttcagaagcgcctcgccgctgaccggtcgtgacccgcctcgcacctccgccttctccgtccctcgcggccgcggctgccgccgaatggaagccgcctcatgctgccgcgtcttctccacgcagcggtgccgcttcccgctccgcaggctgtcggcgccgccgtggccgcagccgttctgcaccgagtccagcggcggcctcgtcaccccgtcggcctccaagcggaggtccaggggccccgtcatggccgcgaagaaggccgcggagggcgaaaaacaagaagatggaaaatacaagcacactgtggatctcccgaaaacaacatttgggctgagagcgaattctgtacagcgggagccagagctccaaaaattatgggacgataatcaggttctgaaaagggtttctgaaaggaacactgggactgcttttgttctccacgatggccctccctatgctaatggtgatcttcacatgggccatgcgctcaataaaatcctcaaggattttataaatcgctacaagctgcttcagaatcataaagtgtcctttgttcctggttgggattgccacggccttccaatagaactaaaagttttgaagtcaatggataaggaaactttgagtgctcttacacccataaaattaagacaaaaagctgcaaaatttgctaaagcaacagtcgatgcacaaatgaaatctttcaagcggtatggtgtatgggccgattgggacaacccttacctaactctgtcaccggaatacgaagctgctcagttggaagtgtttgggcaaatggttatgaaaggatatatctatagaggacgaaagcctgtccattggagtccatcatcacgtacggctttggcagaagctgaactggagtattccgaaaatcacatttccagaagcatatatgccgcattcaagattactaatccatctaaatctgggatgctagacgatttttttccaaatgtatctttggtcatatggaccaccactccatggacaattccggctaatgctgctgttgctgtgaacccaaagcttatttatgcagtagctgaggtacagtctgtatttgaaagtgagtcaacatccggtggtaaacaaagaaaagttggaaatatattgagttctgagaaaggaaaactgttcgttattgtggcttctgatcttatcacaactcttgagtccaaatggggtgtgaagcttgtagtacacaaatcatttcccggatctgccttggagcactgcaggtatgcccatcctgtgaatagcaacgaatgttccgtcattctaggaggagattacattacaactgaatcgggcactggccttgttcatactgcccctggccatggccaggaagactacataacaggtttgaagtatgggcttcctatcatttctcctgtggacgatgaagggaacttcacggctgaagctggacagttcggtggtttgtctgtcctgggggctggcaatgctgcagttgtgaagtatctggatgaacagtattcactcattttagaggaaccatacaaacacaagtacccctatgactggagatctaaagaaccaactatattccgagcaactgagcagtggtttgcatctgtggatggttttcgtgatgctgcaatggatgcaatcagacgagtaacttgggttccttctcaggcacaaaacaggattgttgccatgacctctagccgttctgattggtgtatttcacggcagagaacttggggtgtccctattccagttttttaccatgtggactcacaggaacctcttataactgaagaaacgattgaacacatcaaggctattgtgttgaagaaaggtagcgatgcatggtggtatatgacaactgaggaacttcttccagatagatatcgggacaaagcatctgaatatcgcaagggaactgatacaatggatgtttggtttgactctggttcagatcaacatcgtggatggttccagagctcattgttgactagcattgctacaacagggaaggctccctactccagtgttattacacatggatttgtactggatgaaaagggtttcaaaatgagtaaatcaattggtaatgtagtggacccagagaaaatcattgttggtggcaaaaaccatagggaagaacctggctatggagcagatgttctccgtctatgggtttctagtgttgattacactacagatgtgttgattggcccacaaatcttgcgccagatgtctgacatgtatagaaaactacgaggcacgatgcgatttcttttgtcgaatctccatgattggaagccggataattctgtgccgtacaatgatctgccaaaaatcgacaagtatgcacttttccatttggagactgtcatgacttccatgaaggatagttatgaaagttatcaattctataaagtataccagatccttcaaagatttgctactgttggtttgtccaatttctatttggatgttgcaaaggatcgcctttatgttggaggccgagtcagcttcacaaggaaaagttgtcagactgtgctcatggcacatctgctctaccttgttagggccatttccccgattatgcctcacctagctgaggatgtctggcagaacctaccctttcaatacaccttgcaggatggatcccttgcaaactttgtttttgatctgaaatggccagaaaagaatgaagaatggctctcggccccgaaggatgatgttgatttcctgggtgttatcctggagttgaggtcagaggtcaacaaaattttggagaatgctcgcactggaaagttgattggttctagcttagatgcaaaggtttatctccataccgaaagttcagatacggtattaaagctaaaggagctatcttctgcatccaatgatgcagacgctctgcatcgcctgtttatcacatctcaggtcgatattcttccaatcctaaatgaagagattacatcatctgtaccatacacaggaaagttcagtaacccacgcactggagtcatatggattggtgtgactcgtgcggatggtgcaaaatgtgagaggtgttggaattacacacaggacgttggatctttccatgaccatcctactctctgcgttcggtgctatggtgtcattgagttgcagacacaacctgcggccgcagctgtcagttgaaaggagtgatgttaacgtatcctatcgaaccatctaattttgaggatcattggtggaattcattcttttggagagctttcacgctaccatgtggcggtagcctgggactccagcttgaatcaagttttgcatgcagcaagctgtactttagattcttcatacataggtcacgagagttgtttggagcttgggtcatcgcttactttcccatactactggggggcttatttggaacagttttttacacaaaactcctgacctgtaaatcaattttggaaaaccgtatccggtggtcgatccatgtattaatagagtaataatgttactatgttcatccaaatctcaaagacgtgatggttgtgttgaaaaaacagcttgaatca

SEQ ID NO: 218627 - DNA, 3880 bp, Zea Mays
ggctgccgccgaatggaagccgcctcatgctgccgcgtcttctccacgcagcggtgccgcttcccgctccgcaggctgtcggcgccgccgtggccgcagccgttctgcaccgagtccagcggcggcctcgtcaccccgtcggcctccaagcggaggtccaggggccccgtcatggccgcgaagaaggccgcggagggcgaaaaacaagaagatggaaaatacaagcacactgtggatctcccgaaaacaacatttgggctgagagcgaattctgtacagcgggagccagagctccaaaaattatgggacgataatcaggttctgaaaagggtttctgaaaggaacactgggactgcttttgttctccacgatggccctccctatgctaatggtgatcttcacatgggccatgcgctcaataaaatcctcaaggattttataaatcgctacaagctgcttcagaatcataaagtgtcctttgttcctggttgggattgccacggccttccaatagaactaaaagttttgaagtcaatggataaggaaactttgagtgctcttacacccataaaattaagacaaaaagctgcaaaatttgctaaagcaacagtcgatgcacaaatgaaatctttcaagcggtatggtgtatgggccgattgggacaacccttacctaactctgtcaccggaatacgaagctgctcaggttttctgtctgctttctgcttttacagaatatggcaatgatattaacgtgtatatttgacataaatgagaacttggaggtctgacattacttgagttgtcttccgtatctctcttgtggacgacattagattagtgcatttaattttctttattgaaatccatctgtgtggccagcaaatatttatcgacaatatggtgtactataactgtaaattttgtgttatgatgattagcatgttccatcgcaatcagaacctcttacagaacaaaagtcattttgtttgcttatccattttgttattccagttggaagtgtttgggcaaatggttatgaaaggatatatctatagaggacgaaagcctgtccattggagtccatcatcacgtacggctttggcagaagctgaactggagtattccgaaaatcacatttccagaagcatatatgccgcattcaagattactaatccatctaaatctgggatgctagacgatttttttccaaatgtatctttggtcatatggaccaccactccatggacaattccggctaatgctgctgttgctgtgaacccaaagcttatttatgcagtagctgaggtacagtctgtatttgaaagtgagtcaacatccggtggtaaacaaagaaaagttggaaatatattgagttctgagaaaggaaaactgttcgttattgtggcttctgatcttatcacaactcttgagtccaaatggggtgtgaagcttgtagtacacaaatcatttcccggatctgccttggagcactgcaggtatgcccatcctgtgaatagcaacgaatgttccgtcattctaggaggagattacattacaactgaatcgggcactggccttgttcatactgcccctggccatggccaggaagactacataacaggtttgaagtatgggcttcctatcatttctcctgtggacgatgaagggaacttcacggctgaagctggacagttcggtggtttgtctgtcctgggggctggcaatgctgcagttgtgaagtatctggatgaacagtattcactcattttagaggaaccatacaaacacaagtacccctatgactggagatctaaagaaccaactatattccgagcaactgagcagtggtttgcatctgtggatggttttcgtgatgctgcaatggatgcaatcagacgagtaacttgggttccttctcaggcacaaaacaggattgttgccatgacctctagccgttctgattggtgtatttcacggcagagaacttggggtgtccctattccagttttttaccatgtggactcacaggaacctcttataactgaagaaacgattgaacacatcaaggctattgtgttgaagaaaggtagcgatgcatggtggtatatgacaactgaggaacttcttccagatagatatcgggacaaagcatctgaatatcgcaagggaactgatacaatggatgtttggtttgactctggctcttcatgggcagctgttttagcaaaaagggacggtcttaattttcctgcggatatttatcttgaaggttcagatcaacatcgtggatggttccagagctcattgttgactagcattgctacaacagggaaggctccctactccagtgttattacacatggatttgtactggatgaaaagggtttcaaaatgagtaaatcaattggtaatgtagtggacccagagaaaatcattgttggtggcaaaaaccatagggaagaacctggctatggagcagatgttctccgtctatgggtttctagtgttgattacactacagatgtgttgattggcccacaaatcttgcgccagatgtctgacatgtatagaaaactacgaggcacgatgcgatttcttttgtcgaatctccatgattggaagccggataattctgtgccgtacaatgatctgccaaaaatcgacaagtatgcacttttccatttggagactgtcatgacttccatgaaggatagttatgaaagttatcaattctataaagtataccagatccttcaaagatttgctactgttggtttgtccaatttctatttggatgttgcaaaggatcgcctttatgttggaggccgagtcagcttcacaaggaaaagttgtcagactgtgctcatggcacatctgctctaccttgttagggccatttccccgattatgcctcacctagctgaggatgtctggcagaacctaccctttcaatacaccttgcaggatggatcccttgcaaactttgtttttgatctgaaatggccagaaaagaatgaagaatggctctcggccccgaaggatgatgttgatttcctgggtgttatcctggagttgaggtcagaggtcaacaaaattttggagaatgctcgcactggaaagttgattggttctagcttagatgcaaaggtttatctccataccgaaagttcagatacggtattaaagctaaaggagctatcttctgcatccaatgatgcagacgctctgcatcgcctgtttatcacatctcaggtcgatattcttccaatcctaaatgaagagattacatcatctgtaccatacacaggaaagttcagtaacccacgcactggagtcatatggattggtgtgactcgtgcggatggtgcaaaatgtgagaggtgttggaattacacacaggacgttggatctttccatgaccatcctactctctgcgttcggtgctatggtgtcattgagttgcagacacaacctgcggccgcagctgtcagttgaaaggagtgatgttaacgtatcctatcgaaccatctaattttgaggatcattggtggaattcattcttttggagagctttcacgctaccatgtggcggtagcctgggactccagcttgaatcaagttttgcatgcagcaagctgtactttagattcttcatacataggtcacgagagttgtttggagcttgggtcatcgcttactttcccatactactggggggcttatttggaacagttttttacacaaaactcctgacctgtaaatcaattttggaaaaccgtatccggtggtcgatccatgtattaatagagtaataatgttactatgttcatccaaatctcaaagacgtgatggttgtgttgaaaaaacagcttgaatca

SEQ ID NO: 218628 - DNA, 3512 bp, Zea Mays
ggctgccgccgaatggaagccgcctcatgctgccgcgtcttctccacgcagcggtgccgcttcccgctccgcaggctgtcggcgccgccgtggccgcagccgttctgcaccgagtccagcggcggcctcgtcaccccgtcggcctccaagcggaggtccaggggccccgtcatggccgcgaagaaggccgcggagggcgaaaaacaagaagatggaaaatacaagcacactgtggatctcccgaaaacaacatttgggctgagagcgaattctgtacagcgggagccagagctccaaaaattatgggacgataatcaggttctgaaaagggtttctgaaaggaacactgggactgcttttgttctccacgatggccctccctatgctaatggtgatcttcacatgggccatgcgctcaataaaatcctcaaggattttataaatcgctacaagctgcttcagaatcataaagtgtcctttgttcctggttgggattgccacggccttccaatagaactaaaagttttgaagtcaatggataaggaaactttgagtgctcttacacccataaaattaagacaaaaagctgcaaaatttgctaaagcaacagtcgatgcacaaatgaaatctttcaagcggtatggtgtatgggccgattgggacaacccttacctaactctgtcaccggaatacgaagctgctcagttggaagtgtttgggcaaatggttatgaaaggatatatctatagaggacgaaagcctgtccattggagtccatcatcacgtacggctttggcagaagctgaactggagtattccgaaaatcacatttccagaagcatatatgccgcattcaagattactaatccatctaaatctgggatgctagacgatttttttccaaatgtatctttggtcatatggaccaccactccatggacaattccggctaatgctgctgttgctgtgaacccaaagcttatttatgcagtagctgaggtacagtctgtatttgaaagtgagtcaacatccggtggtaaacaaagaaaagttggaaatatattgagttctgagaaaggaaaactgttcgttattgtggcttctgatcttatcacaactcttgagtccaaatggggtgtgaagcttgtagtacacaaatcatttcccggatctgccttggagcactgcaggtatgcccatcctgtgaatagcaacgaatgttccgtcattctaggaggagattacattacaactgaatcgggcactggccttgttcatactgcccctggccatggccaggaagactacataacaggtttgaagtatgggcttcctatcatttctcctgtggacgatgaagggaacttcacggctgaagctggacagttcggtggtttgtctgtcctgggggctggcaatgctgcagttgtgaagtatctggatgaacagtattcactcattttagaggaaccatacaaacacaagtacccctatgactggagatctaaagaaccaactatattccgagcaactgagcagtggtttgcatctgtggatggttttcgtgatgctgcaatggatgcaatcagacgagtaacttgggttccttctcagagaacttggggtgtccctattccagttttttaccatgtggactcacaggaacctcttataactgaagaaacgattgaacacatcaaggctattgtgttgaagaaaggtagcgatgcatggtggtatatgacaactgaggaacttcttccagatagatatcgggacaaagcatctgaatatcgcaagggaactgatacaatggatgtttggtttgactctggctcttcatgggcagctgttttagcaaaaagggacggtcttaattttcctgcggatatttatcttgaaggttcagatcaacatcgtggatggttccagagctcattgttgactagcattgctacaacagggaaggctccctactccagtgttattacacatggatttgtactggatgaaaagggtttcaaaatgagtaaatcaattggtaatgtagtggacccagagaaaatcattgttggtggcaaaaaccatagggaagaacctggctatggagcagatgttctccgtctatgggtttctagtgttgattacactacagatgtgttgattggcccacaaatcttgcgccagatgtctgacatgtatagaaaactacgaggcacgatgcgatttcttttgtcgaatctccatgattggaagccggataattctgtgccgtacaatgatctgccaaaaatcgacaagtatgcacttttccatttggagactgtcatgacttccatgaaggatagttatgaaagttatcaattctataaagtataccagatccttcaaagatttgctactgttggtttgtccaatttctatttggatgttgcaaaggatcgcctttatgttggaggccgagtcagcttcacaaggaaaagttgtcagactgtgctcatggcacatctgctctaccttgttagggccatttccccgattatgcctcacctagctgaggatgtctggcagaacctaccctttcaatacaccttgcaggatggatcccttgcaaactttgtttttgatctgaaatggccagaaaagaatgaagaatggctctcggccccgaaggatgatgttgatttcctgggtgttatcctggagttgaggtcagaggtcaacaaaattttggagaatgctcgcactggaaagttgattggttctagcttagatgcaaaggtttatctccataccgaaagttcagatacggtattaaagctaaaggagctatcttctgcatccaatgatgcagacgctctgcatcgcctgtttatcacatctcaggtcgatattcttccaatcctaaatgaagagattacatcatctgtaccatacacaggaaagttcagtaacccacgcactggagtcatatggattggtgtgactcgtgcggatggtgcaaaatgtgagaggtgttggaattacacacaggacgttggatctttccatgaccatcctactctctgcgttcggtgctatggtgtcattgagttgcagacacaacctgcggccgcagctgtcagttgaaaggagtgatgttaacgtatcctatcgaaccatctaattttgaggatcattggtggaattcattcttttggagagctttcacgctaccatgtggcggtagcctgggactccagcttgaatcaagttttgcatgcagcaagctgtactttagattcttcatacataggtcacgagagttgtttggagcttgggtcatcgcttactttcccatactactggggggcttatttggaacagttttttacacaaaactcctgacctgtaaatcaattttggaaaaccgtatccggtggtcgatccatgtattaatagagtaataatgttactatgttcatccaaatctcaaagacgtgatggttgtgttgaaaaaacagcttgaatca

SEQ ID NO: 218629 - DNA, 1643 bp, Zea Mays
cacggatatttttcttgaattttccatctacatgtttggaagcccatcgtacgatgtaatttcgtcaggggaacccttttttggccggaaacaatcctggcctcaagaggccagacaattctcccgactcgcctccgacggacgccagccgcaacgccgcgaaccccatcctcgggagcctctcctccgacggtcgatggcccggctccctgacgccatcctcgcaacgccaaccccagcctcgagaccgtcatctccgacgccatccccaagtgcctccgccgctgctccacatcctcttcccctctacaaggtgattctgatatcatcaagactacaccaggtgagcagtaaaagagtggtggcagtacatcctctctagagttgttactcagttttgaaaaaaggatgatttggaacaatgtgtatgagaaaggcttatttgatgtgatgcatgatcacaaagataatccaaaattcaaaggtcaaaatggttggaatcgtgatggatggaatagtatcactacgaagttcaatggaaagttccctctagctcatttctctaaacaacaaccacaagagaaggagagagagcttaaaggatactacaaggcaataagggattcaagaaaaaaaaagcggggctggttggaatgacactctatgcatggtactggccaaaccagaagtttggccatggctgattcgtgctcacccaaaagtatcaaagtttcgcaacaagccattccctcttttttacagtttagaagggctatatgaaggtagtgtggctatcggagagttaaatttcacatcaactgcttttgatcttcctccaccttcagctccatctaggagtgtgtctggacaaagtccaaatcccttgagtactaattcacttgatttggatggacaagaaaccacaagtgtgttcaatctgtctactaatgctcactctgtcccagtcagtactaatgaacccaccgaagctcagtttgtcccatctaatcaagaatcaagccaaagagaaggtgccagtgggagaaagcgtaagcaaagccatgttggattagccttgaaagttatgtggagtttaaaaagatcaattttctattagcaagtgtcaggctgaattgaaagaaatggatggattaacagtcgtggacaaatcatatgctttggagcttttcgtatctacgacaaacagagagattttcttaacaacaacagagcatgatgttagagaaatttggctcaagcacaaaattaggttgcttcatggcagtgatgcatggcctggacaattgatatgaggaaatttgagtgcaaagtgaaagcaactcatggagccgacatggagaagaaaaatgcaacgacagtctacatgaagcttgtgaaaaaagagttaaatctcaaagttcataataaagagacttgtattacagttttatgttatattgtttatctttttgtgatggatggatgtattacagttttagtttgttgttgcttcagtttgctgcccatacttcagtttgcttgacaaactattgtgatgatggataaagcgtgatgtgatgacggccaaccagtttactacttcagtttgctttcagtttactatgcttcagtttactgtttac

SEQ ID NO: 218630 - DNA, 1516 bp, Zea Mays
cttttttggccggaaacaatcctggcctcaagaggccagacaattctcccgactcgcctccgacggacgccagccgcaacgccgcgaaccccatcctcgggagcctctcctccgacggtcgatggcccggctccctgacgccatcctcgcaacgccaaccccagcctcgagaccgtcatctccgacgccatccccaagtgcctccgccgctgctccacatcctcttcccctctacaaggtgattctgatatcatcaagactacaccagttttgaaaaaaggatgatttggaacaatgtgtatgagaaaggcttatttgatgtgatgcatgatcacaaagataatccaaaattcaaaggtcaaaatggttggaatcgtgatggatggaatagtatcactacgaagttcaatggaaagttccctctagctcatttctctaaacaacaaccacaagagaaggagagagagcttaaaggatactacaaggcaataagggattcaagaaaaaaaaagcggggctggttggaatgacactctatgcatggtactggccaaaccagaagtttggccatggctgattcgtgctcacccaaaagtatcaaagtttcgcaacaagccattccctcttttttacagtttagaagggctatatgaaggtagtgtggctatcggagagttaaatttcacatcaactgcttttgatcttcctccaccttcagctccatctaggagtgtgtctggacaaagtccaaatcccttgagtactaattcacttgatttggatggacaagaaaccacaagtgtgttcaatctgtctactaatgctcactctgtcccagtcagtactaatgaacccaccgaagctcagtttgtcccatctaatcaagaatcaagccaaagagaaggtgccagtgggagaaagcgtaagcaaagccatgttggattagccttgaaagttatgtggagtttaaaaagatcaattttctattagcaagtgtcaggctgaattgaaagaaatggatggattaacagtcgtggacaaatcatatgctttggagcttttcgtatctacgacaaacagagagattttcttaacaacaacagagcatgatgttagagaaatttggctcaagcacaaaattaggttgcttcatggcagtgatgcatggcctggacaattgatatgaggaaatttgagtgcaaagtgaaagcaactcatggagccgacatggagaagaaaaatgcaacgacagtctacatgaagcttgtgaaaaaagagttaaatctcaaagttcataataaagagacttgtattacagttttatgttatattgtttatctttttgtgatggatggatgtattacagttttagtttgttgttgcttcagtttgctgcccatacttcagtttgcttgacaaactattgtgatgatggataaagcgtgatgtgatgacggccaaccagtttactacttcagtttgctttcagtttactatgcttcagtttactgtttac

SEQ ID NO: 218631 - DNA, 2971 bp, Zea Mays
cttttttggccggaaacaatcctggcctcaagaggccagacaattctcccgactcgcctccgacggacgccagccgcaacgccgcgaaccccatcctcgggagcctctcctccgacggtcgatggcccggctccctgacgccatcctcgcaacgccaaccccagcctcgagaccgtcatctccgacgccatccccaagtgcctccgccgctgctccacatcctcttcccctctacaaggtgattctgatatcatcaagactacaccaggtgagcagtaaaagagtggtggcagtacatcctctctagagttgttactcaggaagagaaagagcccatccacacctcctcactcactggtgctaaaaaggttagagaaattcttgaaggacatgagagttggtgcaaatctgagtttcaaatggagccagcaatattcgaaaccacaacaaattttcttagaagagagaatttactacgagacacacgaggagttatcgttgagaagcagcttgggatgttcatgtacatgatctccaacaatgctagtaaccaaatgctacagaaggcttttcaacatagtggagagactatccataggaaaatatctgaagtatttgatatagttcccacactaactcaatgttttgtgaagcttcctagctctatccaaactcacaccaaaattgctacagattctaggttcatgccatttttaggtgagctatcaatttgaaacacacaattcgcttaagtgtttccctttcattgacagtttaccacatggcctcaatatctttccttattcttttccttgcagaactgcattggtgcaatcgacggcacacatatacccaccaccatagcagaacatagggcccctccatatagaaacatgaaaggaactctttcacacaatgttatggtagcctgcgactttgacctcaatttcacatttgtttcatgtggatgggaggggtcagcctcagatgcaggggtgcttcgatctgctattagcaaaggatttagtgtgccagaaggaaagttttatgtagtagatggtgggtatgcaaatacatcatccttcattgcaccatatagaggggttcgataccatctcaatgagtttaggaggcgtcgttcatcacaaagtggttatgcgaactacaaagagctgttcaaccatcgccatgcaattctctgtaaccatatagagagggccatcgatgttctaaagaaaaggttcccgattctaaaagtaggcacatttcgtcccatagagaaccaaatcaagatcgcaactgcaactattgcatttcacaacataattagagggcaaaatggagacaaaagatggcttgacaaccaaccagattacatctctccaagtcaatatgttgatgtcccagagggagataccaactatctcaatgacacagaatcaagtgatggaagctctctaagagatcagatcacacttcagatgtgggctgcctacaatagctagatgggtgcttataatggcttctagtttgtcatgtagctagttgcctagttcgtcggttatgtactattattacttatgaagtctttatggtttgtagtttgtcatgtagctagttgctgagttcatttgttatgtacaattattacttatgaacttaaagtagcctatttatgaacttaaaattacctagttatgtactattatttccacaatttcagttttgaaaaaaggatgatttggaacaatgtgtatgagaaaggcttatttgatgtgatgcatgatcacaaagataatccaaaattcaaaggtcaaaatggttggaatcgtgatggatggaatagtatcactacgaagttcaatggaaagttccctctagctcatttctctaaacaacaaccacaagagaaggagagagagcttaaaggatactacaaggcaataagggattcaagaaaaaaaaagcggggctggttggaatgacactctatgcatggtactggccaaaccagaagtttggccatggctgattcgtgctcacccaaaagtatcaaagtttcgcaacaagccattccctcttttttacagtttagaagggctatatgaaggtagtgtggctatcggagagttaaatttcacatcaactgcttttgatcttcctccaccttcagctccatctaggagtgtgtctggacaaagtccaaatcccttgagtactaattcacttgatttggatggacaagaaaccacaagtgtgttcaatctgtctactaatgctcactctgtcccagtcagtactaatgaacccaccgaagctcagtttgtcccatctaatcaagaatcaagccaaagagaaggtgccagtgggagaaagcgtaagcaaagccatgttggattagccttgaaagttatgtggagtttaaaaagatcaattttctattagcaagtgtcaggctgaattgaaagaaatggatggattaacagtcgtggacaaatcatatgctttggagcttttcgtatctacgacaaacagagagattttcttaacaacaacagagcatgatgttagagaaatttggctcaagcacaaaattaggttgcttcatggcagtgatgcatggcctggacaattgatatgaggaaatttgagtgcaaagtgaaagcaactcatggagccgacatggagaagaaaaatgcaacgacagtctacatgaagcttgtgaaaaaagagttaaatctcaaagttcataataaagagacttgtattacagttttatgttatattgtttatctttttgtgatggatggatgtattacagttttagtttgttgttgcttcagtttgctgcccatacttcagtttgcttgacaaactattgtgatgatggataaagcgtgatgtgatgacggccaaccagtttactacttcagtttgctttcagtttactatgcttcagtttactgtttac

SEQ ID NO: 218632 - DNA, 3084 bp, Zea Mays
cttttttggccggaaacaatcctggcctcaagaggccagacaattctcccgactcgcctccgacggacgccagccgcaacgccgcgaaccccatcctcgggagcctctcctccgacggtcgatggcccggctccctgacgccatcctcgcaacgccaaccccagcctcgagaccgtcatctccgacgccatccccaagtgcctccgccgctgctccacatcctcttcccctctacaaggtgattctgatatcatcaagactacaccaggtgagcagtaaaagagtggtggcagtacatcctctctagagttgttactcaggtttgtatgttggcagcagtatgctcctagttaccttctaaagtttctcctaatttctcaatgggtttgtgataacttgccttttgttcttagtttcatgagtcatatatatatatatatataagagctatctccatgttttgcatgcttaagttccttataagagctatctccacttctctatatatgggttcttgggagcagcaagttagacaatttttgttagatgaggaagaagatgatgatgagttgttctttgctattctccctgctataattccatatctctcagaagagaaagagcccatccacacctcctcactcactggtgctaaaaaggttagagaaattcttgaaggacatgagagttggtgcaaatctgagtttcaaatggagccagcaatattcgaaaccacaacaaattttcttagaagagagaatttactacgagacacacgaggagttatcgttgagaagcagcttgggatgttcatgtacatgatctccaacaatgctagtaaccaaatgctacagaaggcttttcaacatagtggagagactatccataggaaaatatctgaagtatttgatatagttcccacactaactcaatgttttgtgaagcttcctagctctatccaaactcacaccaaaattgctacagattctaggttcatgccatttttagaactgcattggtgcaatcgacggcacacatatacccaccaccatagcagaacatagggcccctccatatagaaacatgaaaggaactctttcacacaatgttatggtagcctgcgactttgacctcaatttcacatttgtttcatgtggatgggaggggtcagcctcagatgcaggggtgcttcgatctgctattagcaaaggatttagtgtgccagaaggaaagttttatgtagtagatggtgggtatgcaaatacatcatccttcattgcaccatatagaggggttcgataccatctcaatgagtttaggaggcgtcgttcatcacaaagtggttatgcgaactacaaagagctgttcaaccatcgccatgcaattctctgtaaccatatagagagggccatcgatgttctaaagaaaaggttcccgattctaaaagtaggcacatttcgtcccatagagaaccaaatcaagatcgcaactgcaactattgcatttcacaacataattagagggcaaaatggagacaaaagatggcttgacaaccaaccagattacatctctccaagtcaatatgttgatgtcccagagggagataccaactatctcaatgacacagaatcaagtgatggaagctctctaagagatcagatcacacttcagatgtgggctgcctacaatagctagatgggtgcttataatggcttctagtttgtcatgtagctagttgcctagttcgtcggttatgtactattattacttatgaagtctttatggtttgtagtttgtcatgtagctagttgctgagttcatttgttatgtacaattattacttatgaacttaaagtagcctatttatgaacttaaaattacctagttatgtactattatttccacaatttcagttttgaaaaaaggatgatttggaacaatgtgtatgagaaaggcttatttgatgtgatgcatgatcacaaagataatccaaaattcaaaggtcaaaatggttggaatcgtgatggatggaatagtatcactacgaagttcaatggaaagttccctctagctcatttctctaaacaacaaccacaagagaaggagagagagcttaaaggatactacaaggcaataagggattcaagaaaaaaaaagcggggctggttggaatgacactctatgcatggtactggccaaaccagaagtttggccatggctgattcgttgtggctatcggagagttaaatttcacatcaactgcttttgatcttcctccaccttcagctccatctaggagtgtgtctggacaaagtccaaatcccttgagtactaattcacttgatttggatggacaagaaaccacaagtgtgttcaatctgtctactaatgctcactctgtcccagtcagtactaatgaacccaccgaagctcagtttgtcccatctaatcaagaatcaagccaaagagaaggtgccagtgggagaaagcgtaagcaaagccatgttggattagccttgaaagttatgtggagtttaaaaagatcaattttctattagcaagtgtcaggctgaattgaaagaaatggatggattaacagtcgtggacaaatcatatgctttggagcttttcgtatctacgacaaacagagagattttcttaacaacaacagagcatgatgttagagaaatttggctcaagcacaaaattaggttgcttcatggcagtgatgcatggcctggacaattgatatgaggaaatttgagtgcaaagtgaaagcaactcatggagccgacatggagaagaaaaatgcaacgacagtctacatgaagcttgtgaaaaaagagttaaatctcaaagttcataataaagagacttgtattacagttttatgttatattgtttatctttttgtgatggatggatgtattacagttttagtttgttgttgcttcagtttgctgcccatacttcagtttgcttgacaaactattgtgatgatggataaagcgtgatgtgatgacggccaaccagtttactacttcagtttgctttcagtttactatgcttcagtttactgtttac

SEQ ID NO: 218633 - DNA, 2003 bp, Zea Mays
cttttttggccggaaacaatcctggcctcaagaggccagacaattctcccgactcgcctccgacggacgccagccgcaacgccgcgaaccccatcctcgggagcctctcctccgacggtcgatggcccggctccctgacgccatcctcgcaacgccaaccccagcctcgagaccgtcatctccgacgccatccccaagtgcctccgccgctgctccacatcctcttcccctctacaaggtgattctgatatcatcaagactacaccagttttgaaaaaaggatgatttggaacaatgtgtatgagaaaggcttatttgatgtgatgcatgatcacaaagataatccaaaattcaaaggtcaaaatggttggaatcgtgatggatggaatagtatcactacgaagttcaatggaaagttccctctagctcatttctctaaacaacaaccacaagagaaggagagagagcttaaaggatactacaaggcaataagggattcaagaaaaaaaaagcggggctggttggaatgacactctatgcatggtactggccaaaccagaagtttggccatggctgattcgtgctcacccaaaagtatcaaagtttcgcaacaagccattccctcttttttacagtttagaagggctatatgaaggtacttgtgtgtatacttcagcattttttgttagattttttgtatcatgaattgcagtactgtgcctggaactaaaacatgaaattcgtcatgttagactgattgattccttgtttaatactgatctgctagctgtgtgtgtatatgtctagtgatcccttgtctagaactgatctagttttcttgatgagcagctgtgtgtgtatatgtctacttataggctataatttgcaagtaagaacagctgctagcaagctagatgtgcctgaactgtagttcatctcctgctgtgtttatatttgttcctgtgcggggacatagatgtgcttgaactgcagcccgaatctagtcttgtgtgttcttctgttcttaatctcttacatgcattacctctgttctatacttggctagagttcttctcacttgttcttaatttcttgatcagtagtcctcacaacagagtatacttctgctacattttgtataggtagtgtggctatcggagagttaaatttcacatcaactgcttttgatcttcctccaccttcagctccatctaggagtgtgtctggacaaagtccaaatcccttgagtactaattcacttgatttggatggacaagaaaccacaagtgtgttcaatctgtctactaatgctcactctgtcccagtcagtactaatgaacccaccgaagctcagtttgtcccatctaatcaagaatcaagccaaagagaaggtgccagtgggagaaagcgtaagcaaagccatgttggattagccttgaaagttatgtggagtttaaaaagatcaattttctattagcaagtgtcaggctgaattgaaagaaatggatggattaacagtcgtggacaaatcatatgctttggagcttttcgtatctacgacaaacagagagattttcttaacaacaacagagcatgatgttagagaaatttggctcaagcacaaaattaggttgcttcatggcagtgatgcatggcctggacaattgatatgaggaaatttgagtgcaaagtgaaagcaactcatggagccgacatggagaagaaaaatgcaacgacagtctacatgaagcttgtgaaaaaagagttaaatctcaaagttcataataaagagacttgtattacagttttatgttatattgtttatctttttgtgatggatggatgtattacagttttagtttgttgttgcttcagtttgctgcccatacttcagtttgcttgacaaactattgtgatgatggataaagcgtgatgtgatgacggccaaccagtttactacttcagtttgctttcagtttactatgcttcagtttactgtttac

SEQ ID NO: 218634 - DNA, 3098 bp, Zea Mays
cttttttggccggaaacaatcctggcctcaagaggccagacaattctcccgactcgcctccgacggacgccagccgcaacgccgcgaaccccatcctcgggagcctctcctccgacggtcgatggcccggctccctgacgccatcctcgcaacgccaaccccagcctcgagaccgtcatctccgacgccatccccaagtgcctccgccgctgctccacatcctcttcccctctacaaggtgattctgatatcatcaagactacaccaggtgagcagtaaaagagtggtggcagtacatcctctctagagttgttactcaggtttgtatgttggcagcagtatgctcctagttaccttctaaagtttctcctaatttctcaatgggtttgtgataacttgccttttgttcttagtttcatgagtcatatatatatatatatataagagctatctccatgttttgcatgcttaagttccttataagagctatctccacttctctatatatgggttcttgggagcagcaagttagacaatttttgttagatgaggaagaagatgatgatgagttgttctttgctattctccctgctataattccatatctctcagaagagaaagagcccatccacacctcctcactcactggtgctaaaaaggttagagaaattcttgaaggacatgagagttggtgcaaatctgagtttcaaatggagccagcaatattcgaaaccacaacaaattttcttagaagagagaatttactacgagacacacgaggagttatcgttgagaagcagcttgggatgttcatgtacatgatctccaacaatgctagtaaccaaatgctacagaaggcttttcaacatagtggagagactatccataggaaaatatctgaagtatttgatatagttcccacactaactcaatgttttgtgaagcttcctagctctatccaaactcacaccaaaattgctacagattctaggttcatgccatttttagaactgcattggtgcaatcgacggcacacatatacccaccaccatagcagaacatagggcccctccatatagaaacatgaaaggaactctttcacacaatgttatggtagcctgcgactttgacctcaatttcacatttgtttcatgtggatgggaggggtcagcctcagatgcaggggtgcttcgatctgctattagcaaaggatttagtgtgccagaaggaaagttttatgtagtagatggtgggtatgcaaatacatcatccttcattgcaccatatagaggggttcgataccatctcaatgagtttaggaggcgtcgttcatcacaaagtggttatgcgaactacaaagagctgttcaaccatcgccatgcaattctctgtaaccatatagagagggccatcgatgttctaaagaaaaggttcccgattctaaaagtaggcacatttcgtcccatagagaaccaaatcaagatcgcaactgcaactattgcatttcacaacataattagagggcaaaatggagacaaaagatggcttgacaaccaaccagattacatctctccaagtcaatatgttgatgtcccagagggagataccaactatctcaatgacacagaatcaagtgatggaagctctctaagagatcagatcacacttcagatgtgggctgcctacaatagctagatgggtgcttataatggcttctagtttgtcatgtagctagttgcctagttcgtcggttatgtactattattacttatgaagtctttatggtttgtagtttgtcatgtagctagttgctgagttcatttgttatgtacaattattacttatgaacttaaagtagcctatttatgaacttaaaattacctagttatgtactattatttccacaatttcagttttgaaaaaaggatgatttggaacaatgtgtatgagaaaggcttatttgatgtgatgcatgatcacaaagataatccaaaattcaaaggtcaaaatggttggaatcgtgatggatggaatagtatcactacgaagttcaatggaaagttccctctagctcatttctctaaacaacaaccacaagagaaggagagagagcttaaaggatactacaaggcaataagggattcaagaaaaaaaaagcggggctggttggaatgacactctatgcatggtactggccaaaccagaagtttggccatggctgattcgtgctcacccaaaagtatcaaagtttcgcaacaagccattccctcttttttacagtttagaagggctatatgaagctccatctaggagtgtgtctggacaaagtccaaatcccttgagtactaattcacttgatttggatggacaagaaaccacaagtgtgttcaatctgtctactaatgctcactctgtcccagtcagtactaatgaacccaccgaagctcagtttgtcccatctaatcaagaatcaagccaaagagaaggtgccagtgggagaaagcgtaagcaaagccatgttggattagccttgaaagttatgtggagtttaaaaagatcaattttctattagcaagtgtcaggctgaattgaaagaaatggatggattaacagtcgtggacaaatcatatgctttggagcttttcgtatctacgacaaacagagagattttcttaacaacaacagagcatgatgttagagaaatttggctcaagcacaaaattaggttgcttcatggcagtgatgcatggcctggacaattgatatgaggaaatttgagtgcaaagtgaaagcaactcatggagccgacatggagaagaaaaatgcaacgacagtctacatgaagcttgtgaaaaaagagttaaatctcaaagttcataataaagagacttgtattacagttttatgttatattgtttatctttttgtgatggatggatgtattacagttttagtttgttgttgcttcagtttgctgcccatacttcagtttgcttgacaaactattgtgatgatggataaagcgtgatgtgatgacggccaaccagtttactacttcagtttgctttcagtttactatgcttcagtttactgtttac

SEQ ID NO: 218635 - DNA, 1417 bp, Zea Mays
cggaaacaatcctggcctcaagaggccagacaattctcccgactcgcctccgacggacgccagccgcaacgccgcgaaccccatcctcgggagcctctcctccgacggtcgatggcccggctccctgacgccatcctcgcaacgccaaccccagcctcgagaccgtcatctccgacgccatccccaagtgcctccgccgctgctccacatcctcttcccctctacaaggtgattctgatatcatcaagactacaccaggtcaaaatggttggaatcgtgatggatggaatagtatcactacgaagttcaatggaaagttccctctagctcatttctctaaacaacaaccacaagagaaggagagagagcttaaaggatactacaaggcaataagggattcaagaaaaaaaaagcggggctggttggaatgacactctatgcatggtactggccaaaccagaagtttggccatggctgattcgtgctcacccaaaagtatcaaagtttcgcaacaagccattccctcttttttacagtttagaagggctatatgaaggtagtgtggctatcggagagttaaatttcacatcaactgcttttgatcttcctccaccttcagctccatctaggagtgtgtctggacaaagtccaaatcccttgagtactaattcacttgatttggatggacaagaaaccacaagtgtgttcaatctgtctactaatgctcactctgtcccagtcagtactaatgaacccaccgaagctcagtttgtcccatctaatcaagaatcaagccaaagagaaggtgccagtgggagaaagcgtaagcaaagccatgttggattagccttgaaagttatgtggagtttaaaaagatcaattttctattagcaagtgtcaggctgaattgaaagaaatggatggattaacagtcgtggacaaatcatatgctttggagcttttcgtatctacgacaaacagagagattttcttaacaacaacagagcatgatgttagagaaatttggctcaagcacaaaattaggttgcttcatggcagtgatgcatggcctggacaattgatatgaggaaatttgagtgcaaagtgaaagcaactcatggagccgacatggagaagaaaaatgcaacgacagtctacatgaagcttgtgaaaaaagagttaaatctcaaagttcataataaagagacttgtattacagttttatgttatattgtttatctttttgtgatggatggatgtattacagttttagtttgttgttgcttcagtttgctgcccatacttcagtttgcttgacaaactattgtgatgatggataaagcgtgatgtgatgacggccaaccagtttactacttcagtttgctttcagtttactatgcttcagtttactgtttac

SEQ ID NO: 218636 - DNA, 2993 bp, Zea Mays
aaacaatcctggcctcaagaggccagacaattctcccgactcgcctccgacggacgccagccgcaacgccgcgaaccccatcctcgggagcctctcctccgacggtcgatggcccggctccctgacgccatcctcgcaacgccaaccccagcctcgagaccgtcatctccgacgccatccccaagtgcctccgccgctgctccacatcctcttcccctctacaaggtgattctgatatcatcaagactacaccagcaagttagacaatttttgttagatgaggaagaagatgatgatgagttgttctttgctattctccctgctataattccatatctctcagaagagaaagagcccatccacacctcctcactcactggtgctaaaaaggttagagaaattcttgaaggacatgagagttggtgcaaatctgagtttcaaatggagccagcaatattcgaaaccacaacaaattttcttagaagagagaatttactacgagacacacgaggagttatcgttgagaagcagcttgggatgttcatgtacatgatctccaacaatgctagtaaccaaatgctacagaaggcttttcaacatagtggagagactatccataggaaaatatctgaagtatttgatatagttcccacactaactcaatgttttgtgaagcttcctagctctatccaaactcacaccaaaattgctacagattctaggttcatgccatttttaggtgagctatcaatttgaaacacacaattcgcttaagtgtttccctttcattgacagtttaccacatggcctcaatatctttccttattcttttccttgcagaactgcattggtgcaatcgacggcacacatatacccaccaccatagcagaacatagggcccctccatatagaaacatgaaaggaactctttcacacaatgttatggtagcctgcgactttgacctcaatttcacatttgtttcatgtggatgggaggggtcagcctcagatgcaggggtgcttcgatctgctattagcaaaggatttagtgtgccagaaggaaagttttatgtagtagatggtgggtatgcaaatacatcatccttcattgcaccatatagaggggttcgataccatctcaatgagtttaggaggcgtcgttcatcacaaagtggttatgcgaactacaaagagctgttcaaccatcgccatgcaattctctgtaaccatatagagagggccatcgatgttctaaagaaaaggttcccgattctaaaagtaggcacatttcgtcccatagagaaccaaatcaagatcgcaactgcaactattgcatttcacaacataattagagggcaaaatggagacaaaagatggcttgacaaccaaccagattacatctctccaagtcaatatgttgatgtcccagagggagataccaactatctcaatgacacagaatcaagtgatggaagctctctaagagatcagatcacacttcagatgtgggctgcctacaatagctagatgggtgcttataatggcttctagtttgtcatgtagctagttgcctagttcgtcggttatgtactattattacttatgaagtctttatggtttgtagtttgtcatgtagctagttgctgagttcatttgttatgtacaattattacttatgaacttaaagtagcctatttatgaacttaaaattacctagttatgtactattatttccacaatttcagttttgaaaaaaggatgatttggaacaatgtgtatgagaaaggcttatttgatgtgatgcatgatcacaaagataatccaaaattcaaaggtcaaaatggttggaatcgtgatggatggaatagtatcactacgaagttcaatggaaagttccctctagctcatttctctaaacaacaaccacaagagaaggagagagagcttaaaggatactacaaggcaataagggattcaagaaaaaaaaagcggggctggttggaatgacactctatgcatggtactggccaaaccagaagtttggccatggctgattcgtgctcacccaaaagtatcaaagtttcgcaacaagccattccctcttttttacagtttagaagggctatatgaaggtagtgtggctatcggagagttaaatttcacatcaactgcttttgatcttcctccaccttcagctccatctaggagtgtgtctggacaaagtccaaatcccttgagtactaattcacttgatttggatggacaagaaaccacaagtgtgttcaatctgtctactaatgctcactctgtcccagtcagtactaatgaacccaccgaagctcagtttgtcccatctaatcaagaatcaagccaaagagaaggtgccagtgggagaaagcgtaagcaaagccatgttggattagccttgaaagttatgtggagtttaaaaagatcaattttctattagcaagtgtcaggctgaattgaaagaaatggatggattaacagtcgtggacaaatcatatgctttggagcttttcgtatctacgacaaacagagagattttcttaacaacaacagagcatgatgttagagaaatttggctcaagcacaaaattaggttgcttcatggcagtgatgcatggcctggacaattgatatgaggaaatttgagtgcaaagtgaaagcaactcatggagccgacatggagaagaaaaatgcaacgacagtctacatgaagcttgtgaaaaaagagttaaatctcaaagttcataataaagagacttgtattacagttttatgttatattgtttatctttttgtgatggatggatgtattacagttttagtttgttgttgcttcagtttgctgcccatacttcagtttgcttgacaaactattgtgatgatggataaagcgtgatgtgatgacggccaaccagtttactacttcagtttgctttcagtttactatgcttcagtttactgtttac

SEQ ID NO: 218637 - DNA, 829 bp, Zea Mays
gaaaggaggctgagttagcagtatcgaaattttctggaaatggtgcgggggtcatgtctgctgctggtactattgctagcacattcgtattggtttttgttgctgaatggggtgataaatcatttttctccacaattgcactagcagcagcttcatcccctctgggtgtcattgcgggatcactagctggtcatgccattgcaacattgattgcagttcttggtggctctttgctgggaacattcctgtctgaaaagattatagcatacattggagggagcctattcttggcctttgctgcgattaccatagttgagatagtgacttgaaaagggagttccagcttccacaattcataaaaagtactgatcttttgtcagggcaatgaaaaatcagcttgatcgtaatggtagtacattgatgtgttaccgaacatgattgtccacaggaacttcattgttcgtatgggacgtcctaggcttgcgtagagtgttttgtttctggtgatgagaatttctgcttctttatccaagaacaatgtttttgtcatcatcatgatttgtagtggaaacactgatagtcaggttggtcggaagatgggactgggagcaaaactatgaattccatgtagcttttgaacttcctcttacattatttacaagtatatgaatcagccttttcgtatttatggggaagacttccctggtttatgtcttccctagactttattcacactagttcaaccctttttatatgaatctaagtgttagattggaagccctaaccctaactagagttgggatgttgtattaataagtaggaacatatc

SEQ ID NO: 218638 - DNA, 5016 bp, Zea Mays
attgggttagtttcttactactctggtgctcatcgttcacatcccagagagagacgcgcccgatccgatcacattgccgccgcgcctctccgactctcatcccatataggagtacacttcccccctcaggggagaaccgtgcgcgttttgttttcctcttctattagtagttcttgcaacctctatacatacgtatctagttgtcgtaagagacagagactcatcgctgcacctccagattagatcacggcggaggcagagggagaggccaacctatacctacataacgtctagtcgcagagacttaattagtatactgcacttccagaccaggccagatcaaggcggcggacgcgcaggggcgggggcgggggcggaggcggaggcggaggcgatggcggcgagcggcgccgtccaaccccacgtggcgttggatgtcaatgtggaggaggacgccaacgacgacgaggcggccgaccggctctgggcgaccatcgagcaggtcgcctcccctcagcggcgcaacctcgcgatcgtcgccctcgaccccggcagtgcatcacagaagaaggaggaggtcatggacgtgcggaggctcgaccgccgcggcgcccagcgcgtgctccagagggcgctggccaccgccgactgcgataacgcgaaactcctccgcggcatcagggaccgccttgacgcggcgggactggacgtgccacgggtggaggtgaggttccgcaacctgacggtgtccacggaggtccactacggccgccgggcgttgccaacgctcctcaactacgtccatgacattgccgagaggcttttaatttgctgccatcttttacgtcctaagaagaccaagctcactattctggatgatgttagtgggcttctacagcctgggagaatgacactgttgctggggccaccatcatctgggaaatcgacgctcttgttggcccttgctggtaaactggatcctcagctaaagaaaactggacaagtaacctacaacggaacttcgcttactgaattctttgtacaaaggacttctgcgtatgtcagccagacagacaaccatattggagaattgacagtgagggaaactttagattttgctgcaaaatgccagggtgcaagcgaaaactggcaagagtgcttgaaggagctacgcgatcttgaagggaagagaggaataagaccaaatccagaaatagatgccttcatgaagacagcatcagttggaggacagaaacacaatcttgttacggactatgttcttagagtgcttggactggatctatgtgctgatactgctgttggtactgatatggacagaggtgtctctggtgggcagaagaaacgagtcacaacaggtgaaatggttgttggaccaagaaaaacccttcttatggatgaaatatctactggtcttgatagctcaacgacttatcaaatagttaaatgcatgaggaactttgttcatgagatggaggctactgtgctgatgtcacttctccaacctgcaccagagacatttgacctttttgatgatataattcttctctcagaaggacaaatcgtttatcaaggccccactgtgcaagttgtggattatttcaattcattaggattttcactgccgcctcgtaagggaattgcggattttctccaagaggtaacatcaaggaaagaccaatcccaatactggtcagataagtcaagaccttattcttttatttctgcagcgacaatggcttctgcatttaaacaatccgagtatggcagagctctggattctgttttatgcaactcttatgatggcacaaattctcctaaggtgcttgcaagatcaaagtttgccgtatcaaaacttagccttgttaaagcatgcttttccagggagcttgttttaataagtcgcaaccgttttctctacattttcaggacatgccaagttgcttttgttgggataatcacctgcacaatctttctccgcacaagattgcaccctgtcgatgagcaaaatggcgatctttatctctcttgtctgttctatgggcttgtacatatgatgttcaatggttttacagaattgcccattactatttcacggcttccagtgttttataagcagagagacaatttctttcatcctgcatgggctttctcaatccccaactggatattaagaattccatattctcttattgaggctctagtgtggtcatgtgttgtttactacacagtaggctttgaaccaactgctgataggttctttcgctttatgctattgttgttctctctccatcaaatggctttgggccttttccggatgatgggggctatagcaagagacatgactattgctaatacttttggatcggctgccttattggcaatttttcttttaggagggttcattgtccctaaagaggctataaaaccatggtggcagtgggcttattggctttctcccttgatgtatggacaacgtgctatttcagttaacgaattctcagcatccagatggtcaaaggtatttggcgttggcaacagtcccgttggatccaatgttcttattttacacaatctccctacacaagattactggtactggattggagtttgtgctttattagcttatgctatcttgttcaatgccttgtttactcttgctttgacattccttaaccctctacggaaggcccaagcaattgttccatccaattttgaagaaacaaatgatgcattgactgatagtatatcagatggacatgcaattgcagaaaataatagcagaaattgtgaagtcaaagggcagactgaaggcgaactcaacaagggaatgatattaccatttcaacctctaacaatgacatttcacaatattaactattttgttgatatgccaaaggaaatgaaatcaagagagaaaagactacagttgctatctgaagtaagtggagtatttaggccacgtgtcttaacagcactggttggctcaagtggtgctggaaagacgacccttcttgacgttttagctggtagaaaaacaggtggatatattgaaggtgatatcaagatttctggccataagaaagaacaaagaacctttgccaggatagctggatatgttgagcaaaatgatatacactcgccacaagtaacagttgaagagtccttgtggttttcatcaatcttacgacttccgaaagatataagtacaaaaacgagacatgaatttgttgaggaagttatggctttggtagagcttgatcagctgagacatgcattagtagggaaggagggttctactggattatcaacagagcaaagaaagcgcctcacaatagctgttgaactagttgcaaatccttcaattatttttttggatgaacctacttctggtttggatgctcgagcagctgccattgtgatgcggactattagaaatactgttgatactggaagaactgttgtttgcactatacaccagcccagcattgacatatttgaagcttttgatgagctcctccttctgaaacgtgggggacgcgttatatatggtggttctctgggtgtcaattcaatcgatatgattgattactttcagtccattcctggtgttaatcatatttctgaaggctacaatccagcaacctggatgcttgaaatcaccacacaagcatgtgaagagattcttggtttagattttgcagtggtgtacaaaaactccgaccagttcagggaagtcgaacagttaattaaagaatcgagtattccagctattggcacggaacctttaaaattctcatcagagttttcacagaactttcttactcagttcaaagcttgctggcgtaagcaaagacttgtttactggagaagtccagagtacaatgttgtgcggttatttttcacggcaattgcagctatcatattcggatcgatattttggaatgttgggatgaaacgagacacaacagaagatttgatgcttgtcatgggatctctttacgcggcatgcctgtttcttggtgtaaataacgcctcatccgtgcagcctgtagtatcaactgagaggactgtctactaccgggaacgtgctgctaaaatgtactcatcgttcccatatgctgcagcacagggtcttgtagagattccttacattgcagttcagacactgatatttggcctcatcacgtacttcatgatcaactacgagaggaacataggaaagctgcttctgtatcttcttttcatgttccttactttcacctacttcacgttctacgggatggtggcggtaggcttgaccccaacacaacaagttgcagcagtagtgtcatctgctttttactccttgtggaatcttctctccgggttcctcatcccccagtctaggatccctggctggtggatctggttctattacatctgtccagtggcctggaccctgcgaggcatcattacatctcagctgggcgatgtgcaggccaggatagtcggccctggtttcgatgggaccgtgcaggagttccttgaggaaagcctggggttccaacaggggatggctggtgtcacggttgcggtgctcattggcttctcccttttcttcttcgccgtctacgcgacttctatcaaggttctgaatttccagagaagatgaccagctgcctgagctaagtaagcctccgtggtttgcttttgctactgtgtggtgccaacatcaaagtctacttgctagctactcggcggatgccggatggatgaagcacccgttggtcgtaggattgaagttttcacacgtagagaggatggtagataattaaaggttcatgtctgtatatgattactatcgcaaatataatgagaaacagtagtgatgcatttgtgctatacgtaagatatacagaagagtatgcctcatctgttgccttgacaatagccaaccatgtgactatttatctggtttttctatatatatatcaacagagaagtaaaatgtcttct

SEQ ID NO: 218639 - DNA, 4941 bp, Zea Mays
attgggttagtttcttactactctggtgctcatcgttcacatcccagagagagacgcgcccgatccgatcacattgccgccgcgcctctccgactctcatcccatataggagtacacttcccccctcaggggagaaccgtgcgcgttttgttttcctcttctattagtagttcttgcaacctctatacatacgtatctagttgtcgtaagagacagagactcatcgctgcacctccagattagatcacggcggaggcagagggagaggccaacctatacctacataacgtctagtcgcagagacttaattagtatactgcacttccagaccaggccagatcaaggcggcggacgcgcaggggcgggggcgggggcggaggcggaggcggaggcgatggcggcgagcggcgccgtccaaccccacgtggcgttggatgtcaatgtggaggaggacgccaacgacgacgaggcggccgaccggctctgggcgaccatcgagcaggtcgcctcccctcagcggcgcaacctcgcgatcgtcgccctcgaccccggcagtgcatcacagaagaaggaggaggtcatggacgtgcggaggctcgaccgccgcggcgcccagcgcgtgctccagagggcgctggccaccgccgactgcgataacgcgaaactcctccgcggcatcagggaccgccttgacgcggcgggactggacgtgccacgggtggaggtgaggttccgcaacctgacggtgtccacggaggtccactacggccgccgggcgttgccaacgctcctcaactacgtccatgacattgccgagaggcttttaatttgctgccatcttttacgtcctaagaagaccaagctcactattctggatgatgttagtgggcttctacagcctgggagaatgacactgttgctggggccaccatcatctgggaaatcgacgctcttgttggcccttgctggtaaactggatcctcagctaaagaaaactggacaagtaacctacaacggaacttcgcttactgaattctttgtacaaaggacttctgcgtatgtcagccagacagacaaccatattggagaattgacagtgagggaaactttagattttgctgcaaaatgccagggtgcaagcgaaaactggcaagagtgcttgaaggagctacgcgatcttgaagggaagagaggaataagaccaaatccagaaatagatgccttcatgaagacagcatcagttggaggacagaaacacaatcttgttacggactatgttcttagagtgcttggactggatctatgtgctgatactgctgttggtactgatatggacagaggtgtctctggtgggcagaagaaacgagtcacaacaggtgaaatggttgttggaccaagaaaaacccttcttatggatgaaatatctactggtcttgatagctcaacgacttatcaaatagttaaatgcatgaggaactttgttcatgagatggaggctactgtgctgatgtcacttctccaacctgcaccagagacatttgacctttttgatgatataattcttctctcagaaggacaaatcgtttatcaaggccccactgtgcaagttgtggattatttcaattcattaggattttcactgccgcctcgtaagggaattgcggattttctccaagaggtaacatcaaggaaagaccaatcccaatactggtcagataagtcaagaccttattcttttatttctgcagcgacaatggcttctgcatttaaacaatccgagtatggcagagctctggattctgttttatgcaactcttatgatggcacaaattctcctaaggtgcttgcaagatcaaagtttgccgtatcaaaacttagccttgttaaagcatgcttttccagggagcttgttttaataagtcgcaaccgttttctctacattttcaggacatgccaagttgcttttgttgggataatcacctgcacaatctttctccgcacaagattgcaccctgtcgatgagcaaaatggcgatctttatctctcttgtctgttctatgggcttgtacatatgatgttcaatggttttacagaattgcccattactatttcacggcttccagtgttttataagcagagagacaatttctttcatcctgcatgggctttctcaatccccaactggatattaagaattccatattctcttattgaggctctagtgtggtcatgtgttgtttactacacagtaggctttgaaccaactgctgataggttctttcgctttatgctattgttgttctctctccatcaaatggctttgggccttttccggatgatgggggctatagcaagagacatgactattgctaatacttttggatcggctgccttattggcaatttttcttttaggagggttcattgtccctaaagaggctataaaaccatggtggcagtgggcttattggctttctcccttgatgtatggacaacgtgctatttcagttaacgaattctcagcatccagatggtcaaaggtatttggcgttggcaacagtcccgttggatccaatgttcttattttacacaatctccctacacaagattactggtactggattggagtttgtgctttattagcttatgctatcttgttcaatgccttgtttactcttgctttgacattccttaaccctctacggaaggcccaagcaattgttccatccaattttgaagaaacaaatgatgcattgactgatagtatatcagatggacatgcaattgcagaaaataatagcagaaattgtgaagtcaaagggcagactgaaggcgaactcaacaagggaatgatattaccatttcaacctctaacaatgacatttcacaatattaactattttgttgatatgccaaaggaaatgaaatcaagagagaaaagactacagttgctatctgaagtaagtggagtatttaggccacgtgtcttaacagcactggttggctcaagtggtgctggaaagacgacccttcttgacgttttagctggtagaaaaacaggtggatatattgaaggtgatatcaagatttctggccataagaaagaacaaagaacctttgccaggatagctggatatgttgagcaaaatgatatacactcgccacaagaatttgttgaggaagttatggctttggtagagcttgatcagctgagacatgcattagtagggaaggagggttctactggattatcaacagagcaaagaaagcgcctcacaatagctgttgaactagttgcaaatccttcaattatttttttggatgaacctacttctggtttggatgctcgagcagctgccattgtgatgcggactattagaaatactgttgatactggaagaactgttgtttgcactatacaccagcccagcattgacatatttgaagcttttgatgagctcctccttctgaaacgtgggggacgcgttatatatggtggttctctgggtgtcaattcaatcgatatgattgattactttcagtccattcctggtgttaatcatatttctgaaggctacaatccagcaacctggatgcttgaaatcaccacacaagcatgtgaagagattcttggtttagattttgcagtggtgtacaaaaactccgaccagttcagggaagtcgaacagttaattaaagaatcgagtattccagctattggcacggaacctttaaaattctcatcagagttttcacagaactttcttactcagttcaaagcttgctggcgtaagcaaagacttgtttactggagaagtccagagtacaatgttgtgcggttatttttcacggcaattgcagctatcatattcggatcgatattttggaatgttgggatgaaacgagacacaacagaagatttgatgcttgtcatgggatctctttacgcggcatgcctgtttcttggtgtaaataacgcctcatccgtgcagcctgtagtatcaactgagaggactgtctactaccgggaacgtgctgctaaaatgtactcatcgttcccatatgctgcagcacagggtcttgtagagattccttacattgcagttcagacactgatatttggcctcatcacgtacttcatgatcaactacgagaggaacataggaaagctgcttctgtatcttcttttcatgttccttactttcacctacttcacgttctacgggatggtggcggtaggcttgaccccaacacaacaagttgcagcagtagtgtcatctgctttttactccttgtggaatcttctctccgggttcctcatcccccagtctaggatccctggctggtggatctggttctattacatctgtccagtggcctggaccctgcgaggcatcattacatctcagctgggcgatgtgcaggccaggatagtcggccctggtttcgatgggaccgtgcaggagttccttgaggaaagcctggggttccaacaggggatggctggtgtcacggttgcggtgctcattggcttctcccttttcttcttcgccgtctacgcgacttctatcaaggttctgaatttccagagaagatgaccagctgcctgagctaagtaagcctccgtggtttgcttttgctactgtgtggtgccaacatcaaagtctacttgctagctactcggcggatgccggatggatgaagcacccgttggtcgtaggattgaagttttcacacgtagagaggatggtagataattaaaggttcatgtctgtatatgattactatcgcaaatataatgagaaacagtagtgatgcatttgtgctatacgtaagatatacagaagagtatgcctcatctgttgccttgacaatagccaaccatgtgactatttatctggtttttctatatatatatcaacagagaagtaaaatgtcttct

SEQ ID NO: 218640 - DNA, 3540 bp, Zea Mays
agtattaagagattcagataaaacaaaaagaatacaccgcggagtagcagtacaaatttacggagagatagagagagggctttgacagtttcacaggaggtagcagtggtctcgaatggcttggttgcattgcacggcggagaggatcacgcacgctgtagttaccagtggttgcttggacatgggcggggtccactcgcttttcccgccgccgccaccaccgccattttgacccacgtatatctaccatccatggctgccagccatgggaggatgctcgccaccgcaccgcccgtgccacaggaaccaaaagctacagacctctcgtcaatccatgctgagcagcagtggcgctgtggaagaggcggagcggaggggaggggaggggagccgagcttggcgtggactgtagtgactgctgagcttgcttgtgtagaagaggtgggaaagagggaagagtcagagagggagacagaggtggcttggttcatctgtaacagtcgccatctctgcctgctttccagctcctttgcttgctttccctgcccatctcttttgttctggcctgccctctccatcccgtccaactccctatccttcctccttttgctttcccacatctttgctccaataatgatggcgtggtggtgggtttggtcgtgaacctgccgctgtggctgtgctgcatcccccaccctcgccgctccctcgtccaaatccaccagccgttcgctttcctctcctctcctctccatcatcccggccggctcgccagtcgccaccctccctttcctcttttcagctacagttgagcttgggcagtagtaggttggttctgcttcccttcccctcccccgatcccttttccttgctggggatcgggaggccttcaggcttcaacccatcttcctccctgtccacatctcgctccttgtttggggtagtgccggctggtggtgccgctactgctagccgggaacccaatttcttgataggactggacgactggtgcgtgccaaccacgagtttttcctgttcgctttgctttctcggctcagctactgctgctctgctaggaacaccaacagtagtgtgttcttgcgccggcttttcttgccgtgtttcgggtcgatattattgggagggtgggtctcccgtcccgtttcgatgaggccggaggagagagatgctgccgtggggagagtcagggaccagttccccgtcggcatgagggtcctcgccgtggacgacgaccccgtgtgcctcaaggtgcttgagaacctcctgcgccgctgccagtatcatgtgacaacgacgaatcaggctgttgtcgccttgagtatgctgaggcaaaacagggacctgtttgatcttgttattagtgatgttcacatgccagacatggatggctttaagcttctagagcttgtggggcttgaaatggacctccctgtcattatgttatcggtgaatggagagacaaaaactgtaatgaaggggataactcatggtgcctgtgactatctcttaaaaccggttcggctggaagagcttaggaatatctggcagcatgttgttaggaggaaattcagtaactgtgatcgtgctaacaatgatggctatgaggagtgcaataggccatcaaatgcagattttgatcttgctcacagccaaattacagctgggccacctgaccaaagtgggaggcccagcaaaaagaggaaggaatatcatagtgaagaggaagatgaaggagaagagagtaatggccaagataacgatgatccttcagctccaaagaaaccaagggttgtttggtcagttgaactgcaccgaaaatttgttgctgctgtcaatcagctaggaattgacaaagccgtgccaaaaaggatacttgagctcatgaatgttgagagactcaccagggaaaatgttgcaagtcacctgcagaagtatagactctaccttaaacggctaagtgctgtggcatcacaacaggctagcattgttgctgctttgggaggcaacgacccctttatgcggatgagtgcatttgaaggactccatggttatcaatcttttgtctcttcagcagctctgccatctttcagtccacagggactgttaaatagaaataatccagcatcatttgcgattcaaggggtgtctgcttccaggccaattcagattgcaaccggcaataccacaatgagtcattccattggcgatccaaatgataaatatcaccttagcttaccaggcactagttgcctacaaggaaatctagcacaaggtttgccaactccagttgggcaggtccagctgccacagaagtggatacacgaagaaaccgacgatctatctactatcctttctgcgagtggccgggctaatagtggtgttcctggcacactccaaagtgtcacgaacagtcacttgctgcagcaaggctttgttgaacgtagacaagacaaagttgttatccagccatcttcatctgcaagttcagatcgtcctgaaggcactgttggagtttcctccagtctgatggattcctgtgcaacccagcagagggttgttccattgtctgccttctctagcagtgcatctccaatgaatggctcgttttgcagcaacggtgtagctgagttgggtgctacatcctctggaggtacaagtattttcccctccaatgacctgaggatagaaagagacagcaaagtgggagctagctcttttggtagtgtgatacttctgtctccagacactgtgccaaaccaaaaatacttgaacttcggcggtggaagcgatttgagatcgaacatggagggagggaacgcaggcaatctgttgaatcccaagctactatggagttgtttgccggcctctcagccgcctaatcttatcggaagtcatcatcccatgagccaaagactgaaccttggcggctcaatggtcagacagacaacagcaagtgcttcggcagctgccccacagacgaggatcgacatgtttatctctggagacgctccgaagagcgcgtcggatttgagcttccctaaggtccacagcgagcttagctctagcagctgcagcttcgacggcctcctcaactccataatcaaagtggacgatgcttccttcagcgatgacctgggatgcgacttgtactccctgggtgcctgtatatgatcgctaccttccacgtatctgcatctgcatctgtgttaatctcccattgtatgctgtgcagctagtgttaatcttaggtagaattgtagctgtgcgcctatctttgcttgcccacagccaagaaaaaaaaattatgtctgcacgtgatgtgctagcagtaagatatctggattgtggaagtcaatgcccatttgctaaatcgagctggagacactgttggcacgagttgattctaaaagcggccttgatgatctaggcccaatttgaatgtcgacacactggtaatgacacgtggtgttcatgtaaacaaatccaaaagttcaaaacaaattgggagatttgaagtcg

SEQ ID NO: 218641 - DNA, 3055 bp, Zea Mays
agtattaagagattcagataaaacaaaaagaatacaccgcggagtagcagtacaaatttacggagagatagagagagggctttgacagtttcacaggaggtagcagtggtctcgaatggcttggttgcattgcacggcggagaggatcacgcacgctgtagttaccagtggttgcttggacatgggcggggtccactcgcttttcccgccgccgccaccaccgccattttgacccacgtatatctaccatccatggctgccagccatgggaggatgctcgccaccgcaccgcccgtgccacaggaaccaaaagctacagacctctcgtcaatccatgctgagcagcagtggcgctgtggaagaggcggagcggaggggaggggaggggagccgagcttggcgtggactgtagtgactgctgagcttgcttgtgtagaagaggtgggaaagagggaagagtcagagagggagacagaggtggcttggttcatctgtaacagtcgccatctctgcctgctttccagctcctttgcttgctttccctgcccatctcttttgttctggcctgccctctccatcccgtccaactccctatccttcctccttttgctttcccacatctttgctccaataatgatggcgtggtggtgggtttggtcgtgaacctgccgctgtggctgtgctgcatcccccaccctcgccgctccctcgtccaaatccaccagccgttcgctttcctctcctctcctctccatcatcccggccggctcgccagtcgccaccctccctttcctcttttcagctacagttgagcttgggcagtagtaggttggttctgcttcccttcccctcccccgatcccttttccttgctggggatcgggaggccttcaggcttcaacccatcttcctccctgtccacatctcgctccttgtttggggtagtgccggctggtggtgccgctactgctagccgggaacccaatttcttgataggactggacgactggtgcgtgccaaccacgagtttttcctgttcgctttgctttctcggctcagctactgctgctctgctaggaacaccaacagtagtgtgttcttgcgccggcttttcttgccgtgtttcgggtcgatattattgggagggtgggtctcccgtcccgtttcgatgaggccggaggagagagatgctgccgtggggagagtcagggaccagttccccgtcggcatgagggtcctcgccgtggacgacgaccccgtgtgcctcaaggtgcttgagaacctcctgcgccgctgccagtatcatgtgacaacgacgaatcaggctgttgtcgccttgagtatgctgaggcaaaacagggacctgtttgatcttgttattagtgatgttcacatgccagacatggatggctttaagcttctagagcttgtggggcttgaaatggacctccctgtcattaaagtatagactctaccttaaacggctaagtgctgtggcatcacaacaggctagcattgttgctgctttgggaggcaacgacccctttatgcggatgagtgcatttgaaggactccatggttatcaatcttttgtctcttcagcagctctgccatctttcagtccacagggactgttaaatagaaataatccagcatcatttgcgattcaaggggtgtctgcttccaggccaattcagattgcaaccggcaataccacaatgagtcattccattggcgatccaaatgataaatatcaccttagcttaccaggcactagttgcctacaaggaaatctagcacaaggtttgccaactccagttgggcaggtccagctgccacagaagtggatacacgaagaaaccgacgatctatctactatcctttctgcgagtggccgggctaatagtggtgttcctggcacactccaaagtgtcacgaacagtcacttgctgcagcaaggctttgttgaacgtagacaagacaaagttgttatccagccatcttcatctgcaagttcagatcgtcctgaaggcactgttggagtttcctccagtctgatggattcctgtgcaacccagcagagggttgttccattgtctgccttctctagcagtgcatctccaatgaatggctcgttttgcagcaacggtgtagctgagttgggtgctacatcctctggaggtacaagtattttcccctccaatgacctgaggatagaaagagacagcaaagtgggagctagctcttttggtagtgtgatacttctgtctccagacactgtgccaaaccaaaaatacttgaacttcggcggtggaagcgatttgagatcgaacatggagggagggaacgcaggcaatctgttgaatcccaagctactatggagttgtttgccggcctctcagccgcctaatcttatcggaagtcatcatcccatgagccaaagactgaaccttggcggctcaatggtcagacagacaacagcaagtgcttcggcagctgccccacagacgaggatcgacatgtttatctctggagacgctccgaagagcgcgtcggatttgagcttccctaaggtccacagcgagcttagctctagcagctgcagcttcgacggcctcctcaactccataatcaaagtggagaaggacgatgcttccttcagcgatgacctgggatgcgacttgtactccctgggtgcctgtatatgatcgctaccttccacgtatctgcatctgcatctgtgttaatctcccattgtatgctgtgcagctagtgttaatcttaggtagaattgtagctgtgcgcctatctttgcttgcccacagccaagaaaaaaaaattatgtctgcacgtgatgtgctagcagtaagatatctggattgtggaagtcaatgcccatttgctaaatcgagctggagacactgttggcacgagttgattctaaaagcggccttgatgatctaggcccaatttgaatgtcgacacactggtaatgacacgtggtgttcatgtaaacaaatccaaaagttcaaaacaaattgggagatttgaagtcg

SEQ ID NO: 218642 - DNA, 2006 bp, Zea Mays
cttctgtcaactggcaccggcacctcgtttaattattccaatttcttgccgtgtttaatgattttccgagcagcagctggcatagttatattgttattgccactagctactactgcgcctcctttagaattattgattgattgattgctggtgcactagctgccgaaagcaaaagagagagataaaaggaaaggaaaagaaaaagaaaaagataatgataacaagcgtcctgggaaggagcaggctccactccattccactccatcatgctgctggcggagggctacccgcagcggaccatcttcgacaacctccacgacgccggcctctccttcggcgtctacttccaggacgtgccggcggtgctcttctaccggaacctccgcaagctcaagtaccttctggacttccacccgctgcgcccctccttcgccgaccacgcccgccgcgggacgctccccaactacgccgtcatcgagcagcactacctggactccaagctggacccggccaacgacgaccacccgtcgcacgacgtgtaccagggccagatgctcgtcaagtacgtctacgagacgctgcgcgccagcccgcagtggaaccagacgctgctcgtcatcacctacgacgagcacggcggcttcttcgaccacgtgcccacgcccgtcgccggcgtgcccagccccgacggcatcgtcggcccgccgccctacaacttcaccttcgaccgcctcggcgtccgcgtcccggccatcctcgtgtccccctggatcgacaggggcaccgtcgtccacgggccccacggccccacgcccacgtcgcagtacgagcactcgtccatcccggccaccgtcaagaagatcttcggcctgccgcaggacttcctcacgaggcgggacgcgtgggcggggaccttcgagggcgtggtgcaggggaggaccgagccacgcaccgactgccccgagcagctgcccacgccgacgaggatcaggcagacggaggcggacgaggaggccaagcttagcgagttccagcaggagatcatccagctcgcctccgtgctcaacggcgactaccacctcgccaccctgcaggaccggatcaagaacgacatgaacgtcagggaaggcatcgactacatgaaggccgccgtcaaacgctactttcaggctggcgcgttcgccagaaggatgggcgtcgacggcgaccagatcgtcaagatgagaccctccctcaccaccaggatccaacgcccatagacagactgtctaatcaaagcggaatcggttatgttcacaaacaggattggactatatatatatatatatatatatatatatatatatatatatatatatatatatatatatatatatatatatattctaaaaatacagatcacagtcagtgctatagatatagatgtccaataagcacgggacccgcgagctcgatacgaagccagttgtttgggtccgatccaatcccggcacgatccggttctatacgggctctgtgggggatagatatcccctgggtccactaaaagagtaaaagacctcacgagaggcccaagggcccaataaatcgtaaagtcattctttcgtgagtctggggagagacaaccagcaaagcagatcgacacgaggccagattggtggaaactcggacgacccacaacgtcgagcgagtgaccacaacagagatccgactttcccgcgctggagcccccatgcaacggagccatgcgaggataagtcggcagaactacaaggagataaactcaagcagttcactatattttagctacacgttgttatcatatccacatgtattgccccacggtcgagtatataaggcctagggggcaccccttcagaacgatcgactctattacttagccacccacaccaactctctgtattctcaatccagagagctttcttgtaactgcgttcaccaagcatactcaccaggacgtagggtgttacgcatctctaagcggc

SEQ ID NO: 218643 - DNA, 1286 bp, Zea Mays
gcagcatttacccctcttaggaaagtgttgcctgcaatattgtctcgactcatattgcataacaattggagcagtgaaagcctcatatcatttttggactgtccagattggtttggcgctgaagaagctatttgaagagggtgtagtgaagcgagaagatctgtttatcacctctaagctatggaatgatcatcatgctcctgaagatgtgcctgaggcactaaatgacagcctgaatgatttgcagcttgagtacctggatctttatcttatccattggccatttagagtcaagaagggaacaaataccagccctgaaaattttgttacacctgacttccctgctacttggggggcaatggaaaagttatatgatgctggcaaagctcgcgctattggtgtgagtaacttctcctcaaagaaattgggtgacttgcttgctgtagctcgtgtacctccagctgttgatcaggtggaatgtcatcctggttggcagcaaactaagctccatagcttttgtcagtcaactgcttactcaccactaggttcacctggtacaacttggatgaatggtaatgtccttaaagaaccaataatcatctcaatagctgagaaactcgggaaaacttctgcacaagtggctctgcgctggaacattcagatgggtcacagtgttcttccaaagagcacgaatgaagaaaggataaagcaaaaccttgatgtttatgattggtcaattccagatgacttgcttgcaaagttctctgagattaagcaggctaggctacttagaggcaacttcattgttaatccagagagcgtttacaagacccatgaggagctctgggatggtgaactttaagaaggacgccgttgtccctcctgactcctgagcagggagcaagcagcgttccattagggctcgtcagatcatttcacctccaaagttgctcttttgaaatgaaggttcagtgctcggaagctctggtgccatcctgtatcacgaactattgagaaatttgtcggtgattttactttgtgctacgggatgtgctgctgcagtctgtcctagtgtcagttgatttttctggtaaaactgtgaccaaataagttaattcgccaggcatcattactattggaatttcatcgttttatctcctcactatttttttatgctccatgtattctctatgatgagaccctgttgagtagttcactcatatagtcacacaaaacactgttttacattatccacagagtaagctgctgaacgtgctaagtgctaa

SEQ ID NO: 218644 - DNA, 2324 bp, Zea Mays
aacaaaaccgcctagattggattcgtccccaattctctgcctccgccgccaggacgacggcaaatccgcccacgcaaaatatcagcccaagtgcccatcgcccaagcttcctagctcacccgccgccacccactagccaaattccccatccctctcctgccgccacccatcagccacatctctccctcctactccctctccggcagccatcatcagacaagatccctcccccaccatcgagccatgtcgagtcgagtgcatcttctgcaagcacggccatcttacgaaaccctagctggctcgaaggaccactactgtccggcgccctgaacaacttggcatgatgccgacgaagggtggagcaaacaaatcacaatgacatcgggtagtagatccaccattgcatccctatgaagaggagcgccttagacaatgtatgaggaacaattcgaggttgcaacaacttggaattcctgctttagtcagcatgtgtgggaacataaattccatctctaggaacaaaaagccaaataacagggataatgaagattctgaatctgagtatgatccttcacatgacgattctattgaaggggatttgtttgaccatgatgatcataataagggctcaaaggacactaacagaagaactattcacatggctcctggtggaatcaagcctcgaactaagagagtttatgcagagcaacatactactagaaatacaaggtcaaagaaaagcattgctcagcctgacacaagtctaacacgaagtgacatctatgtgccaccaccctcgctatctcatttgacccaagttggagaagttgctcgtagcattgaaaaccatagaaagactagtgttgaagctaatggccctacccaggttgacaacacccacatggccaatcgagatggctttgaccaatttgatgacaacatgaccaaccaaggggaaggcattacccagcctggtggaaaaggagtaaatcagcatagagaaaggggacttaatatgggacttggtctccaaaggatgaaccgagctcggcgtggcaaactgccaattgtcattactgaaggaaggataaggcctgtggcaccaattgttgctgcaaagtttgcaactgagtgcaacattgcagttcggaatcatgtgcttgtgcttaagtcatggaaggaatacgagaagcatcctgggctctttaaattgtttacagcaaaacttagtgcaaagtttgatatcaatacagaagatgcgctagttaaaaatgcttgtttccaaatgatgaggaatgcactgcgccaacaacgatataagctgaagaaacaatattttgacccttttccgctacatctagtgaggaaaacatctcctatcaaatcgacaagtgatgaacaatggaatgaccttgtggaacattggaaaggtccaaaaaatatggcgacatgtgaacataacaaaggcaaccgaggcaaagttaagttccatcaaacaactggatctcgtagctatatggttcatgtagaaaatttgggggacaagtacatggatcaagaacctgatgcattggatctgttcaaggagtgccactacagtaagaaaaaactcaaatggaagacaagcgatctacaccaggagaaggtgaacaaccaatgtctacgactcaggttgtagctgatgtgcttgctgagaacacaaagaagaatcggtttcttcaaaatgtgggaatccaaaatgcacgacctagatctagtgtacaaaatattgaagcacaacttgaagtagagaggaaggcaaatgcagagcttcaatcacttgtcagcatccaacgtgagcgcatggatgtattattaaagcaagtgcatgaagcagaactggtaaggattagagagcaagaagagatgaagaagaagcaagatgccatggatgctcaacttgagcttatgctaagtcagattcaaccaagttaaagctaactagtatggggtgttaggctttgttggtacttctcttttgctgatgctattgcattctattgatggataaatacgtttcaatccattttttgtctattgtgctgctagagtagctttagcggcatgtgtggtgtgttggagtggcttacgtgtcagtggttggatacttgctgtaatgacatgctattggatacttgcatgtaatgacatgctggagtgtggtcagtattttttgtgatgagatgctggattaaaatctgagttgtgatgtaatagaattcaacattttgtcattatgttctggattataattaatatatatttaaattattgtgtttgcaaaa

SEQ ID NO: 218645 - DNA, 2357 bp, Zea Mays
aaaccgcctagattggattcgtccccaattctctgcctccgccgccaggacgacggcaaatccgcccacgcaaaatatcagcccaagtgcccatcgcccaagcttcctagctcacccgccgccacccactagccaaattccccatccctctcctgccgccacccatcagccacatctctccctcctactccctctccggcagccatcatcagacaagatccctcccccaccatcgagccatgtcgagtcgagtgcatcttctgcaagcacggccatcttacgaaaccctagctggctcgaaggaccactactgtccggcgccctgaacaacttggcatgatgccgacgaagggtggagcaaacaaatcacaatgacatcgggtagtagatccaccattgcatccctatgaagaggagcgccttagacaatgtatgaggaacaattcgaggttgcaacaacttggaattcctgctttagtcagcatgtgtgggaacataaattccatctctaggaacaaaaagccaaataacagggataatgaagattctgaatctgagtatgatccttcacatgacgattctattgaaggggatttgtttgaccatgatgatcataataagaagggctcaaaggacactaacagaagaactattcacatggctcctggtggaatcaagcctcgaactaagagagtttatgcagagcaacatactactagaaatacaaggtcaaagaaaagcattgctcagcctgacacaagtctaacacgaagtgacatctatgtgccaccaccctcgctatctcatttgacccaagttggagaagttgctcgtagcattgaaaaccatagaaagactagtgttgaagctaatggccctacccaggttgacaacacccacatggccaatcgagatggctttgaccaatttgatgacaacatgaccaaccaaggggaaggcattacccagcctggtggaaaaggagtaaatcagcatagagaaaggggacttaatatgggacttggtctccaaaggatgaaccgagctcggcgtggcaaactgccaattgtcattactgaaggaaggataaggcctgtggcaccaattgttgctgcaaagtttgcaactgagtgcaacattgcagttcggaatcatgtgcttgtgcttaagtcatggaaggaatacgagaagcatcctgggctctttaaattgtttacagcaaaacttagtgcaaagtttgatatcaatacagaagatgcgctagttaaaaatgcttgtttccaaatgatgaggaatgcactgcgccaacaacgatataagctgaagaaacaatattttgacccttttccgctacatctagtgaggaaaacatctcctatcaaatcgacaagtgatgaacaatggaatgaccttgtggaacattggaaaggtccaaaaaatatggcgacatgtgaacataacaaaggcaaccgaggcaaagttaagttccatcaaacaactggatctcgtagctatatggttcatgtagaaaatttgggggacaagtacatggatcaagaacctgatgcattggatctgttcaaggagtgccactacagtaagaaaaagcaaggctacacttccactgtacaactggctattactcaaatggaagacaagcgatctacaccaggagaaggtgaacaaccaatgtctacgactcaggttgtagctgatgtgcttgctgagaacacaaagaagaatcggtttcttcaaaatgtgggaatccaaaatgcacgacctagatctagtgtacaaaatattgaagcacaacttgaagtagagaggaaggcaaatgcagagcttcaatcacttgtcagcatccaacgtgagcgcatggatgtattattaaagcaagtgcatgaagcagaactggtaaggattagagagcaagaagagatgaagaagaagcaagatgccatggatgctcaacttgagcttatgctaagtcagattcaaccaagttaaagctaactagtatggggtgttaggctttgttggtacttctcttttgctgatgctattgcattctattgatggataaatacgtttcaatccattttttgtctattgtgctgctagagtagctttagcggcatgtgtggtgtgttggagtggcttacgtgtcagtggttggatacttgctgtaatgacatgctattggatacttgcatgtaatgacatgctggagtgtggtcagtattttttgtgatgagatgctggattaaaatctgagttgtgatgtaatagaattcaacattttgtcattatgttctggattataattaatatatatttaaattattgtgtttgcaaaa

SEQ ID NO: 218646 - DNA, 2356 bp, Zea Mays
ctagattggattcgtccccaattctctgcctccgccgccaggacgacggcaaatccgcccacgcaaaatatcagcccaagtgcccatcgcccaagcttcctagctcacccgccgccacccactagccaaattccccatccctctcctgccgccacccatcagccacatctctccctcctactccctctccggcagccatcatcagacaagatccctcccccaccatcgagccatgtcgagtcgagtgcatcttctgcaagcacggccatcttacgaaaccctagctggctcgaaggaccactactgtccggcgccctgaacaacttggcatgatgccgacgaagggtggagcaaacaaatcacaatgacatcgggtagtagatccaccattgcatccctatgaagaggagcgccttagacaatgtatgaggaacaattcgaggttgcaacaacttggaattcctgctttagtcagcatgtgtgggaacataaattccatctctaggaacaaaaagccaaataacagggataatgaagattctgaatctgagtatgatccttcacatgacgattctattgaaggggatttgtttgaccatgatgatcataataagaagggctcaaaggacactaacagaagaactattcacatggctcctggtggaatcaagcctcgaactaagagagtttatgcagagcaacatactactagaaatacaaggtcaaagaaaagcattgctcagcctgacacaagtctaacacgaagtgacatctatgtgccaccaccctcgctatctcatttgacccaagttggagaagttgctcgtagcattgaaaaccatagaaagactagtgttgaagctaatggccctacccaggttgacaacacccacatggccaatcgagaagatggctttgaccaatttgatgacaacatgaccaaccaaggggaaggcattacccagcctggtggaaaaggtgatgtaaatcagcatagagaaaggggacttaatatgggacttggtctccaaaggatgaaccgagctcggcgtggcaaactgccaattgtcattactgaaggaaggataaggcctgtggcaccaattgttgctgcaaagtttgcaactgagtgcaacattgcagttcggaatcatgtgcttgtgcttaagtcatggaaggaatacgagaagcatcctgggctctttaaattgtttacagcaaaacttagtgcaaagtttgatatcaatacagaagatgcgctagttaaaaatgcttgtttccaaatgatgaggaatgcactgcgccaacaacgatataagctgaagaaacaatattttgacccttttccgctacatctagtgaggaaaacatctcctatcaaatcgacaagtgatgaacaatggaatgaccttgtggaacattggaaaggtccaaaaaatatggcgacatgtgaacataacaaaggcaaccgaggcaaagttaagttccatcaaacaactggatctcgtagctatatggttcatgtagaaaatttgggggacaagtacatggatcaagaacctgatgcattggatctgttcaaggagtgccactacagtaagaaaaagcaaggctacacttccactgtacaactggctattactcaaatggaagacaagcgatctacaccaggagaaggtgaacaaccaatgtctacgactcaggttgtagctgatgtgcttgctgagaacacaaagaagaatcggtttcttcaaaatgtgggaatccaaaatgcacgacctagatctagtgtacaaaatattgaagcacaacttgaagtagagaggaaggcaaatgcagagcttcaatcacttgtcagcatccaacgtgagcgcatggatgtattattaaagcaagtgcatgaagcagaactggtaaggattagagagcaagaagagatgaagaagaagcaagatgccatggatgctcaacttgagcttatgctaagtcagattcaaccaagttaaagctaactagtatggggtgttaggctttgttggtacttctcttttgctgatgctattgcattctattgatggataaatacgtttcaatccattttttgtctattgtgctgctagagtagctttagcggcatgtgtggtgtgttggagtggcttacgtgtcagtggttggatacttgctgtaatgacatgctattggatacttgcatgtaatgacatgctggagtgtggtcagtattttttgtgatgagatgctggattaaaatctgagttgtgatgtaatagaattcaacattttgtcattatgttctggattataattaatatatatttaaattattgtgtttgcaaaa

SEQ ID NO: 218647 - DNA, 2341 bp, Zea Mays
ccccaattctctgcctccgccgccaggacgacggcaaatccgcccacgcaaaatatcagcccaagtgcccatcgcccaagcttcctagctcacccgccgccacccactagccaaattccccatccctctcctgccgccacccatcagccacatctctccctcctactccctctccggcagccatcatcagacaagatccctcccccaccatcgagccatgtcgagtcgagtgcatcttctgcaagcacggccatcttacgaaaccctagctggctcgaaggaccactactgtccggcgccctgaacaacttggcatgatgccgacgaagggtggagcaaacaaatcacaatgacatcgggtagtagatccaccattgcatccctatgaagaggagcgccttagacaatgtatgaggaacaattcgaggttgcaacaacttggaattcctgctttagtcagcatgtgtgggaacataaattccatctctaggaacaaaaagccaaataacagggataatgaagattctgaatctgagtatgatccttcacatgacgattctattgaaggggatttgtttgaccatgatgatcataataagggctcaaaggacactaacagaagaactattcacatggctcctggtggaatcaagcctcgaactaagagagtttatgcagagcaacatactactagaaatacaaggtcaaagaaaagcattgctcagcctgacacaagtctaacacgaagtgacatctatgtgccaccaccctcgctatctcatttgacccaagttggagaagttgctcgtagcattgaaaaccatagaaagactagtgttgaagctaatggccctacccaggttgacaacacccacatggccaatcgagaagatggctttgaccaatttgatgacaacatgaccaaccaaggggaaggcattacccagcctggtggaaaaggtgatggagtaaatcagcatagagaaaggggacttaatatgggacttggtctccaaaggatgaaccgagctcggcgtggcaaactgccaattgtcattactgaaggaaggataaggcctgtggcaccaattgttgctgcaaagtttgcaactgagtgcaacattgcagttcggaatcatgtgcttgtgcttaagtcatggaaggaatacgagaagcatcctgggctctttaaattgtttacagcaaaacttagtgcaaagtttgatatcaatacagaagatgcgctagttaaaaatgcttgtttccaaatgatgaggaatgcactgcgccaacaacgatataagctgaagaaacaatattttgacccttttccgctacatctagtgaggaaaacatctcctatcaaatcgacaagtgatgaacaatggaatgaccttgtggaacattggaaaggtccaaaaaatatggcgacatgtgaacataacaaaggcaaccgaggcaaagttaagttccatcaaacaactggatctcgtagctatatggttcatgtagaaaatttgggggacaagtacatggatcaagaacctgatgcattggatctgttcaaggagtgccactacagtaagaaaaagcaaggctacacttccactgtacaactggctattactcaaatggaagacaagcgatctacaccaggagaaggtgaacaaccaatgtctacgactcaggttgtagctgatgtgcttgctgagaacacaaagaagaatcggtttcttcaaaatgtgggaatccaaaatgcacgacctagatctagtgtacaaaatattgaagcacaacttgaagtagagaggaaggcaaatgcagagcttcaatcacttgtcagcatccaacgtgagcgcatggatgtattattaaagcaagtgcatgaagcagaactggtaaggattagagagcaagaagagatgaagaagaagcaagatgccatggatgctcaacttgagcttatgctaagtcagattcaaccaagttaaagctaactagtatggggtgttaggctttgttggtacttctcttttgctgatgctattgcattctattgatggataaatacgtttcaatccattttttgtctattgtgctgctagagtagctttagcggcatgtgtggtgtgttggagtggcttacgtgtcagtggttggatacttgctgtaatgacatgctattggatacttgcatgtaatgacatgctggagtgtggtcagtattttttgtgatgagatgctggattaaaatctgagttgtgatgtaatagaattcaacattttgtcattatgttctggattataattaatatatatttaaattattgtgtttgcaaaa

SEQ ID NO: 218648 - DNA, 2181 bp, Zea Mays
cgccgccaggacgacggcaaatccgcccacgcaaaatatcagcccaagtgcccatcgcccaagcttcctagctcacccgccgccacccactagccaaattccccatccctctcctgccgccacccatcagccacatctctccctcctactccctctccggcagccatcatcagacaagatccctcccccaccatcgagccatgtcgagtcgagtgcatcttctgcaagcacggccatcttacgaaaccctagctggctcgaaggaccactactgtccggcgccctgaacaacttggcatgatgccgacgaagggtggagcaaacaaatcacaatgacatcgggtagtagatccaccattgcatccctatgaagaggagcgccttagacaatgtatgaggaacaattcgaggttgcaacaacttggaattcctgctttagtcagcatgtgtgggaacataaattccatctctaggaacaaaaagccaaataacagggataatgaagattctgaatctgagtatgatccttcacatgacgattctattgaaggggatttgtttgaccatgatgatcataataagggctcaaaggacactaacagaagaactattcacatggctcctggtggaatcaagcctcgaactaagagagtttatgcagagcaacatactactagaaatacaagctaatggccctacccaggttgacaacacccacatggccaatcgagatggctttgaccaatttgatgacaacatgaccaaccaaggggaaggcattacccagcctggtggaaaaggtgatggagtaaatcagcatagagaaaggggacttaatatgggacttggtctccaaaggatgaaccgagctcggcgtggcaaactgccaattgtcattactgaaggaaggataaggcctgtggcaccaattgttgctgcaaagtttgcaactgagtgcaacattgcagttcggaatcatgtgcttgtgcttaagtcatggaaggaatacgagaagcatcctgggctctttaaattgtttacagcaaaacttagtgcaaagtttgatatcaatacagaagatgcgctagttaaaaatgcttgtttccaaatgatgaggaatgcactgcgccaacaacgatataagctgaagaaacaatattttgacccttttccgctacatctagtgaggaaaacatctcctatcaaatcgacaagtgatgaacaatggaatgaccttgtggaacattggaaaggtccaaaaaatatggcgacatgtgaacataacaaaggcaaccgaggcaaagttaagttccatcaaacaactggatctcgtagctatatggttcatgtagaaaatttgggggacaagtacatggatcaagaacctgatgcattggatctgttcaaggagtgccactacagtaagaaaaagcaaggctacacttccactgtacaactggctattactcaaatggaagacaagcgatctacaccaggagaaggtgaacaaccaatgtctacgactcaggttgtagctgatgtgcttgctgagaacacaaagaagaatcggtttcttcaaaatgtgggaatccaaaatgcacgacctagatctagtgtacaaaatattgaagcacaacttgaagtagagaggaaggcaaatgcagagcttcaatcacttgtcagcatccaacgtgagcgcatggatgtattattaaagcaagtgcatgaagcagaactggtaaggattagagagcaagaagagatgaagaagaagcaagatgccatggatgctcaacttgagcttatgctaagtcagattcaaccaagttaaagctaactagtatggggtgttaggctttgttggtacttctcttttgctgatgctattgcattctattgatggataaatacgtttcaatccattttttgtctattgtgctgctagagtagctttagcggcatgtgtggtgtgttggagtggcttacgtgtcagtggttggatacttgctgtaatgacatgctattggatacttgcatgtaatgacatgctggagtgtggtcagtattttttgtgatgagatgctggattaaaatctgagttgtgatgtaatagaattcaacattttgtcattatgttctggattataattaatatatatttaaattattgtgtttgcaaaa

SEQ ID NO: 218649 - DNA, 2301 bp, Zea Mays
ccaggacgacggcaaatccgcccacgcaaaatatcagcccaagtgcccatcgcccaagcttcctagctcacccgccgccacccactagccaaattccccatccctctcctgccgccacccatcagccacatctctccctcctactccctctccggcagccatcatcagacaagatccctcccccaccatcgagccatgtcgagtcgagtgcatcttctgcaagcacggccatcttacgaaaccctagctggctcgaaggaccactactgtccggcgccctgaacaacttggcatgatgccgacgaagggtggagcaaacaaatcacaatgacatcgggtagtagatccaccattgcatccctatgaagaggagcgccttagacaatgtatgaggaacaattcgaggttgcaacaacttggaattcctgctttagtcagcatgtgtgggaacataaattccatctctaggaacaaaaagccaaataacagggataatgaagattctgaatctgagtatgatccttcacatgacgattctattgaaggggatttgtttgaccatgatgatcataataaggacactaacagaagaactattcacatggctcctggtggaatcaagcctcgaactaagagagtttatgcagagcaacatactactagaaatacaaggtcaaagaaaagcattgctcagcctgacacaagtctaacacgaagtgacatctatgtgccaccaccctcgctatctcatttgacccaagttggagaagttgctcgtagcattgaaaaccatagaaagactagtgttgaagctaatggccctacccaggttgacaacacccacatggccaatcgagatggctttgaccaatttgatgacaacatgaccaaccaaggggaaggcattacccagcctggtggaaaaggagtaaatcagcatagagaaaggggacttaatatgggacttggtctccaaaggatgaaccgagctcggcgtggcaaactgccaattgtcattactgaaggaaggataaggcctgtggcaccaattgttgctgcaaagtttgcaactgagtgcaacattgcagttcggaatcatgtgcttgtgcttaagtcatggaaggaatacgagaagcatcctgggctctttaaattgtttacagcaaaacttagtgcaaagtttgatatcaatacagaagatgcgctagttaaaaatgcttgtttccaaatgatgaggaatgcactgcgccaacaacgatataagctgaagaaacaatattttgacccttttccgctacatctagtgaggaaaacatctcctatcaaatcgacaagtgatgaacaatggaatgaccttgtggaacattggaaaggtccaaaaaatatggcgacatgtgaacataacaaaggcaaccgaggcaaagttaagttccatcaaacaactggatctcgtagctatatggttcatgtagaaaatttgggggacaagtacatggatcaagaacctgatgcattggatctgttcaaggagtgccactacagtaagaaaaagcaaggctacacttccactgtacaactggctattactcaaatggaagacaagcgatctacaccaggagaaggtgaacaaccaatgtctacgactcaggttgtagctgatgtgcttgctgagaacacaaagaagaatcggtttcttcaaaatgtgggaatccaaaatgcacgacctagatctagtgtacaaaatattgaagcacaacttgaagtagagaggaaggcaaatgcagagcttcaatcacttgtcagcatccaacgtgagcgcatggatgtattattaaagcaagtgcatgaagcagaactggtaaggattagagagcaagaagagatgaagaagaagcaagatgccatggatgctcaacttgagcttatgctaagtcagattcaaccaagttaaagctaactagtatggggtgttaggctttgttggtacttctcttttgctgatgctattgcattctattgatggataaatacgtttcaatccattttttgtctattgtgctgctagagtagctttagcggcatgtgtggtgtgttggagtggcttacgtgtcagtggttggatacttgctgtaatgacatgctattggatacttgcatgtaatgacatgctggagtgtggtcagtattttttgtgatgagatgctggattaaaatctgagttgtgatgtaatagaattcaacattttgtcattatgttctggattataattaatatatatttaaattattgtgtttgcaaaa

SEQ ID NO: 218650 - DNA, 2172 bp, Zea Mays
caggacgacggcaaatccgcccacgcaaaatatcagcccaagtgcccatcgcccaagcttcctagctcacccgccgccacccactagccaaattccccatccctctcctgccgccacccatcagccacatctctccctcctactccctctccggcagccatcatcagacaagatccctcccccaccatcgagccatgtcgagtcgagtgcatcttctgcaagcacggccatcttacgaaaccctagctggctcgaaggaccactactgtccggcgccctgaacaacttggcatgatgccgacgaagggtggagcaaacaaatcacaatgacatcgggtagtagatccaccattgcatccctatgaagaggagcgccttagacaatgtatgaggaacaattcgaggttgcaacaacttggaattcctgctttagtcagcatgtgtgggaacataaattccatctctaggaacaaaaagccaaataacagggataatgaagattctgaatctgagtatgatccttcacatgacgattctattgaaggggatttgtttgaccatgatgatcataataagaagggctcaaaggacactaacagaagaactattcacatggctcctggtggaatcaagcctcgaactaagagagtttatgcagagcaacatactactagaaatacaagctaatggccctacccaggttgacaacacccacatggccaatcgagatggctttgaccaatttgatgacaacatgaccaaccaaggggaaggcattacccagcctggtggaaaaggagtaaatcagcatagagaaaggggacttaatatgggacttggtctccaaaggatgaaccgagctcggcgtggcaaactgccaattgtcattactgaaggaaggataaggcctgtggcaccaattgttgctgcaaagtttgcaactgagtgcaacattgcagttcggaatcatgtgcttgtgcttaagtcatggaaggaatacgagaagcatcctgggctctttaaattgtttacagcaaaacttagtgcaaagtttgatatcaatacagaagatgcgctagttaaaaatgcttgtttccaaatgatgaggaatgcactgcgccaacaacgatataagctgaagaaacaatattttgacccttttccgctacatctagtgaggaaaacatctcctatcaaatcgacaagtgatgaacaatggaatgaccttgtggaacattggaaaggtccaaaaaatatggcgacatgtgaacataacaaaggcaaccgaggcaaagttaagttccatcaaacaactggatctcgtagctatatggttcatgtagaaaatttgggggacaagtacatggatcaagaacctgatgcattggatctgttcaaggagtgccactacagtaagaaaaagcaaggctacacttccactgtacaactggctattactcaaatggaagacaagcgatctacaccaggagaaggtgaacaaccaatgtctacgactcaggttgtagctgatgtgcttgctgagaacacaaagaagaatcggtttcttcaaaatgtgggaatccaaaatgcacgacctagatctagtgtacaaaatattgaagcacaacttgaagtagagaggaaggcaaatgcagagcttcaatcacttgtcagcatccaacgtgagcgcatggatgtattattaaagcaagtgcatgaagcagaactggtaaggattagagagcaagaagagatgaagaagaagcaagatgccatggatgctcaacttgagcttatgctaagtcagattcaaccaagttaaagctaactagtatggggtgttaggctttgttggtacttctcttttgctgatgctattgcattctattgatggataaatacgtttcaatccattttttgtctattgtgctgctagagtagctttagcggcatgtgtggtgtgttggagtggcttacgtgtcagtggttggatacttgctgtaatgacatgctattggatacttgcatgtaatgacatgctggagtgtggtcagtattttttgtgatgagatgctggattaaaatctgagttgtgatgtaatagaattcaacattttgtcattatgttctggattataattaatatatatttaaattattgtgtttgcaaaa

SEQ ID NO: 218651 - DNA, 2501 bp, Zea Mays
caggacgacggcaaatccgcccacgcaaaatatcagcccaagtgcccatcgcccaagcttcctagctcacccgccgccacccactagccaaattccccatccctctcctgccgccacccatcagccacatctctccctcctactccctctccggcagccatcatcagacaagatccctcccccaccatcgagccatgtcgagtcgagtgcatcttctgcaagcacggccatcttacgaaaccctagctggctcgaaggaccactactgtccggcgccctgaacaacttggcatgatgccgacgaagggtggagcaaacaaatcacaatgacatcgggtagtagatccaccattgcatccctatgaagaggagcgccttagacaatgtatgaggaacaattcgaggttgcaacaacttggaattcctgctttagtcagcatgtgtgggaacataaattccatctctaggaacaaaaagccaaataacagggataatgaagattctgaatctgagtatgatccttcacatgacgattctattgaaggggatttgtttgaccatgatgatcataataagggctcaaaggacactaacagaagaactattcacatggctcctggtggaatcaagcctcgaactaagagagtttatgcagagcaacatactactagaaatacaaggtcaaagaaaagcattgctcagcctgacacaagtctaacacgaagtgacatctatgtgccaccaccctcgctatctcatttgacccaagttggagaagttgctcgtagcattgaaaaccatagaaagactagtgttgaagctaatggccctacccaggttgacaacacccacatggccaatcgagatggctttgaccaatttgatgacaacatgaccaaccaaggggaaggcattacccagcctggtggaaaaggtgatggtatatttctatatttaccatattgcatattacatcactagttgcttgctaaacctatcatgtgtcattagtttctactttactggatgttcttttgaccttttcaattagattcatgtgccatgtgtcattagcttgtcaatagtccattggatgatcatctttgatccatgtttgatgcacctcacttattgcaatttctatgtgaatctaaaactaggagtaaatcagcatagagaaaggggacttaatatgggacttggtctccaaaggatgaaccgagctcggcgtggcaaactgccaattgtcattactgaaggaaggataaggcctgtggcaccaattgttgctgcaaagtttgcaactgagtgcaacattgcagttcggaatcatgtgcttgtgcttaagtcatggaaggaatacgagaagcatcctgggctctttaaattgtttacagcaaaacttagtgcaaagtttgatatcaatacagaagatgcgctagttaaaaatgcttgtttccaaatgatgaggaatgcactgcgccaacaacgatataagctgaagaaacaatattttgacccttttccgctacatctagtgaggaaaacatctcctatcaaatcgacaagtgatgaacaatggaatgaccttgtggaacattggaaaggtccaaaaaatatggcgacatgtgaacataacaaaggcaaccgaggcaaagttaagttccatcaaacaactggatctcgtagctatatggttcatgtagaaaatttgggggacaagtacatggatcaagaacctgatgcattggatctgttcaaggagtgccactacagtaagaaaaaactcaaatggaagacaagcgatctacaccaggagaaggtgaacaaccaatgtctacgactcaggttgtagctgatgtgcttgctgagaacacaaagaagaatcggtttcttcaaaatgtgggaatccaaaatgcacgacctagatctagtgtacaaaatattgaagcacaacttgaagtagagaggaaggcaaatgcagagcttcaatcacttgtcagcatccaacgtgagcgcatggatgtattattaaagcaagtgcatgaagcagaactggtaaggattagagagcaagaagagatgaagaagaagcaagatgccatggatgctcaacttgagcttatgctaagtcagattcaaccaagttaaagctaactagtatggggtgttaggctttgttggtacttctcttttgctgatgctattgcattctattgatggataaatacgtttcaatccattttttgtctattgtgctgctagagtagctttagcggcatgtgtggtgtgttggagtggcttacgtgtcagtggttggatacttgctgtaatgacatgctattggatacttgcatgtaatgacatgctggagtgtggtcagtattttttgtgatgagatgctggattaaaatctgagttgtgatgtaatagaattcaacattttgtcattatgttctggattataattaatatatatttaaattattgtgtttgcaaaa

SEQ ID NO: 218652 - DNA, 797 bp, Zea Mays
gtttagttaaacccgtggcacaacattaaaatgggcaaattgcacaacaaaattgagtgatgatcccattgtatcattatcagcacaagcacccacacaatttcgttttcctgggtctgttcacgttgtgcttgagcttcagcatcggtgtggcttgtgctaacacccaagggaaaatcgttctggaggctttagtgctgacggctggcgtggtggtttctctgactgcgtatgctttctgggcgtcaaagaagggcaaggaattcgggtacctggggcctatcctgtcttccgcgcttactatcctcgtcctaactagctttcttcaggttttcttcccactgggacccgtgtcggtgggcttgttcggtgggctaggggctctggtcttctcaggcttcatcctgtacgacaccgagaacctgatcaagcgccacacctacgacgagtacatctgggcgtcggttgggctgtacctcgacatcctgaacctgttcctctccatcctgaacatgctcaggagcatgcaatccgacaactagcctcttgatcgaacacggtatacccccatggtaaatgcggtcctgtgctctggttgttagaggacgggatcgacgtgcgacatatgtattgtgtgagcccactcgtgtcaacactgcaaacaattgtggtcatgtcaccttgtatgttcttggtcacttttcaaacaattgtaagtacctcatatcgttttgcgctcgtgctattcgcgctaaaaatcacaatgatccagtaacaggttgtcatcacggttttct

SEQ ID NO: 218653 - DNA, 796 bp, Zea Mays
gtcatcatcaattgattatggagatgtgttgctgaaactactcaaattgtcgataatgatgatcccattgtatcattatcagcacaagcacccacacaatttcgttttcctgggtctgttcacgttgtgcttgagcttcagcatcggtgtggcttgtgctaacacccaagggaaaatcgttctggaggctttagtgctgacggctggcgtggtggtttctctgactgcgtatgctttctgggcgtcaaagaagggcaaggaattcgggtacctggggcctatcctgtcttccgcgcttactatcctcgtcctaactagctttcttcaggttttcttcccactgggacccgtgtcggtgggcttgttcggtgggctaggggctctggtcttctcaggcttcatcctgtacgacaccgagaacctgatcaagcgccacacctacgacgagtacatctgggcgtcggttgggctgtacctcgacatcctgaacctgttcctctccatcctgaacatgctcaggagcatgcaatccgacaactagcctcttgatcgaacacggtatacccccatggtaaatgcggtcctgtgctctggttgttagaggacgggatcgacgtgcgacatatgtattgtgtgagcccactcgtgtcaacactgcaaacaattgtggtcatgtcaccttgtatgttcttggtcacttttcaaacaattgtaagtacctcatatcgttttgcgctcgtgctattcgcgctaaaaatcacaatgatccagtaacaggttgtcatcacggttttct

SEQ ID NO: 218654 - DNA, 2624 bp, Zea Mays
cggcaacacctgcagctgctattgccactgtcagccggccaagtcccagtcataactcccaagtcccaacccaatcatggcgtcgtccgtccaccaactggaggagcacgacgaggcgggagaggagcacgatcgccatggcatccagctgatcacctctccgctgctgcaaccgtcgtcgcggcgcccgcatggctcggcggaggaaaaggaggctgaagcgggggacgacaacggctctccgatcgagcaggtcgccgtgctccccgtcggccgcctcatggccgcggcgctgccggagcgcgccttcttccgcggccgcccgtgcgagttcaccctcaacccggggcccttcagcgtgaaggagcatgtcctcatcaccatcttcgccaacgccggcgccggcaccgtgttcgccaagaatcttgtgacctctgtccgcgtcttctacggccagcacatgtccttcctcatcgccctcctcctcatcctcaccagccaggtgatggggttcggttgggcgggagttttccggcggtatctggtggagccggcggcgatgtggtggccctccaacctcgtgcaggtctccctcttcagggcacttcatgagaaggagcgaaggagaaaaggtagcatgacacgcaaccagttcttcacggtggcattcatctgcagtttcgcctactacatcttcccgggctacctgttccagatgctcacctccctctcctggatctgctgggtgtttcccagctctgtgattgcccagcagctcggctcaggcctccatggccttggcatcggtgcagttggactcgactggtcgtccatctcctcctacctcggaagcccccttgctagcccctggtttgccaccgccaacatcgcggctgccttcttcattgtcgtgtacataatcacaccgatcaactactggttcaatgtttacaaggcacgcaacttccccatctactcagatggcctctacacggtggctgggcagaagtacaacatctctagcatcatggactcccatttctacttcgatacagacgcctatgagaagagtgggccactgtacatcagcacgttcttcgcttccagctacggtcttagttttgcatgccttaccgcgacggtttcccacgttctccttttccatggaagtgaaatatggcagctaagcaaatcagctttcgaggataagaagatggacatacataccaagcttatgaggagatacaggcaggtccccgagtggtggttcatctgcatccttgtggctagtgtttcagccaccatgcttacctgcgagtactacattgagcaactgcagcttccttggtggggagtactgcttgcatgtgcccttgccattttctacacccttcctattggaattctcaaagcaacaaccaaccagagtacatcatggggtacctatatcccggacgacccatggcgaacatgtgcttcaaagtatacggctacgttggcccacatcaagcactagagtttttgcaagattttaagttgggccactacatgaagatacccccaagggccatgttcacggctcaggttgtgggcactttgattgcgggctccgtataccttggaacaatatggtggctcctggacacaatacctgatgtgtgcaacacagagcttctcccagcaggcagcccttggacatgcccttacgatcatgtgttctacgatgcatccgtattatggggccttatcggcccacgcagaatatttggtgatttaggcacttactccgctgtgaactggttcttcctgggcggtgccattgctcccctccttgtctggtgtacacacaaggcattcccagctcagaaatggatccggcatgtcaatgcgcctgtactgattggcgcaaccaccttcatgccacctgccactgcagccaactataccacgtggatactcgttgcgtttctgtcaggttacgtggtctataagtaccggcgtaactggtgggagcgacacaattatctgctgtcaggtgcccttgacgccggtttggcgttcatggctgtgttgctctatctatgcctgggactggagaataaaagtttgaactggtggggcaatgatctggacggatgccctcttgcttcatgccccactgcaaagggtataactgtggatggatgtccagtgcataactgagagaggtcaccattcagtatttgagggtagaattacattatctctaaagggacatatgcacagatcactgaaccatacagataattgagaggttcccttattgctgcatccatgcctaggagtggagaacaaaagtttttgctaggacaatggtttggatggatggcttcatgccacgctgcaaagcacattgaacttcacatagatgtctggtgcataattgagagtattctaatcattgccagtactgggggataaaactagattatatcttgatgacaccatcaaagatcaatgtagtctttgccaaattataaaagatctcaactacatgatgaagacacagtcagaagtgtgagtgtatttcagataagaactaaccagattcagattagaactaatcagcaggaatagcagccatt

SEQ ID NO: 218655 - DNA, 2650 bp, Zea Mays
agatgaagatgctttattgaaaaccaaatgtccgaagcatgtggagctgagatggcagactgaagttagttccagcatttatgcaactcctttgatcgctgatatcaacagtgatggaaaattggaagtagtggtgccatcatttgttcattacttagaagttcttgaaggcactgatggagacaaactgccaggatggcctgcatttcatcagtcaaatgttcattcaagtcctcttctgtatgacattgacaaggatggtgtacgggaaatagctttggctacttacaacggtgttgtaaatttctttagggtgtcaggttatatgatgatggacaagcttgaggtacctcgtagaaaagtacgtaaagattggtatgttgggctaaatccagatccagttgaccgctcccatccagatgttaatgacagttcaattgccaaagtggctacttctaatgaaactcccctaatagatcagaataaatcaggaagtatgaagggaggtgaggccctgaaaaattcatccgagcaacactcagctgaaacaaaacttaattctacgcaagtgcaagagaatgtacagttgccaaacaatccgacaagagtgatgatcaaacaggaagctcagaaactcatgaaagtgattcgggggcaaaagcagcagccactgttgaaaatagtgaacccctagacgaagatgcagatgcatcatttgacttgtttcgggacccagaagatcttcctgatgagtacaattatgattatgatgactatgttgatgatcgcttgtggggagatgaggattggaaagagcaagaacatgagaaagaggaagattatgtgagcatagatgcccacatcttgtccaccccagtaattgcagatattgacaaagatggtgtacaagaaatggtgattgctgtatcatacttctttgatcatgaatattatcgtgattcagatcatgcgaaagaactagaaggaattgacatgggaaaatatgtcgcgagcagtatagttgtttttaaccttgacacccggcaagttaaatgggctgcagatcttgatttgagcacggatgctgtaaatttccgtgctcatgtgttttcctctccaactgtggttgatttggatggtgatggatatttggacatccttattgggactgcttatggcttgttttatgttattgatcatcgtggtaaggttaggaacaaattcccccttgagatggctgagattcacgcaccagtcattgctgcggacatcaatgatgatggcaaaatcgagatggttaccactgattcccatggaaatgtagcagcatggactgcagagggagaagaaatctgggaagtgcatctaaagagtctgattccacagagacctactgttggtgatgtcaatggagatggccacactgatgttgtggtcccaactgtgtcaggaaacatctatgttcttagtggaaaggatgggtcaaaaatccaacctttcccatatagaacacatggaagaatcatgagtcctgttctacttctcgacatgagcaaacatggagacaatgcaaaagggctaactcttgcaacaacgtcctttgatggttatttatatttgattgagggatcgagtggctgtgcagatgttgttgacattggagagacctcgtacactatggttttggctgataacgtggatggtggagatgaccttgatcttattgttaccactatgaatggcaacgtcttctgcttctccactcaatcaccacaccatccgcttaaggaatggaggtcatcaaaccaaggaaggaataatgctgcatatcagtacaaccgtgaaggtatctatgttaagcatggttccaggaccttccgtgacgaagagggcaagaatttctggatagagtttgaaatcgttgacaagtacagggtgccctatgggaagcaagctccttataacgtgacggtaactttacttgttccggggaattatcaaggagataggcgcattgttgtcagtggtgtgtatcatcaaccagggaagcaacggatgatgcttcccactgttcctgttagaactactggaactgtggtcgtggagatgatcgataaaaatgggctgtacttctccgacgagttctcactcaccttccacatgcattactataagctgctgaaatggcttctgctactgccaatgcttggaatgtttggtgttctcgtcatcttgaggccccaagaaggtgcgccgctgccatcgttttcacggaatatcgactagtggtgaaatgccggtgacccattgaagctgacgaagtgactccccaacatctccatgacctaaatgtcttgttcagtgtagtatcccaacagttaaccatttcatggattatagttatattttttacaatgtacccatttagttctgcagaacaattttgtacacagccattttcaatattggctcacccaaagaacaagcatattgtcaccattgagagtttacagtaggccttggaaacggtaattgtcagattctaagagaagcgacactcggagaggagaagcaaaactctcggatactgtgtcaaaacgctcttcataactattagtagaaaacaaacctatattaagcctgttttcat

SEQ ID NO: 218656 - DNA, 2738 bp, Zea Mays
gatgaagatgctttattgaaaaccaaatgtccgaagcatgtggagctgagatggcagactgaagttagttccagcatttatgcaactcctttgatcgctgatatcaacagtgatggaaaattggaagtagtggtgccatcatttgttcattacttagaagttcttgaaggcactgatggagacaaactgccaggatggcctgcatttcatcagtcaaatgttcattcaagtcctcttctgtatgacattgacaaggatggtgtacgggaaatagctttggctacttacaacggtgttgtaaatttctttagggtgtcaggttatatgatgatggacaagcttgaggtacctcgtagaaaagtacgtaaagattggtatgttgggctaaatccagatccagttgaccgctcccatccagatgttaatgacagttcaattgccaaagtggctacttctaatgaaactcccctaatagatcagaataaatcaggaagtatgaagggaggtgaggccctgaaaaattcatccgagcaacactcagctgaaacaaaacttaattctacgcaagtgcaagagaatgtacagttgccaaacaatgtaaacgacactcattctgagagcatctctagtgtcactactaaagcagagaatacatcgcaaacacatactcagagacgcttgcttgaaacagccgacaagagtgatgatcaaacaggaagctcagaaactcatgaaagtgattcgggggcaaaagcagcagccactgttgaaaatagtgaacccctagacgaagatgcagatgcatcatttgacttgtttcgggacccagaagatcttcctgatgagtacaattatgattatgatgactatgttgatgatcgcttgtggggagatgaggattggaaagagcaagaacatgagaaagaggaagattatgtgagcatagatgcccacatcttgtccaccccagtaattgcagatattgacaaagatggtgtacaagaaatggtgattgctgtatcatacttctttgatcatgaatattatcgtgattcagatcatgcgaaagaactagaaggaattgacatgggaaaatatgtcgcgagcagtatagttgtttttaaccttgacacccggcaagttaaatgggctgcagatcttgatttgagcacggatgctgtaaatttccgtgctcatgtgttttcctctccaactgtggttgatttggatggtgatggatatttggacatccttattgggactgcttatggcttgttttatgttattgatcatcgtggttaggaacaaattcccccttgagatggctgagattcacgcaccagtcattgctgcggacatcaatgatgatggcaaaatcgagatggttaccactgattcccatggaaatgtagcagcatggactgcagagggagaagaaatctgggaagtgcatctaaagagtctgattccacagagacctactgttggtgatgtcaatggagatggccacactgatgttgtggtcccaactgtgtcaggaaacatctatgttcttagtggaaaggatgggtcaaaaatccaacctttcccatatagaacacatggaagaatcatgagtcctgttctacttctcgacatgagcaaacatggagacaatgcaaaagggctaactcttgcaacaacgtcctttgatggttatttatatttgattgagggatcgagtggctgtgcagatgttgttgacattggagagacctcgtacactatggttttggctgataacgtggatggtggagatgaccttgatcttattgttaccactatgaatggcaacgtcttctgcttctccactcaatcaccacaccatccgcttaaggaatggaggtcatcaaaccaaggaaggaataatgctgcatatcagtacaaccgtgaaggtatctatgttaagcatggttccaggaccttccgtgacgaagagggcaagaatttctggatagagtttgaaatcgttgacaagtacagggtgccctatgggaagcaagctccttataacgtgacggtaactttacttgttccggggaattatcaaggagataggcgcattgttgtcagtggtgtgtatcatcaaccagggaagcaacggatgatgcttcccactgttcctgttagaactactggaactgtggtcgtggagatgatcgataaaaatgggctgtacttctccgacgagttctcactcaccttccacatgcattactataagctgctgaaatggcttctgctactgccaatgcttggaatgtttggtgttctcgtcatcttgaggccccaagaaggtgcgccgctgccatcgttttcacggaatatcgactagtggtgaaatgccggtgacccattgaagctgacgaagtgactccccaacatctccatgacctaaatgtcttgttcagtgtagtatcccaacagttaaccatttcatggattatagttatattttttacaatgtacccatttagttctgcagaacaattttgtacacagccattttcaatattggctcacccaaagaacaagcatattgtcaccattgagagtttacagtaggccttggaaacggtaattgtcagattctaagagaagcgacactcggagaggagaagcaaaactctcggatactgtgtcaaaacgctcttcataactattagtagaaaacaaacctatattaagcctgttttcat

SEQ ID NO: 218657 - DNA, 2735 bp, Zea Mays
gatgaagatgctttattgaaaaccaaatgtccgaagcatgtggagctgagatggcagactgaagttagttccagcatttatgcaactcctttgatcgctgatatcaacagtgatggaaaattggaagtagtggtgccatcatttgttcattacttagaagttcttgaaggcactgatggagacaaactgccaggatggcctgcatttcatcagtcaaatgttcattcaagtcctcttctgtatgacattgacaaggatggtgtacgggaaatagctttggctacttacaacggtgttgtaaatttctttaggttatatgatgatggacaagcttgaggtacctcgtagaaaagtacgtaaagattggtatgttgggctaaatccagatccagttgaccgctcccatccagatgttaatgacagttcaattgccaaagtggctacttctaatgaaactcccctaatagatcagaataaatcaggaagtatgaagggaggtgaggccctgaaaaattcatccgagcaacactcagctgaaacaaaacttaattctacgcaagtgcaagagaatgtacagttgccaaacaatgtaaacgacactcattctgagagcatctctagtgtcactactaaagcagagaatacatcgcaaacacatactcagagacgcttgcttgaaacagccgacaagagtgatgatcaaacaggaagctcagaaactcatgaaagtgattcgggggcaaaagcagcagccactgttgaaaatagtgaacccctagacgaagatgcagatgcatcatttgacttgtttcgggacccagaagatcttcctgatgagtacaattatgattatgatgactatgttgatgatcgcttgtggggagatgaggattggaaagagcaagaacatgagaaagaggaagattatgtgagcatagatgcccacatcttgtccaccccagtaattgcagatattgacaaagatggtgtacaagaaatggtgattgctgtatcatacttctttgatcatgaatattatcgtgattcagatcatgcgaaagaactagaaggaattgacatgggaaaatatgtcgcgagcagtatagttgtttttaaccttgacacccggcaagttaaatgggctgcagatcttgatttgagcacggatgctgtaaatttccgtgctcatgtgttttcctctccaactgtggttgatttggatggtgatggatatttggacatccttattgggactgcttatggcttgttttatgttattgatcatcgtggtaaggttaggaacaaattcccccttgagatggctgagattcacgcaccagtcattgctgcggacatcaatgatgatggcaaaatcgagatggttaccactgattcccatggaaatgtagcagcatggactgcagagggagaagaaatctgggaagtgcatctaaagagtctgattccacagagacctactgttggtgatgtcaatggagatggccacactgatgttgtggtcccaactgtgtcaggaaacatctatgttcttagtggaaaggatgggtcaaaaatccaacctttcccatatagaacacatggaagaatcatgagtcctgttctacttctcgacatgagcaaacatggagacaatgcaaaagggctaactcttgcaacaacgtcctttgatggttatttatatttgattgagggatcgagtggctgtgcagatgttgttgacattggagagacctcgtacactatggttttggctgataacgtggatggtggagatgaccttgatcttattgttaccactatgaatggcaacgtcttctgcttctccactcaatcaccacaccatccgcttaaggaatggaggtcatcaaaccaaggaaggaataatgctgcatatcagtacaaccgtgaaggtatctatgttaagcatggttccaggaccttccgtgacgaagagggcaagaatttctggatagagtttgaaatcgttgacaagtacagggtgccctatgggaagcaagctccttataacgtgacggtaactttacttgttccggggaattatcaaggagataggcgcattgttgtcagtggtgtgtatcatcaaccagggaagcaacggatgatgcttcccactgttcctgttagaactactggaactgtggtcgtggagatgatcgataaaaatgggctgtacttctccgacgagttctcactcaccttccacatgcattactataagctgctgaaatggcttctgctactgccaatgcttggaatgtttggtgttctcgtcatcttgaggccccaagaaggtgcgccgctgccatcgttttcacggaatatcgactagtggtgaaatgccggtgacccattgaagctgacgaagtgactccccaacatctccatgacctaaatgtcttgttcagtgtagtatcccaacagttaaccatttcatggattatagttatattttttacaatgtacccatttagttctgcagaacaattttgtacacagccattttcaatattggctcacccaaagaacaagcatattgtcaccattgagagtttacagtaggccttggaaacggtaattgtcagattctaagagaagcgacactcggagaggagaagcaaaactctcggatactgtgtcaaaacgctcttcataactattagtagaaaacaaacctatattaagcctgttttcat

SEQ ID NO: 218658 - DNA, 4092 bp, Zea Mays
ccatcagccgcgtcccttcgcacaactaccagatccatttgtgcgttcacatcttctctcctccctggcaactgcttccatcatctccatcaccgtccccacgttctcctccctccgcctctcgctctgcgcacatccccatgcccacgccgagcgcttgcgcctcaccacccccgtcgcagccgcggccgtggcggcgtcgacgacctcccccgactttcccgccgtgggcgccgtcctggggaagcccacagtgctcgtgggtagtggccgagaagatcggagccgcggggttcatgctgaaggaggtggtgcgatgtccagctcccaggtcgtcgtcctcacgctcctggagttttggtcagtgagatgttcgtcttcgtgctcagcctcgtcctcgagtcgtcgcgcaaacagcgagagcagcgtgggtctcatcatcaggatcacaccaacaggaaatgctaggcgatggtgcatgcatgatgaagctgctgtccattatattgacatgattgatcagaccacgcttggtcaccggatgatcaagaaacaattcaacaagactccaagagctggctggcaaatcgattgcttggaacagagcttggcttcgattctttgcattttgcaagaatcgattaccaagataagaaaaggcgtaaagctggcaaaggcttgaggttatatggcgtggctcaagaactttcggttcatcttcacagatatttacaaatgtatttcgtgtcgattatagccctccagatggctttggctttgaagttttagatgaaaatatcttgcctgtccaggatgacatgccgatgtttgactataatgttgaagaacaagttaatgattttgttgctgcagccatagaacagaatcttggttccggaatatggacaaacttatctatcgcgtgaacaaggatgcacgtaaaatagaatttttagtaggtaggaggagttccttagggctgttcacgaccagcttggaagacccaatggcaattgcccagcatcatgatgcggtctcaggtatagcaaaacaacacacgacagatgactactcgaaatgccttgctcttggagcatctaagaatgaaagcattaatggtatatagttggatatttcattcagagaggctcaagtgatagctgcaagtagttctaccttgtgcccagttttcttgttcttttaggtcaatgaaagttcccatttttgtggcgttgcttagatggttggtcctttcctcaaaaaaaaaagatggttggtcctgttgactaccaaaatgacttgaacttttggtgcatggacaaatggactagaagctttcctgtaacgtggcacatcataagatgttggttgattctcctgaaagcagattttattttactttaaccaaaggagaaccaagttggctgtcgtctcccactgtggcactattttttgggttaaaagtataacaccatcgtgagttgaaactcttgagacatagagataaaaaccaataaaactcacatccgacgtgattagcatgaccattactcatcaaaaatagttgaaataaattcttcactccaatctaatccaaataccagatcttcataagaagagcatgccaatgacattgttttggcaatcagttcatggttacacgacactactatgacagacttattttgaaacatagaacaatgcttattcaacattattatacaatcaagatcctaactttttgggggggttgcaacaatggagagtggagacaacatggagacctgagctgagcttaacccgcaaaagatcatacaccattctgtgatgcttcacaaggttccgcacctcaaattttggtgaaactgccttgttgttgtcttcatatctagcgcactggcatcccatgtagactgcagtttttgtcaaaaatgattttttttgaataagtagacattatatccttcaagatttttatatggaaatcctaaattgtgggcatattgatttttactctatttcttaaatgtaaagttgtaaacttgaatcacctagaaggaaccgtgttaagaagaaataagcaactatgtcttttcttctggaaagataaaatgtgtttatatttgaaagctagaaacatagctttctattatgtcacatcagtctaaaccagaatttaatcattttttataatgcacgtgcaatgagataaaaccaaaacaccttataatttggaatagagacttaacattttgttggctgggacattgggctatattttgcagcctcctcacttggcacagataacttcatttgttttccagagactgtattaatactttgcaggaataaacattgtgtcttgttatccattgcaatatacaacacttaagcccttggctgatagagtgattgtaaagattaactcttccgaggagaagacaactggtggaattttgcttccaacgactgctcagtctagacctcagggtggcaagaaatacgtcaaggaaaaatgtcgaacaactcagaagataaattcaagaactggttgcttcaacaagagtctgtccatgaggatggcatgcaacattacttgcccttcgattgagataggtggctacggtgatgctttgttgaacctgatatacgcatctccatcaagccagttcgaagagctcagtttagaatgtgagctagatgctacaggcaatcattctagagtgaaggatgctcaagttcatggctcacctatacctgagagtaatggaagattatcgacaactgctcagactaaaatgatgtccacagtctcagaagatgcaattcttgttggctcatctttcagataccaaagtagcctaggtaacaacaataagagggttgggctttttgatatgggtgatggaagtagtgagcctgctgctgaggacaacaatcaaatgcatcagatttcacgatgctgatatgtgctaagcatggaaacagaattgttctcacatgtatagttggtctaagtgatggcaaaagattgacacttgtggagttttttctgtgccagacatggagtcccttggaaaaaccgaatggtctatcatgggttttattctgcatacgataatacaactctactatatgagatcctgaagtctattaaatgggcaagaaaaacatatgtaaatcgacctgtaaatgttgttggacactccattggaggggatctagcttcattttgtgcccttgatctatttgacgttgagctcatgacttttggacagcctcggttaggcaatcctgcatttgttgtatgccttggctaacaagtcccaagaacaatccatgtgacccataaaaacgatattgtgccgcaattaccaccgtattattattacttaagtaaatggacataccaccacttcgctagagaggtttgacttcatgagagcatagatggaaatgtagttgccagaaatgagattgtatgtgatgattctggtgaggacccgacctatagcaggtacatatcagtctatctattttgtacatttatttcctatgtgtgtttcatattatttgtgttttctgaagaagtgggtcatgggatgagcgtagcagataatcttgagtactacagtgtcacactacatgttgactcaaggggaacctgtcagttcgtgattggtacagccaaccaagtatacaactacattcgtgaagttgatggatccatcatcttgttaagatatatatgcaagaaccatgagctctagaatcaatgtgactttgtatgccacgaaatgcacccttgtacaatatttttattttcaatttgtgtacagctcatgaaatactgttgtgtacaactcatgaaatactgggctctccagagggtaaggactaaggagagactcacctttttaaatgcacccctttgaccaagtgacattcgatacattgtaagctccataagattgccgcacaattcaatttgtgtatatcaataacactatgtattaccaagttatgcaagtattaggtggcactccttgtttggccattccatcattttgttgctacatgaggcatttcaag

SEQ ID NO: 218659 - DNA, 4226 bp, Zea Mays
cgcgtcccttcgcacaactaccagatccatttgtgcgttcacatcttctctcctccctggcaactgcttccatcatctccatcaccgtccccacgttctcctccctccgcctctcgctctgcgcacatccccatgcccacgccgagcgcttgcgcctcaccacccccgtcgcagccgcggccgtggcggcgtcgacgacctcccccgactttcccgccgtgggcgccgtcctggggaagcccacagtgctcgtgggtagtggccgagaagatcggagccgcggggttcatgctgaaggaggtggtgcgatgtccagctcccaggtcgtcgtcctcacgctcctggagttttggtcagtgagatgttcgtcttcgtgctcagcctcgtcctcgagtcgtcgcgcaaacagcgagagcagcgtgggtctcatcatcaggatcacaccaacaggaaatgctaggcgatggtgcatgcatgatgaagctgctgtccattatattgacatgattgatcagaccacgcttggtcaccggatgatcaagaaacaattcaacaagactccaagagctggctggcaaatcgattgcttggaacagagcttggcttcgattctttgcattttgcaagaatcgattaccaagataagaaaaggcgtaaagctggcaaaggcttgaggttatatggcgtggctcaagaactttcggttcatcttcacagatatttacaaatgtatttcgtgtcgattatagccctccagatggctttggctttgaagttttagatgaaaatatcttgcctgtccaggatgacatgccgatgtttgactataatgttgaagaacaagttaatgattttgttgctgcagccatagaacagaatcttggttccggaatatggacaaacttatctatcgcgtgaacaaggatgcacgtaaaatagaatttttagtaggtaggaggagttccttagggctgttcacgaccagcttggaagacccaatggcaattgcccagcatcatgatgcggtctcaggtatagcaaaacaacacacgacagatgactactcgaaatgccttgctcttggagcatctaagaatgaaagcattaatggtatatagttggatatttcattcagagaggctcaagtgatagctgcaagtagttctaccttgtgcccagttttcttgttcttttaggtcaatgaaagttcccatttttgtggcgttgcttagatggttggtcctttcctcaaaaaaaaaagatggttggtcctgttgactaccaaaatgacttgaacttttggtgcatggacaaatggactagaagctttcctgtaacgtggcacatcataagatgttggttgattctcctgaaagcagattttattttactttaaccaaaggagaaccaagttggctgtcgtctcccactgtggcactattttttgggttaaaagtataacaccatcgtgagttgaaactcttgagacatagagataaaaaccaataaaactcacatccgacgtgattagcatgaccattactcatcaaaaatagttgaaataaattcttcactccaatctaatccaaataccagatcttcataagaagagcatgccaatgacattgttttggcaatcagttcatggttacacgacactactatgacagacttattttgaaacatagaacaatgcttattcaacattattatacaatcaagatcctaactttttgggggggttgcaacaatggagagtggagacaacatggagacctgagctgagcttaacccgcaaaagatcatacaccattctgtgatgcttcacaaggttccgcacctcaaattttggtgaaactgccttgttgttgtcttcatatctagcgcactggcatcccatgtagactgcagtttttgtcaaaaatgattttttttgaataagtagacattatatccttcaagatttttatatggaaatcctaaattgtgggcatattgatttttactctatttcttaaatgtaaagttgtaaacttgaatcacctagaaggaaccgtgttaagaagaaataagcaactatgtcttttcttctggaaagataaaatgtgtttatatttgaaagctagaaacatagctttctattatgtcacatcagtctaaaccagaatttaatcattttttataatgcacgtgcaatgagataaaaccaaaacaccttataatttggaatagagacttaacattttgttggctgggacattgggctatattttgcagcctcctcacttggcacagataacttcatttgttttccagagactgtattaatactttgcaggaataaacattgtgtcttgttatccattgcaatatacaacacttaagcccttggctgatagagtgattgtaaagattaactcttccgaggagaagacaactggtggaattttgcttccaacgactgctcagtctagacctcagggtggcaaggtagttgctattggaaaaggaatgataattggggacaataaagttgatgtcaacatttagtaataactataagctctctgtgagccaattcttgagatgatgtccaacatgctcatttaagttgtgcctaagttggtgtcagaaatacgtcaaggaaaaatgtcgaacaactcagaagataaattcaagaactggttgcttcaacaagagtctgtccatgaggatggcatgcaacattacttgcccttcgattgagataggtggctacggtgatgctttgttgaacctgatatacgcatctccatcaagccagttcgaagagctcagtttagaatgtgagctagatgctacaggcaatcattctagagtgaaggatgctcaagttcatggctcacctatacctgagagtaatggaagattatcgacaactgctcagactaaaatgatgtccacagtctcagaagatgcaattcttgttggctcatctttcagataccaaagtagcctaggtaacaacaataagagggttgggctttttgatatgggtgatggaagtagtgagcctgctgctgaggacaacaatcaaatgcatcagatttcacgatgctgatatgtgctaagcatggaaacagaattgttctcacatgtatagttggtctaagtgatggcaaaagattgacacttgtggagttttttctgtgccagacatggagtcccttggaaaaaccgaatggtctatcatgggttttattctgcatacgataatacaactctactatatgagatcctgaagtctattaaatgggcaagaaaaacatatgtaaatcgacctgtaaatgttgttggacactccattggaggggatctagcttcattttgtgcccttgatctatttgacgttgagctcatgacttttggacagcctcggttaggcaatcctgcatttgttgtatgccttggctaacaagtcccaagaacaatccatgtgacccataaaaacgatattgtgccgcaattaccaccgtattattattacttaagtaaatggacataccaccacttcgctagagaggtttgacttcatgagagcatagatggaaatgtagttgccagaaatgagattgtatgtgatgattctggtgaggacccgacctatagcaggtacatatcagtctatctattttgtacatttatttcctatgtgtgtttcatattatttgtgttttctgaagaagtgggtcatgggatgagcgtagcagataatcttgagtactacagtgtcacactacatgttgactcaaggggaacctgtcagttcgtgattggtacagccaaccaagtatacaactacattcgtgaagttgatggatccatcatcttgttaagatatatatgcaagaaccatgagctctagaatcaatgtgactttgtatgccacgaaatgcacccttgtacaatatttttattttcaatttgtgtacagctcatgaaatactgttgtgtacaactcatgaaatactgggctctccagagggtaaggactaaggagagactcacctttttaaatgcacccctttgaccaagtgacattcgatacattgtaagctccataagattgccgcacaattcaatttgtgtatatcaataacactatgtattaccaagttatgcaagtattaggtggcactccttgtttggccattccatcattttgttgctacatgaggcatttcaag

SEQ ID NO: 218660 - DNA, 4233 bp, Zea Mays
cgcgtcccttcgcacaactaccagatccatttgtgcgttcacatcttctctcctccctggcaactgcttccatcatctccatcaccgtccccacgttctcctccctccgcctctcgctctgcgcacatccccatgcccacgccgagcgcttgcgcctcaccacccccgtcgcagccgcggccgtggcggcgtcgacgacctcccccgactttcccgccgtgggcgccgtcctggggaagcccacagtgctcgtgggtagtggccgagaagatcggagccgcggggttcatgctgaaggaggtggtgcgatgtccagctcccaggtcgtcgtcctcacgctcctggagttttggtcagtgagatgttcgtcttcgtgctcagcctcgtcctcgagtcgtcgcgcaaacagcgagagcagcgtgggtctcatcatcaggatcacaccaacaggaaatgctaggcgatggtgcatgcatgatgaagctgctgtccattatattgacatgattgatcagaccacgcttggtcaccggatgatcaagaaacaattcaacaagactccaagagctggctggcaaatcgattgcttggaacagagcttggcttcgattctttgcattttgcaagaatcgattaccaagataagaaaaggcgtaaagctggcaaaggcttgaggttatatggcgtggctcaagaactttcggttcatcttcacagatatttacaaatgtatttcgtgtcgattatagccctccagatggctttggctttgaagttttagatgaaaatatcttgcctgtccaggatgacatgccgatgtttgactataatgttgaagaacaagttaatgattttgttgctgcagccatagaacagaatcttggttccggaatatggacaaacttatctatcgcgtgaacaaggatgcacgtaaaatagaatttttagtaggtaggaggagttccttagggctgttcacgaccagcttggaagacccaatggcaattgcccagcatcatgatgcggtctcaggtatagcaaaacaacacacgacagatgactactcgaaatgccttgctcttggagcatctaagaatgaaagcattaatggtatatagttggatatttcattcagagaggctcaagtgatagctgcaagtagttctaccttgtgcccagttttcttgttcttttaggtcaatgaaagttcccatttttgtggcgttgcttagatggttggtcctttcctcaaaaaaaaaagatggttggtcctgttgactaccaaaatgacttgaacttttggtgcatggacaaatggactagaagctttcctgtaacgtggcacatcataagatgttggttgattctcctgaaagcagattttattttactttaaccaaaggagaaccaagttggctgtcgtctcccactgtggcactattttttgggttaaaagtataacaccatcgtgagttgaaactcttgagacatagagataaaaaccaataaaactcacatccgacgtgattagcatgaccattactcatcaaaaatagttgaaataaattcttcactccaatctaatccaaataccagatcttcataagaagagcatgccaatgacattgttttggcaatcagttcatggttacacgacactactatgacagacttattttgaaacatagaacaatgcttattcaacattattatacaatcaagatcctaactttttgggggggttgcaacaatggagagtggagacaacatggagacctgagctgagcttaacccgcaaaagatcatacaccattctgtgatgcttcacaaggttccgcacctcaaattttggtgaaactgccttgttgttgtcttcatatctagcgcactggcatcccatgtagactgcagtttttgtcaaaaatgattttttttgaataagtagacattatatccttcaagatttttatatggaaatcctaaattgtgggcatattgatttttactctatttcttaaatgtaaagttgtaaacttgaatcacctagaaggaaccgtgttaagaagaaataagcaactatgtcttttcttctggaaagataaaatgtgtttatatttgaaagctagaaacatagctttctattatgtcacatcagtctaaaccagaatttaatcattttttataatgcacgtgcaatgagataaaaccaaaacaccttataatttggaatagagacttaacattttgttggctgggacattgggctatattttgcagcctcctcacttggcacagataacttcatttgttttccagagactgtattaatactttgcaggaataaacattgtgtcttgttatccattgcaatatacaacacttaagcccttggctgatagagtgattgtaaagattaactcttccgaggagaagacaactggtggaattttgcttccaacgactgctcagtctagacctcagggtggcaagaaatacgtcaaggaaaaatgtcgaacaactcagaagataaattcaagaactggttgcttcaacaagagtctgtccatgaggatggcatgcaacattacttgcccttcgattgagataggtggctacggtgatgctttgttgaacctgatatacgcatctccatcaagccagttcgaagagctcagtttagaatgtgagctagatgctacaggcaatcattctagagtgaaggatgctcaagttcatggctcacctatacctgagagtaatggaagattatcgacaactgctcagactaaaatgatgtccacagtctcagaagatgcaattcttgttggctcatctttcagataccaaagtagcctaggtaacaacaataagagggttgggctttttgatatgggtgatggaagtagtgagcctgctgctgaggacaacaatcaaatgcatcagacgatgtgatgtgcagatttcacgatgctgatatgtgctaagcatggaaacagaattgttctcacatgtatagttggtctaagtgatggcaaaagattgacacttgtggagttttttctgtgccagacatggagtcccttggaaaaaccgaatggtctatcatgggttttattctgcatacgataatacaactctactatatgagatcctgaagtctattaaatgggcaagaaaaacatatgtaaatcgacctgtaaatgttgttggacactccattggaggggatctagcttcattttgtgcccttgatctatttgtaagtatttttaatgtacttgatttattataccaaatttcaatatatgctctacaaataacctgtacttgttttgtgataccatcacatgtattgttaatatatcagatggttggcttcattgatatctctacattttttacatatatcagatggttggcttcattgatatctctacattttttacatgttaaattcggatcataggacgttgagctcatgacttttggacagcctcggttaggcaatcctgcatttgttgtatgccttggctaacaagtcccaagaacaatccatgtgacccataaaaacgatattgtgccgcaattaccaccgtattattattacttaagtaaatggacataccaccacttcgctagagaggtttgacttcatgagagcatagatggaaatgtagttgccagaaatgagattgtatgtgatgattctggtgaggacccgacctatagcagtgggtcatgggatgagcgtagcagataatcttgagtactacagtgtcacactacatgttgactcaaggggaacctgtcagttcgtgattggtacagccaaccaagtatacaactacattcgtgaagttgatggatccatcatcttgttaagatatatatgcaagaaccatgagctctagaatcaatgtgactttgtatgccacgaaatgcacccttgtacaatatttttattttcaatttgtgtacagctcatgaaatactgttgtgtacaactcatgaaatactgggctctccagagggtaaggactaaggagagactcacctttttaaatgcacccctttgaccaagtgacattcgatacattgtaagctccataagattgccgcacaattcaatttgtgtatatcaataacactatgtattaccaagttatgcaagtattaggtggcactccttgtttggccattccatcattttgttgctacatgaggcatttcaag

SEQ ID NO: 218661 - DNA, 1432 bp, Zea Mays
tccatcaccgtccccacgttctcctccctccgcctctcgctctgcgcacatccccatgcccacgccgagcgcttgcgcctcaccacccccgtcgcagccgcggccgtggcggcgtcgacgacctcccccgactttcccgccgtgggcgccgtcctggggaagcccacagtgctcgtgggtagtggccgagaagatcggagccgcggggttcatgctgaaggaggtggtgcgatgtccagctcccaggtcgtcgtcctcacgctcctggagttttggtcagtgagatgttcgtcttcgtgctcagcctcgtcctcgagtcgtcgcgcaaacagcgagagcagcgtgggtctcatcatcaggatcacaccaacaggaaatgctaggcgatggtgcatgcatgatgaagctgctgtccattatattgacatgattgatcagaccacgcttggtcaccggatgatcaagaaacaattcaacaagactccaagagctggctggcaaatcgattgcttggaacagagcttggcttcgattctttgcattttgcaagaatcgattaccaagataagaaaaggcgtaaagctggcaaaggcttgaggttatatggcgtggctcaagaactttcggttcatcttcacagatatttacaaatgtatttcgtgtcgattatagccctccagatggctttggctttgaagttttagatgaaaatatcttgcctgtccaggatgacatgccgatgtttgactataatgttgaagaacaagttaatgattttgttgctgcagccatagaacagaatcttggttccggaatatggacaaacttatctatcgcgtgaacaaggatgcacgtaaaatagaatttttagtaggtaggaggagttccttagggctgttcacgaccagcttggaagacccaatggcaattgcccagcatcatgatgcggtctcagaatgaaagcattaatggtatatagttggatatttcattcagagaggctcaagtgatagctgcaagtagttctaccttgtgcccagttttcttgttcttttaggtcaatgaaagttcccatttttgtggcgttgcttagatggttggtcctttcctcaaaaaaaaaagatggttggtcctgttgactaccaaaatgacttgaacttttggtgcatggacaaatggactagaagctttcctgtaacgtggcacatcataagatgttggttgattctcctgaaagcagattttattttactttaaccaaaggagaaccaagttggctgtcgtctcccactgtggcactattttttgggttaaaagtataacaccatcgtgagttgaaactcttgagacatagagataaaaaccaataaaactcacatccgacgtgattagcatgaccattactcatcaaaaatagttgaaataaattctt

SEQ ID NO: 218662 - DNA, 1499 bp, Zea Mays
tccatcaccgtccccacgttctcctccctccgcctctcgctctgcgcacatccccatgcccacgccgagcgcttgcgcctcaccacccccgtcgcagccgcggccgtggcggcgtcgacgacctcccccgactttcccgccgtgggcgccgtcctggggaagcccacagtgctcgtgggtagtggccgagaagatcggagccgcggggttcatgctgaaggaggtggtgcgatgtccagctcccaggtcgtcgtcctcacgctcctggagttttggtcagtgagatgttcgtcttcgtgctcagcctcgtcctcgagtcgtcgcgcaaacagcgagagcagcgtgggtctcatcatcaggatcacaccaacagggacggagatctgtcgtcgaagaccacctgactgtttctcatggcaggcttgcttgcactagcttggcacaataagccacttcaggcttcagtcggttatgtgatcaccggaacattatgggctctagagtaggacttttgagaaatgctaggcgatgaccacgcttggtcaccggatgatcaagaaacaattcaacaagactccaagagctggctggcaaatcgattgcttggaacagagggaatttgactctgtggtggttaaattgcagatatttacaaatgtatttcgtgtcgattatagccctccagatggctttggctttgaagttttagatgaaaatatcttgcctgtccaggatgacatgccgatgtttgactataatgttgaagaacaagttaatgattttgttgctgcagccatagaacagaatcttggttccggaatatggacaaacttatctatcgcgtgaacaaggatgcacgtaaaatagaatttttagtaggtaggaggagttccttagggctgttcacgaccagcttggaagacccaatggcaattgcccagcatcatgatgcggtctcaggtatagcaaaacaacacacgacagatgactactcgaaatgccttgctcttggagcatctaagaatgaaagcattaatggtatatagttggatatttcattcagagaggctcaagtgatagctgcaagtagttctaccttgtgcccagttttcttgttcttttaggtcaatgaaagttcccatttttgtggcgttgcttagatggttggtcctttcctcaaaaaaaaaagatggttggtcctgttgactaccaaaatgacttgaacttttggtgcatggacaaatggactagaagctttcctgtaacgtggcacatcataagatgttggttgattctcctgaaagcagattttattttactttaaccaaaggagaaccaagttggctgtcgtctcccactgtggcactattttttgggttaaaagtataacaccatcgtgagttgaaactcttgagacatagagataaaaaccaataaaactcacatccgacgtgattagcatgaccattactcatcaaaaatagttgaaataaattctt

SEQ ID NO: 218663 - DNA, 2056 bp, Zea Mays
aaaacatttgtcaaatgtatcttggatgcacgtaaaatagaatttttagtaggtaggaggagttccttagggctgttcacgaccagcttggaagacccaatggcaattgcccagcatcatgatgcggtctcaggtatagcaaaacaacacacgacagatgactactcgaaatgccttgctcttggagcatctaagaatgaaagcattaatggaataaacattgtgtcttgttatccattgcaatatacaacacttaagcccttggctgatagagtgattgtaaagattaactcttccgaggagaagacaactggtggaattttgcttccaacgactgctcagtctagacctcagggtggcaagaaatacgtcaaggaaaaatgtcgaacaactcagaagataaattcaagaactggttgcttcaacaagagtctgtccatgaggatggcatgcaacattacttgcccttcgattgagataggtggctacggtgatgctttgttgaacctgatatacgcatctccatcaagccagttcgaagagctcagtttagaatgtgagctagatgctacaggcaatcattctagagtgaaggatgctcaagttcatggctcacctatacctgagagtaatggaagattatcgacaactgctcagactaaaatgatgtccacagtctcagaagatgcaattcttgttggctcatctttcagataccaaagtagcctaggtaacaacaataagagggttgggctttttgatatgggtgatggaagtagtgagcctgctgctgaggacaacaatcaaatgcatcagatttcacgatgctgatatgtgctaagcatggaaacagaattgttctcacatgtatagttggtctaagtgatggcaaaagattgacacttgtggagttttttctgtgccagacatggagtcccttggaaaaaccgaatggtctatcatgggttttattctgcatacgataatacaactctactatatgagatcctgaagtctattaaatgggcaagaaaaacatatgtaaatcgacctgtaaatgttgttggacactccattggaggggatctagcttcattttgtgcccttgatctatttatggttggcttcattgatatctctacattttttacatatatcagatggttggcttcattgatatctctacattttttacatgttaaattcggatcataggacgttgagctcatgacttttggacagcctcggttaggcaatcctgcatttgttgtatgccttggctaacaagtcccaagaacaatccatgtgacccataaaaacgatattgtgccgcaattaccaccgtattattattacttaagtaaatggacataccaccacttcgctagagaggtttgacttcatgagagcatagatggaaatgtagttgccagaaatgagattgtatgtgatgattctggtgaggacccgacctatagcaggtacatatcagtctatctattttgtacatttatttcctatgtgtgtttcatattatttgtgttttctgaagaagtgggtcatgggatgagcgtagcagataatcttgagtactacagtgtcacactacatgttgactcaaggggaacctgtcagttcgtgattggtacagccaaccaagtatacaactacattcgtgaagttgatggatccatcatcttgttaagatatatatgcaagaaccatgagctctagaatcaatgtgactttgtatgccacgaaatgcacccttgtacaatatttttattttcaatttgtgtacagctcatgaaatactgttgtgtacaactcatgaaatactgggctctccagagggtaaggactaaggagagactcacctttttaaatgcacccctttgaccaagtgacattcgatacattgtaagctccataagattgccgcacaattcaatttgtgtatatcaataacactatgtattaccaagttatgcaagtattaggtggcactccttgtttggccattccatcattttgttgctacatgaggcatttcaag

SEQ ID NO: 218664 - DNA, 3564 bp, Zea Mays
gtaaaatatgatgattatttcccgatgcacgtaaaatagaatttttagtaggtaggaggagttccttagggctgttcacgaccagcttggaagacccaatggcaattgcccagcatcatgatgcggtctcagaatgaaagcattaatggtatatagttggatatttcattcagagaggctcaagtgatagctgcaagtagttctaccttgtgcccagttttcttgttcttttaggtcaatgaaagttcccatttttgtggcgttgcttagatggttggtcctttcctcaaaaaaaaaagatggttggtcctgttgactaccaaaatgacttgaacttttggtgcatggacaaatggactagaagctttcctgtaacgtggcacatcataagatgttggttgattctcctgaaagcagattttattttactttaaccaaaggagaaccaagttggctgtcgtctcccactgtggcactattttttgggttaaaagtataacaccatcgtgagttgaaactcttgagacatagagataaaaaccaataaaactcacatccgacgtgattagcatgaccattactcatcaaaaatagttgaaataaattcttcactccaatctaatccaaataccagatcttcataagaagagcatgccaatgacattgttttggcaatcagttcatggttacacgacactactatgacagacttattttgaaacatagaacaatgcttattcaacattattatacaatcaagatcctaactttttgggggggttgcaacaatggagagtggagacaacatggagacctgagctgagcttaacccgcaaaagatcatacaccattctgtgatgcttcacaaggttccgcacctcaaattttggtgaaactgccttgttgttgtcttcatatctagcgcactggcatcccatgtagactgcagtttttgtcaaaaatgattttttttgaataagtagacattatatccttcaagatttttatatggaaatcctaaattgtgggcatattgatttttactctatttcttaaatgtaaagttgtaaacttgaatcacctagaaggaaccgtgttaagaagaaataagcaactatgtcttttcttctggaaagataaaatgtgtttatatttgaaagctagaaacatagctttctattatgtcacatcagtctaaaccagaatttaatcattttttataatgcacgtgcaatgagataaaaccaaaacaccttataatttggaatagagacttaacattttgttggctgggacattgggctatattttgcagcctcctcacttggcacagataacttcatttgttttccagagactgtattaatactttgcaggaataaacattgtgtcttgttatccattgcaatatacaacacttaagcccttggctgatagagtgattgtaaagattaactcttccgaggagaagacaactggtggaattttgcttccaacgactgctcagtctagacctcagggtggcaaggtagttgctattggaaaaggaatgataattggggacaataaagttgatgtcaacatttagtaataactataagctctctgtgagccaattcttgagatgatgtccaacatgctcatttaagttgtgcctaagttggtgtcagaaatacgtcaaggaaaaatgtcgaacaactcagaagataaattcaagaactggttgcttcaacaagagtctgtccatgaggatggcatgcaacattacttgcccttcgattgagataggtggctacggtgatgctttgttgaacctgatatacgcatctccatcaagccagttcgaagagctcagtttagaatgtgagctagatgctacaggcaatcattctagagtgaaggatgctcaagttcatggctcacctatacctgagagtaatggaagattatcgacaactgctcagactaaaatgatgtccacagtctcagaagatgcaattcttgttggctcatctttcaggtggaagcgcaagctgacttattttattaccatgaagcctgaagatgtataccaaagtagcctaggtaacaacaataagagggttgggctttttgatatgggtgatggaagtagtgagcctgctgctgaggacaacaatcaaatgcatcagacgatgtgatgtgcagatttcacgatgctgatatgtgctaagcatggaaacagaattgttctcacatgtatagttggtctaagtgatggcaaaagattgacacttgtggagttttttctgtgccagacatggagtcccttggaaaaaccgaatggtttgggatagcatatatgcatctttgaatatttcactctttactatcatttttcctgtgccagacttgtgtttgcctgttgcttgtctgtctaatgttgcaggtctatcatgggttttattctgcatacgataatacaactctactatatgagatcctgaagtctattaaatgggcaagaaaaacatatgtaaatcgacctgtaaatgttgttggacactccattggaggggatctagcttcattttgtgcccttgatctatttgtaagtatttttaatgtacttgatttattataccaaatttcaatatatgctctacaaataacctgtacttgttttgtgataccatcacatgtattgttaatatatcagatggttggcttcattgatatctctacattttttacatatatcagatggttggcttcattgatatctctacattttttacatgttaaattcggatcataggacgttgagctcatgacttttggacagcctcggttaggcaatcctgcatttgttgtatgccttggctaacaagtcccaagaacaatccatgtgacccataaaaacgatattgtgccgcaattaccaccgtattattattacttaagtaaatggacataccaccacttcgctagagaggtttgacttcatgagagcatagatggaaatgtagttgccagaaatgagattgtatgtgatgattctggtgaggacccgacctatagcagtgggtcatgggatgagcgtagcagataatcttgagtactacagtgtcacactacatgttgactcaaggggaacctgtcagttcgtgattggtacagccaaccaagtatacaactacattcgtgaagttgatggatccatcatcttgttaagatatatatgcaagaaccatgagctctagaatcaatgtgactttgtatgccacgaaatgcacccttgtacaatatttttattttcaatttgtgtacagctcatgaaatactgttgtgtacaactcatgaaatactgggctctccagagggtaaggactaaggagagactcacctttttaaatgcacccctttgaccaagtgacattcgatacattgtaagctccataagattgccgcacaattcaatttgtgtatatcaataacactatgtattaccaagttatgcaagtattaggtggcactccttgtttggccattccatcattttgttgctacatgaggcatttcaag

SEQ ID NO: 218665 - DNA, 2331 bp, Zea Mays
agaacaatgcttattcaacattattatacaatcaagatcctaactttttgggggggttgcaacaatggagagtggagacaacatggagacctgagctgagcttaacccgcaaaagatcatacaccattctgtgatgcttcacaaggttccgcacctcaaattttggtgaaactgccttgttgttgtcttcatatctagcgcactggcatcccatgtagactgcagtttttgtcaaaaatgattttttttgaataagtagacattatatccttcaagatttttatatggaaatcctaaattgtgggcatattgatttttactctatttcttaaatgtaaagttgtaaacttgaatcacctagaaggaaccgtgttaagaagaaataagcaactatgtcttttcttctggaaagataaaatgtgtttatatttgaaagctagaaacatagctttctattatgtcacatcagtctaaaccagaatttaatcattttttataatgcacgtgcaatgagataaaaccaaaacaccttataatttggaatagagacttaacattttgttggctgggacattgggctatattttgcagcctcctcacttggcacagataacttcatttgttttccagagactgtattaatactttgcaggaataaacattgtgtcttgttatccattgcaatatacaacacttaagcccttggctgatagagtgattgtaaagattaactcttccgaggagaagacaactggtggaattttgcttccaacgactgctcagtctagacctcagggtggcaaggtagttgctattggaaaaggaatgataattggggacaataaagttgatgtcaacatttagtaataactataagctctctgtgagccaattcttgagatgatgtccaacatgctcatttaagttgtgcctaagttggtgtcagaaatacgtcaaggaaaaatgtcgaacaactcagaagataaattcaagaactggttgcttcaacaagagtctgtccatgaggatggcatgcaacattacttgcccttcgattgagataggtggctacggtgatgctttgttgaacctgatatacgcatctccatcaagccagttcgaagagctcagtttagaatgtgagctagatgctacaggcaatcattctagagtgaaggatgctcaagttcatggctcacctatacctgagagtaatggaagattatcgacaactgctcagactaaaatgatgtccacagtctcagaagatgcaattcttgttggctcatctttcagataccaaagtagcctaggtaacaacaataagagggttgggctttttgatatgggtgatggaagtagtgagcctgctgctgaggacaacaatcaaatgcatcaggtctatcatgggttttattctgcatacgataatacaactctactatatgagatcctgaagtctattaaatgggcaagaaaaacatatgtaaatcgacctgtaaatgttgttggacactccattggaggggatctagcttcattttgtgcccttgatctatttgacgttgagctcatgacttttggacagcctcggttaggcaatcctgcatttgttgtatgccttggctaacaagtcccaagaacaatccatgtgacccataaaaacgatattgtgccgcaattaccaccgtattattattacttaagtaaatggacataccaccacttcgctagagaggtttgacttcatgagagcatagatggaaatgtagttgccagaaatgagattgtatgtgatgattctggtgaggacccgacctatagcagaagtgggtcatgggatgagcgtagcagataatcttgagtactacagtgtcacactacatgttgactcaaggggaacctgtcagttcgtgattggtacagccaaccaagtatacaactacattcgtgaagttgatggatccatcatcttgttaagatatatatgcaagaaccatgagctctagaatcaatgtgactttgtatgccacgaaatgcacccttgtacaatatttttattttcaatttgtgtacagctcatgaaatactgttgtgtacaactcatgaaatactgggctctccagagggtaaggactaaggagagactcacctttttaaatgcacccctttgaccaagtgacattcgatacattgtaagctccataagattgccgcacaattcaatttgtgtatatcaataacactatgtattaccaagttatgcaagtattaggtggcactccttgtttggccattccatcattttgttgctacatgaggcatttcaag

SEQ ID NO: 218666 - DNA, 1793 bp, Zea Mays
ttctttgccaacattaataactataagctctctgtgagccaattcttgagatgatgtccaacatgctcatttaagttgtgcctaagttggtgtcagaaatacgtcaaggaaaaatgtcgaacaactcagaagataaattcaagaactggttgcttcaacaagagtctgtccatgaggatggcatgcaacattacttgcccttcgattgagataggtggctacggtgatgctttgttgaacctgatatacgcatctccatcaagccagttcgaagagctcagtttagaatgtgagctagatgctacaggcaatcattctagagtgaaggatgctcaagttcatggctcacctatacctgagagtaatggaagattatcgacaactgctcagactaaaatgatgtccacagtctcagaagatgcaattcttgttggctcatctttcagataccaaagtagcctaggtaacaacaataagagggttgggctttttgatatgggtgatggaagtagtgagcctgctgctgaggacaacaatcaaatgcatcagatttcacgatgctgatatgtgctaagcatggaaacagaattgttctcacatgtatagttggtctaagtgatggcaaaagattgacacttgtggagttttttctgtgccagacatggagtcccttggaaaaaccgaatggtttgggatagcatatatgcatctttgaatatttcactctttactatcatttttcctgtgccagacttgtgtttgcctgttgcttgtctgtctaatgttgcaggtctatcatgggttttattctgcatacgataatacaactctactatatgagatcctgaagtctattaaatgggcaagaaaaacatatgtaaatcgacctgtaaatgttgttggacactccattggaggggatctagcttcattttgtgcccttgatctatttgacgttgagctcatgacttttggacagcctcggttaggcaatcctgcatttgttgtatgccttggctaacaagtcccaagaacaatccatgtgacccataaaaacgatattgtgccgcaattaccaccgtattattattacttaagtaaatggacataccaccacttcgctagagaggtttgacttcatgagagcatagatggaaatgtagttgccagaaatgagattgtatgtgatgattctggtgaggacccgacctatagcaggtacatatcagtctatctattttgtacatttatttcctatgtgtgtttcatattatttgtgttttctgaagaagtgggtcatgggatgagcgtagcagataatcttgagtactacagtgtcacactacatgttgactcaaggggaacctgtcagttcgtgattggtacagccaaccaagtatacaactacattcgtgaagttgatggatccatcatcttgttaagatatatatgcaagaaccatgagctctagaatcaatgtgactttgtatgccacgaaatgcacccttgtacaatatttttattttcaatttgtgtacagctcatgaaatactgttgtgtacaactcatgaaatactgggctctccagagggtaaggactaaggagagactcacctttttaaatgcacccctttgaccaagtgacattcgatacattgtaagctccataagattgccgcacaattcaatttgtgtatatcaataacactatgtattaccaagttatgcaagtattaggtggcactccttgtttggccattccatcattttgttgctacatgaggcatttcaag

SEQ ID NO: 218667 - DNA, 1768 bp, Zea Mays
ctttgccaacattaataactataagctctctgtgagccaattcttgagatgatgtccaacatgctcatttaagttgtgcctaagttggtgtcagaaatacgtcaaggaaaaatgtcgaacaactcagaagataaattcaagaactggttgcttcaacaagagtctgtccatgaggatggcatgcaacattacttgcccttcgattgagataggtggctacggtgatgctttgttgaacctgatatacgcatctccatcaagccagttcgaagagctcagtttagaatgtgagctagatgctacaggcaatcattctagagtgaaggatgctcaagttcatggctcacctatacctgagagtaatggaagattatcgacaactgctcagactaaaatgatgtccacagtctcagaagatgcaattcttgttggctcatctttcaggtggaagcgcaagctgacttattttattaccatgaagcctgaagatgtataccaaagtagcctaggtaacaacaataagagggttgggctttttgatatgggtgatggaagtagtgagcctgctgctgaggacaacaatcaaatgcatcagatttcacgatgctgatatgtgctaagcatggaaacagaattgttctcacatgtatagttggtctaagtgatggcaaaagattgacacttgtggagttttttctgtgccagacatggagtcccttggaaaaaccgaatggtttgggatagcatatatgcatctttgaatatttcactctttactatcatttttcctgtgccagacttgtgtttgcctgttgcttgtctgtctaatgttgcaggtctatcatgggttttattctgcatacgataatacaactctactatatgagatcctgaagtctattaaatgggcaagaaaaacatatgtaaatcgacctgtaaatgttgttggacactccattggaggggatctagcttcattttgtgcccttgatctatttgacgttgagctcatgacttttggacagcctcggttaggcaatcctgcatttgttgtatgccttggctaacaagtcccaagaacaatccatgtgacccataaaaacgatattgtgccgcaattaccaccgtattattattacttaagtaaatggacataccaccacttcgctagagaggtttgacttcatgagagcatagatggaaatgtagttgccagaaatgagattgtatgtgatgattctggtgaggacccgacctatagcagaagtgggtcatgggatgagcgtagcagataatcttgagtactacagtgtcacactacatgttgactcaaggggaacctgtcagttcgtgattggtacagccaaccaagtatacaactacattcgtgaagttgatggatccatcatcttgttaagatatatatgcaagaaccatgagctctagaatcaatgtgactttgtatgccacgaaatgcacccttgtacaatatttttattttcaatttgtgtacagctcatgaaatactgttgtgtacaactcatgaaatactgggctctccagagggtaaggactaaggagagactcacctttttaaatgcacccctttgaccaagtgacattcgatacattgtaagctccataagattgccgcacaattcaatttgtgtatatcaataacactatgtattaccaagttatgcaagtattaggtggcactccttgtttggccattccatcattttgttgctacatgaggcatttcaag

SEQ ID NO: 218668 - DNA, 1156 bp, Zea Mays
gacacctgtccacccattcccctcgcctcgccgccgcggacttcccttcccgcacccgcatcaaattcctcttgttccgcggaatttcccttgctaatcctggtatctcctgtcgctaagccactctactccgcctaacccccgctctgagctcaccggactggcggctccgtccggctctctcagcgtgcgcgtgctcgtgaggagggctctttcgaagcgtgtgaatccggtgggcgacgtgaaccagggatggatttcccgggaggaagcgggaggcggccgcagcagcaggagccggagcacctgccgccgatgacgccgctcccgctggcgaggcaggggtcggtgtactctctcacgttcgacgagttccagagctcgctcggcggggccgccaaggacttcggctccatgaacatggacgagctcctccgcagcatctggtccgcggaggaggtacacagcgtcgcggccgccagcgcgtcggcggcggaccacgcccacgccgccgcgcgggggcccgtgtccatccagcaccagggctcgctcaccctcccccgcacgctcagccagaagaccgtcgacgaggtctggcgcgacctcacgtgcgtcggcggaggaccctcctccggctccgccgcgcccgcagcgccgcccccgccggcccagcggcacccgacgctcggggagatcacgctggaggagttcctcgtccgcgcgggcgtggtgcgggaggacatgacggcgccgccgcccgtaccgccggcgccggtgtgcccggctcctgctccgcgcccgccagtgctgtttccccatggcaatgtgttggctcccttggtgcctccactgcaattcgggaatgggttcgtgtcgggggctgtcggtcagcagcgaggtggtcccgtgccccccgcggtatcgcccaggcctgtgacggccagcgcgttcgggaagatggagggagacgacttgtcatccttgtcgccatcaccggtcccgtacattttcggtggtgggttgaggggaaggaagccaccggctatggagaaggtggttgagaggaggcagcgccggatgatcaagaaccgggagtcggccgcgaggtcgcgccaaaggaaacagtatttcgcaataatggtgttaagaattctgt

SEQ ID NO: 218669 - DNA, 1565 bp, Zea Mays
cttcttctccatttgcttttttccctaaagtttctccgtcctggcggctgagggctgctgcttcgtccctggtggcggctgagggctgctgcttcgtccctgatggcgcctgattgcctgggcgcgatccgcccgtgcttcccatagcgtactccgtccctggcgcccccagtgaggtccgtccgtggcgctccgcctcccgtcgtcttccgtcaccacgctctggtcgtatccccgccgtagcgtcgtccagtgctgccctgcagaccgcacatctgtccacctgctgtgtggtttggttccctccatggattctaccaatccgaaccataaagatgacgagttcccatagaattcgaccgcgaacgggacaaattttggttccaatatgtacaaccagctgaagaaaccggttatattatggcaattgagaccttagatttaagtactattgtaatccgtatggttcttgctattaatttctaggcatatgaaacaaataccgatgagcgtgcaattcctatatattaaagctatgtagctagacgcacagccacataggccacgtcgttcaaatttttgtaagccatccgatacaagatcgttggttaccaggcgcgggagcaaaggtagccaaccacacgacgggactcttccagatggagacgaaacaccacatggcgggggaaggaaaagagcgatcagatctcagacgccgtcgtccgtctccgccaagctgcatcgcctcaaacgctttgtcccggccatcacgccggccatggccgccatgtcgaagaaggcgactctccatcccttccgagttccgagttcatgctcccctccgcccctggcatcatgccacgtcccgcggaccgtactatcgcctccacagccgtggtcgctcggccacacgtaccggtcgcttcgcctgccgtcgctgttgcgacagccgtgatacctgccttcatcagcaacacgtcccaaaccgactaagcgtcccgggccaccgcgatacttcatttccgaaatcgctgcggtggcagcagttatgcctgccttgctccaaatatatagcactgtgagacgagtagcaaatcaagttgaagccatcggaaattgtcaaacctcttttttctctctctttttggggtgaagtctatgtgggaacactgaacctgcaaccgagaccgtagcgattcgacaatatcactagaggatcatacttctacttagggatggcaaatttacccgcgggttcggatatccgacccatcgggttcggattcgggtacgtaatttgatccacgggtcttgtccgtacccgacccgtgatacaatcggatcgggtacgggttttatctcttgcccgtgggtacccggtggatattcaaaatttgtgatacagctttttagcccaccaaaaaaatcagcccaatgacctacctcatcagcccacggcgacacgagtgctgggctgctgtcccttagcgcaggtactggcctagctcgtcgcaattatgagtagtgagctagtatgatatgaacgtgaaccatatgcagcgtaa

SEQ ID NO: 218670 - DNA, 882 bp, Zea Mays
ccacgcccgcccgccgcaatccccagtccccaaccgccctccgcaatcccctaccgcccgccgtgatacccgccgccgcggcagccgcccgccgcaacctctgcctagataaggatagggggcgccctcctccctcgatcatccgcacttgtgtagccatcgcgccatctacaccggccaccgccacacgaaggttcgtctctggccttgcggcttgcgacctcgaggtgaccgagcccgcgggctccatgacgacaacggtgacgccggaggcaaagatggcggcgcagcagcaggcccccgcgtcgcgctcctcctcccgacctcgccgtcgagtccctattcccgccggacctcgatatcttcgcaggccgctggaccccgccggggcgggtgaccgatgcagtgcgctctcgatccgtgcagagcgcaggtggttggatggccgcccgtgcgcaactaccggaagaataccctcgccgccgcgaccgcctccaggagcaaggcgccgacggaggaggccgcatccggagctgggcccatgtacgtgaaggtgagcatggatggcgcgccctacctcaggaaggtggacatcaagatgtactccagctacgaggacctctccctggcgctcgagaagatgttcagctgcttcatcgctggtcaaagtggtctgcataaatcatcgagcaaagacagactgactaatggctcaaaggtggatgccctcaaagatcaggagtatgtccttacatatgaggataaggatgcagactggatgcttgtcggtgatcttccctgggaattaccttcagagttggaggagctcaccattagggcggttcttttgcctaccgacaaagaggaacggcggtggcctca

SEQ ID NO: 218671 - DNA, 2269 bp, Zea Mays
aaaaattgttatttttctaccatgcgaagaggaggctgaggcaatcagagcacaaggtgtcacagagacccggttggaactactgaagggtataagtggttcgtttaggccaggagtccttactgctcttatgggtgtcagtggtgctggcaagacaacactgatggatgtgttggctgggaggaagaccagtggatacattgtgggcaacattaccatatcaggttacccgaagaaacaagaaacttttgctcgtgtgtcaggatactgtgagcaaaatgatatccactcaccaaatgttaccgtctatgaatcccttgcattctccgcatggctcagattacctgctgatgttgattcctcaacaagaaagatgtttattgatgaggttatggagcttgtggagcttttacccttaaaagatgcattggtaggattgcctggtgtcagtggactatcaacagaacaaaggaaaaggctaaccatagctgttgagcttgttgctaatccttctataattttcatggatgaaccgacatctggacttgatgctcgagcagcagctattgtcatgagggcaataaggaatactgtggacacaggaagaacggttgtttgtaccattcaccaaccaagtatagatatatttgaatcttttgatgagctcttccttatgaaacgtggaggtgaagagatttatgtaggcccactagggatgcattcatgtgaactggtcaaatattttgagggcatcgaaggtgtcaacaagataaaagatggctacaacccctcgacatggatgctggaagtgactagtacaatgcaagagcagataactggtattaacttcagtgaagtatacaagaattcagaactgcacaggaggaataaaactttgataaaggagctaagcacgcctccagaaggttcaagtgacctatcctttccaaccgaatactcacaggctttcctcacacagtgtttggcttgcctgtggaagcaaagcatgtcatattggagaaaccctccatatactggtgtcaaatacttctacacgacagtgattgccctgttgtttggaacaatgttctggggtgtgggcagaaaaagggatagtcaacaggacctgttcaatgccattggttccatgtatgcctcggttattttcatgggagtacagaattctggttcagttcagccagttgtatcggttgagcgaacagtcttttacagggaaagggcggctcatatgtactcgccattgccgtatgccttgggacaggtcgtaatcgaactcccatacatctttgttcagtccttaatatatggcgtgctggtgtatgctatgatcgggtttgaatggacagctgacaagttcttttggtacctcttcttcatgtatttcaccctagcatactacacgttctacgggatgatggtggttggcctgactccgaactacaacgtctcctccgttgcttccacggcgttctatgccatttggaacctcttctcgggattcttaataccaagaactagaattccagtctggtggagatggttctactggatttgccccatcgcatggacgctcaacgggctggtcacttcacagtttggagatgtaaccgagacgttcagtgacggtggggtgcgtatatctgacttcgttgaggactactttgggtaccatcacgacttgctgtgggtggtcgctgtggtggtggtcgcgtttcctgtgctctttgccttgctctttggcctctcgctcaagatattcaacttccaaaagaggtaaataaaatgtgagacagcttgattaatcccaaggcgaaaatagcgcaggcgttgcggaagaaagtggggctgtattgtatgtaaatagcgtattcgttgatcagagcttctcaagctccagacaaattgtgtagctgatagaggatcttgtacctgttggtgtaaaattagccgataatgcccaatttctacgatgtgatgaagttcagcttttgcaaagttttgtacatattggcacacactggctgttcgctgcaacactccaacgatgctctgaaatgatggatgtgtttcctcacagtagaaaatatggcgaccccaatagacctaagctgtgttgatcacgatgataacacatgtagtaattagatgtccatgttgaagtgtataaaaggattggataccttctctcatcaatttaaacttttggtttgaactgatcagtgtatctactctaacatgatatcaaatc

SEQ ID NO: 218672 - DNA, 4607 bp, Zea Mays
tcaagcctaatctaagccacaaatcaaggtttcagggcatcgcaaatgctcttcacatcacaccaagtaggaaacagaaaatatcgattcttcataatgtcagcggcattatcaagccgcacagaatgacactgcttttgggtcctcctggcgccgggaaaacctcactgctgctggccttagctggaacactaccttcaagccttaaagtaacagggaatataacttacaatgggcacacaatggacgagtttgaggcccggagatcagctgcttatgtcagccaacatgatctacacatgggagaactgactgttcgtgagacagtcaatttctctgcaagatgtcaaggaagtggtcatcgctatgacttgctagttgaattgtcaaggagagaaaaggacgcaggaatcatacctgataaagaaactgatacctacatgaaggctgctgctacaggagaccaaaaggctgatgtggtcacaaatcacattctaaaggtcttggggttggatgtctgtgctgacacaatcgttggaaacaatatgttgagaggcatatctggaggccagaaaaagcgagtaactacagctgagatgcttgtcaccccaggacgagctgttttcatggatgagatatcaactggacttgacagctcaacaaccttccagattgtgaactctatccgggaaaccattcacattgttggcggaacagcagttattgctttgctacaacctgcacctgagacatatgacctgtttgatgatataatcctcctgtcagatagtcaggttgtctacagtggtcctcgtgaatatgtccttgagttctttgagtcagttggcttcaaatgccctcagcggaaaggtgtagccgacttcctgcaggaagttacatcaaagaaagatcagagacaatactggaaacatggtgatgacacctaccgatacgtccccgtgaaggagtttgcagaagcatttcaatcgttccatgttggtgaggctatacgaaatgagttggctgtcccattcgacaagagtacgagccatcctgctgctctgaaaacatcaagatatggcgccagcgtgaaagagctacttaaagcaaatatcgacagagagatattactaataaaaagaaattcctttgtatacatattcaaggcagttcagctaacactcatggcactcattacgatgaccgtctttctccggaccaatatgcatcgtgactcaatatcagatggaaggatatacatgggtgccctgttctttggggtcctgatggtcatgttcaatggactggcagaagttggcctaactattgcaaagctcccagttttcttcaagcaaagggatcttctcttctaccctgcatggacatactccttaccatcatggatcattaagactcccctctccttgctcaatgtaacaatttgggttttcataacatactatgttattggatttgatcccaacgtagaaagactttttagacagttcctgctcctcttactaatgaacgaggcatcatcaggattgttccgtttcattgctgggcttgcaaggcatcaggttgttgcaagcacccttggttcattcggcattctgatatgtatgcttttgggtggattcctcctggcaagagagaatgtgaagaaatggtggatttgggggtactggatatcacccctgatgtatgcacaaaacgccatatcagtaaatgaattcctgggtagcagctggaataagcaagtaatccccggttcagcagaaccgcttggaaaactagttctagaatctcgtggactttttcctgaggcaaagtggtactggattggtgttggtgccttgcttggatatgtgctgctattcaatatactctacacaatctgcctcacattcctcaaaccatttgacagcaatcaaccgacaatttctgaggaggcattaaagataaaacacgcaaatctaactggtgaagttttagaagcatcatcgagaggacgggttgccagcactacaacaacaggtactttggacgagagcaatgatgaagcagcttccaaccatgcaacagtaaattctagtccagtcaacaaaggaatggtcctcccttttgtacctctctccatcacttttgatgatataagatacagtgtggacatgccagagcacgccgtagatgttggagctcgattgcgacagcaagcagcaggtcgccatgggacgagcatcagcgctgaggacctcggctaccgctgcacgccggagctcggctggggaggaagaccagcacagaggagcgaaggccctctactgctactgtggagctacgccggagaggacgaagaccagcaccgacgacctcaggcaatcagagcacaaggtgtcacagagacccggttggaactactgaagggtataagtggttcgtttaggccaggagtccttactgctcttatgggtgtcagtggtgctggcaagacaacactgatggatgtgttggctgggaggaagaccagtggatacattgtgggcaacattaccatatcaggttacccgaagaaacaagaaacttttgctcgtgtgtcaggatactgtgagcaaaatgatatccactcaccaaatgttaccgtctatgaatcccttgcattctccgcatggctcagattacctgctgatgttgattcctcaacaagaaagatgtttattgatgaggttatggagcttgtggagcttttacccttaaaagatgcattggtaggattgcctggtgtcagtggactatcaacagaacaaaggaaaaggctaaccatagctgttgagcttgttgctaatccttctataattttcatggatgaaccgacatctggacttgatgctcgagcagcagctattgtcatgagggcaataaggaatactgtggacacaggaagaacggttgtttgtaccattcaccaaccaagtatagatatatttgaatcttttgatgagctcttccttatgaaacgtggaggtgaagagatttatgtaggcccactagggatgcattcatgtgaactggtcaaatattttgagggcatcgaaggtgtcaacaagataaaagatggctacaacccctcgacatggatgctggaagtgactagtacaatgcaagagcagataactggtattaacttcagtgaagtatacaagaattcagaactgcacaggaggaataaaactttgataaaggagctaagcacgcctccagaaggttcaagtgacctatcctttccaaccgaatactcacaggctttcctcacacagtgtttggcttgcctgtggaagcaaagcatgtcatattggagaaaccctccatatactggtgtcaaatacttctacacgacagtgattgccctgttgtttggaacaatgttctggggtgtgggcagaaaaagggatagtcaacaggacctgttcaatgccattggttccatgtatgcctcggttattttcatgggagtacagaattctggttcagttcagccagttgtatcggttgagcgaacagtcttttacagggaaagggcggctcatatgtactcgccattgccgtatgccttgggacaggtcgtaatcgaactcccatacatctttgttcagtccttaatatatggcgtgctggtgtatgctatgatcgggtttgaatggacagctgacaagttcttttggtacctcttcttcatgtatttcaccctagcatactacacgttctacgggatgatggtggttggcctgactccgaactacaacgtctcctccgttgcttccacggcgttctatgccatttggaacctcttctcgggattcttaataccaagaactagaattccagtctggtggagatggttctactggatttgccccatcgcatggacgctcaacgggctggtcacttcacagtttggagatgtaaccgagacgttcagtgacggtggggtgcgtatatctgacttcgttgaggactactttgggtaccatcacgacttgctgtgggtggtcgctgtggtggtggtcgcgtttcctgtgctctttgccttgctctttggcctctcgctcaagatattcaacttccaaaagaggtaaataaaatgtgagacagcttgattaatcccaaggcgaaaatagcgcaggcgttgcggaagaaagtggggctgtattgtatgtaaatagcgtattcgttgatcagagcttctcaagctccagacaaattgtgtagctgatagaggatcttgtacctgttggtgtaaaattagccgataatgcccaatttctacgatgtgatgaagttcagcttttgcaaagttttgtacatattggcacacactggctgttcgctgcaacactccaacgatgctctgaaatgatggatgtgtttcctcacagtagaaaatatggcgaccccaatagacctaagctgtgttgatcacgatgataacacatgtagtaattagatgtccatgttgaagtgtataaaaggattggataccttctctcatcaatttaaacttttggtttgaactgatcagtgtatctactctaacatgatatcaaatc

SEQ ID NO: 218673 - DNA, 5052 bp, Zea Mays
cactcacctctatcgttcttgcacagacaaagttgtgggagtccctttctcctcacggcgccccgccccgctatataatctgatgcgacacgagcgcagcagtccacgacgaggcgtaatgacctgctactcgtctaccggttccgtagtgtgaggattaaggagggaacctctccaacttcgagccccgtcttcttattgccttcccggcctggcggtggcggcatggacgacgccggggagatacacgcgctggggagcctgcggcgggacggatcggtgtggtcggccgcgagcgacaccgtcttctcctcgctgtcgtcgcgcgcggacggcggcgtcgacgacgaggaggccctgcggtgggcggcgcttgagaagctgccgacctacgaccgcgcgaggacggccgtgctcgccatgcccgagggcgacctccgccacgtgaacgtgcagaagctcgacccgcaggagcgccacgcgctgctgcagcgcctcgcctgggtcggcgacgaccaccagcgcttcctctccaagttcaaggaccgcgtcgaccgggtggggattgatctgcccaagatcgaagtgcggtaccagaacctgaacgtcgaggcagaggcgtacgtcggcagtagggggctgcccaccatcctcaacacatacgccaacgtgctcgagggcatcgcaaatgctcttcacatcacaccaagtaggaaacagaaaatatcgattcttcataatgtcagcggcattatcaagccgcacagaatgacactgcttttgggtcctcctggcgccgggaaaacctcactgctgctggccttagctggaacactaccttcaagccttaaagtaacagggaatataacttacaatgggcacacaatggacgagtttgaggcccggagatcagctgcttatgtcagccaacatgatctacacatgggagaactgactgttcgtgagacagtcaatttctctgcaagatgtcaaggaagtggtcatcgctatgacttgctagttgaattgtcaaggagagaaaaggacgcaggaatcatacctgataaagaaactgatacctacatgaaggctgctgctacaggagaccaaaaggctgatgtggtcacaaatcacattctaaaggtcttggggttggatgtctgtgctgacacaatcgttggaaacaatatgttgagaggcatatctggaggccagaaaaagcgagtaactacagctgagatgcttgtcaccccaggacgagctgttttcatggatgagatatcaactggacttgacagctcaacaaccttccagattgtgaactctatccgggaaaccattcacattgttggcggaacagcagttattgctttgctacaacctgcacctgagacatatgacctgtttgatgatataatcctcctgtcagatagtcaggttgtctacagtggtcctcgtgaatatgtccttgagttctttgagtcagttggcttcaaatgccctcagcggaaaggtgtagccgacttcctgcaggaagttacatcaaagaaagatcagagacaatactggaaacatggtgatgacacctaccgatacgtccccgtgaaggagtttgcagaagcatttcaatcgttccatgttggtgaggctatacgaaatgagttggctgtcccattcgacaagagtacgagccatcctgctgctctgaaaacatcaagatatggcgccagcgtgaaagagctacttaaagcaaatatcgacagagagatattactaataaaaagaaattcctttgtatacatattcaaggcagttcagctaacactcatggcactcattacgatgaccgtctttctccggaccaatatgcatcgtgactcaatatcagatggaaggatatacatgggtgccctgttctttggggtcctgatggtcatgttcaatggactggcagaagttggcctaactattgcaaagctcccagttttcttcaagcaaagggatcttctcttctaccctgcatggacatactccttaccatcatggatcattaagactcccctctccttgctcaatgtaacaatttgggttttcataacatactatgttattggatttgatcccaacgtagaaagactttttagacagttcctgctcctcttactaatgaacgaggcatcatcaggattgttccgtttcattgctgggcttgcaaggcatcaggttgttgcaagcacccttggttcattcggcattctgatatgtatgcttttgggtggattcctcctggcaagagagaatgtgaagaaatggtggatttgggggtactggatatcacccctgatgtatgcacaaaacgccatatcagtaaatgaattcctgggtagcagctggaataagcaagtaatccccggttcagcagaaccgcttggaaaactagttctagaatctcgtggactttttcctgaggcaaagtggtactggattggtgttggtgccttgcttggatatgtgctgctattcaatatactctacacaatctgcctcacattcctcaaaccatttgacagcaatcaaccgacaatttctgaggaggcattaaagataaaacacgcaaatctaactggtgaagttttagaagcatcatcgagaggacgggttgccagcactacaacaacaggtactttggacgagagcaatgatgaagcagcttccaaccatgcaacagtaaattctagtccagtcaacaaaggaatggtcctcccttttgtacctctctccatcacttttgatgatataagatacagtgtggacatgccagaggcaatcagagcacaaggtgtcacagagacccggttggaactactgaagggtataagtggttcgtttaggccaggagtccttactgctcttatgggtgtcagtggtgctggcaagacaacactgatggatgtgttggctgggaggaagaccagtggatacattgtgggcaacattaccatatcaggttacccgaagaaacaagaaacttttgctcgtgtgtcaggatactgtgagcaaaatgatatccactcaccaaatgttaccgtctatgaatcccttgcattctccgcatggctcagattacctgctgatgttgattcctcaacaagaaagatgtttattgatgaggttatggagcttgtggagcttttacccttaaaagatgcattggtaggattgcctggtgtcagtggactatcaacagaacaaaggaaaaggctaaccatagctgttgagcttgttgctaatccttctataattttcatggatgaaccgacatctggacttgatgctcgagcagcagctattgtcatgagggcaataaggaatactgtggacacaggaagaacggttgtttgtaccattcaccaaccaagtatagatatatttgaatcttttgatgagctcttccttatgaaacgtggaggtgaagagatttatgtaggcccactagggatgcattcatgtgaactggtcaaatattttgagggcatcgaaggtgtcaacaagataaaagatggctacaacccctcgacatggatgctggaagtgactagtacaatgcaagagcagataactggtattaacttcagtgaagtatacaagaattcagaactgcacaggaggaataaaactttgataaaggagctaagcacgcctccagaaggttcaagtgacctatcctttccaaccgaatactcacaggctttcctcacacagtgtttggcttgcctgtggaagcaaagcatgtcatattggagaaaccctccatatactggtgtcaaatacttctacacgacagtgattgccctgttgtttggaacaatgttctggggtgtgggcagaaaaagggatagtcaacaggacctgttcaatgccattggttccatgtatgcctcggttattttcatgggagtacagaattctggttcagttcagccagttgtatcggttgagcgaacagtcttttacagggaaagggcggctcatatgtactcgccattgccgtatgccttgggacaggtcgtaatcgaactcccatacatctttgttcagtccttaatatatggcgtgctggtgtatgctatgatcgggtttgaatggacagctgacaagttcttttggtacctcttcttcatgtatttcaccctagcatactacacgttctacgggatgatggtggttggcctgactccgaactacaacgtctcctccgttgcttccacggcgttctatgccatttggaacctcttctcgggattcttaataccaagaactagaattccagtctggtggagatggttctactggatttgccccatcgcatggacgctcaacgggctggtcacttcacagtttggagatgtaaccgagacgttcagtgacggtggggtgcgtatatctgacttcgttgaggactactttgggtaccatcacgacttgctgtgggtggtcgctgtggtggtggtcgcgtttcctgtgctctttgccttgctctttggcctctcgctcaagatattcaacttccaaaagaggtaaataaaatgtgagacagcttgattaatcccaaggcgaaaatagcgcaggcgttgcggaagaaagtggggctgtattgtatgtaaatagcgtattcgttgatcagagcttctcaagctccagacaaattgtgtagctgatagaggatcttgtacctgttggtgtaaaattagccgataatgcccaatttctacgatgtgatgaagttcagcttttgcaaagttttgtacatattggcacacactggctgttcgctgcaacactccaacgatgctctgaaatgatggatgtgtttcctcacagtagaaaatatggcgaccccaatagacctaagctgtgttgatcacgatgataacacatgtagtaattagatgtccatgttgaagtgtataaaaggattggataccttctctcatcaatttaaacttttggtttgaactgatcagtgtatctactctaacatgatatcaaatc

SEQ ID NO: 218674 - DNA, 3239 bp, Zea Mays
cccagatatcactcgtggagacgaagaagcgtatgtcggtgaggttcacggggacaccgttcttccactcaatggtcgcgagagcacaggctgccgccgacaccgacgtttgcgtcctcgtcgacgccgagatcgtccttcttcccgaaattgtcaacgcgttggatcgtttcagcaaggttgatggcgactggttcctcgtttctctgtcacgtaacgtcaccgatccccgttaccagctcgctgacagtggaagccattgggtacaagcagacggcaaagaagtgagctttacggaggtaccttttcgtctatctaaaaccaatgctacacaagctgacaagcattctctgtaactgttgaccaattaatatctgtctgcattagctgcaggagattccagctgagtggtcatcatcggagggctctgacagagggctgattatggcgtggaacaatccaagcagtgctttacacgcaggagttctgccttcttttctgtatggaagaggagcacagaattggtggctggctcacgaggttctgtcctctgagatgaggcttttctttgatgcaagcagtctggttcttggactgtatcctgagagcattagcgccatgcagcatgtcatggcctcgagtaagaatggcaggttaccttctgtatcctgggagtacggcgtcaatcaccatcttgctgcggtttatggctcgtattgctgtcgatcaccagcgagacgctttcctatgctgcatagagtggtaaagcaatctgaagattatatgctcagcaaagttgacacactcgtatcatcagatttcttcatcagtaaacaaggaaatgcccatggagtagatagcctacggaagaaacaaaacgtttctctatctggatatctacacggttgttcttccgagacctcagcgcctgaccttccatattctttgagcatgctactcgatcttgtcgctgatgagaatggttccgttgtccttggcgtggctggaaaaagctacagggacatgctcatgagttgggcatgccgcctgcgtcgtcttagagttaccaatttcttagtatgtgccttagaccatgagacatatgagttctcaatcttacaggggttgccagttttcagagacccattgtcaccaacaaatgtcagctttgacgactgccactttggaacgaagtgttttcaacaagtgacaaaagtgaagtcgcggattgtccttgagatactaagactgggatacaatgtgctgctgagtgacgttgatgtttattggtttggcaatccgatgccactcctgtactctcttggtcttgctacattcggagcacaatctgatgaatacaatgagacaggaccaataaacttgccacgccgactgaactcaggattctactttgctcgctcagacaacgccaccatcattgcaatggagatgatagtaaaacacgcagccagttcaggcctatctgagcagccgagtttctacgatgtcttgtgtggggagaacggaacaaaccggatcggtgaagacagatgcttggagcccaacacgaacctgaccgttgtgttcttggatcgggacttgttccccaatggtgcctacaagggtctatgggagaagcgtgatgtacgagcaacctgcaaagagcttggctgtttcatcattcacaacaactggataaacaagaggagaaaaaaggtccaccggcaaatggtatctgggctgtgggactacgatcctacctctaggcagtgcttgcaggaatggagtgctcagaatgatggggcaattccatttgtttgaggacactgacagttagtagactggttaacttacctcatcccctgttattaaattcgaatattatgtgagggattgatcaatactttcattcgacttcttgcaatcacaatctaaaattgctaattggacattgtgtttgccacaaccgttgtgcgactccaataaaaccaggtttctgtaatttccagaacagaataagtaatccagcactcagttcagagccaacagcttcgtttggtttttagttgagcatctcgacggttcgccgccggctcagaggaaaacatggcatcgtttcacaaaacatggcggtgtgaaagaaaaagatgggagtccagatttcatttgtagtttcccacacaaaatgacaaaacactagccatctgctgcttgcagctcattggagcaggaaaaacacataggatcgttaatcatctgtctaataacggcataaaggtttctggtcgcaaaaggttgacaacttattacagttctgcattgtggagaaacaagatctcacttcatcttcgcttcggtaaacagaacatgcttgttcacacggggatcatactttctaaactcaagcttctcggtgatgcgacgaggattcttgcgcttcacgtagaagaatccagtgccggctgcagaaaccagcctgatgaagatcgaggcacgctttgccttccccatcagtgactatgaatttgtagcagaaggaactggaagccgagcagccgaggtcgagcagatctgcagcaggtgccgacgcgaccgagcagcactgcagcaggggccgagcactggagcagccgagcaccaggaagacgagcaggggacggtcgtacggggatcagatggagggctggaggaagagtggatgacgagcgcccgacccgaggaagaggagcaggggacggctggacggggatccaccggtcgctcgccttcttcctcaacccgccgctggactgcgtcgcctgcccgccgggcgcgctcctccaggagaacaagcaggtcggcggcccgcgcgcgttcggaggaagacgagcgcccgaggaagacgacgagcaggggccaggggacggccttccggtcgacggacggacggagcgcactgcgcagcgcaccaaagcagccgccacccgcaaggcaacagccaaacagaagctagggttagccggtgtcggtccgattgattggaatggatgaggaaatgaggatcagggtattccacgctgagacatttgagacactgaggtaacggtcccatctgtcatatcgggcctcgacgggtagcgggtatgggcggcgataaaccgtacccagccccgccatcctgatggggggattggtttttgcccatatctttttccgcgggagtattatcacctggcaatggatgaattacctgcccgaag

SEQ ID NO: 218675 - DNA, 3986 bp, Zea Mays
ggtccctgtctgtctccctttggcggccacggcacgagaggcggaggaggcacaaatacgtttcaggattccaggattccaccgttggcgctggcgtaaaccctgcctctccctatcccccaagtccgcggcgcccagctgcccctgcctcctcctaccgccgccgtttcgctccattcgcctcccggaggccgccgaatgcccgcgcccagcgccacccgccctcaaacctagactagacgtgtgcctcgcccgcgccgtgcggtctggtccaagacggcgccctgcgggctcggctgctgcggcgggggagcgaggggagggggcgggaggctgaggcggctcgtggggtccatggcagtggccggattggcgccctcaccggcgcccgcgctgctccggaggttcccgtgctctgcgcctccctgggcgccctcgcccttccgcccccgccgcccccgccgcggccgctccatgatgtcgccgttcactggcgccagaaggcaggagtactcccatagctcagtccttggaattcaagacaaccgagctcttaagcttccagtatgtgtcaactttaatctgcaaaacggcggcgcacaagaatgggctgacgagagcaggaggttatcattaagcaaagccggcaatagtaatggttccactcatctagggtctggtattttccatcatgaacccttggaagatttcaagagctccaaccaatctctattgcacagtgtaagacaaagaatggcaccaaattctcttgcgaataggcacgtcaacacggaattggcaaagcatcatgcgattaagcatgctgcagttgctgtgtcagcactgaccagtgttgttaatgatgaccttaaatcagtgaagaggcctaaggaatctgaagtggaggttcattggtctaatggccccaagtttcattctcatattccgaaaatctctgaagttgaaacaagcctgcgatttgatgaaaatgctacagatggctatgctaaagatgtgaatgaatgctcacctgaggagacagtacaaccctctcgaactagagcgccctcatcccaggagtctctagatgcacggaaggcactcagtaccatatatgacaaagttctggtggttgacaatgtcatgtcagctaggagtgttgttcaactgcttactacgaagtacagaaattatattcatgcatgtgacacagaggtagctaatattaatgttaaacaagagacaccagttggccatggaaaggtcacatgctttagcatttactctggcactaaaggtgctgaggctgattttggaaatggcaagacatgcatttgggtggatgtgctagatggtggaccagatgtactcatggagtttgtcccattttttgaggattcatcaatcaggaaggtttggcacaactatagttttgatagtcatgttatagagaactatggaattaaagttgctggatttcatgctgatacaatgcatcttgcacgactttgggattcttcaagaagaacagatggaggatattctcttgagggacttacaaatgatcatagggtcatgggtgttgttccaaaggaattacaaaagattgggaagagatcaatgaaaaccatctttggtcggaaaaaaataaagaaggatgggtcagaagggaagattactgcaattgagcctgttgaaattttacaaagagaagacagagaattgtggatctgctattcttcgttagattccatgagtaccttgaggctttatgagagcttgaaaagcaagcttgaaaggaagccctggacttttgacggttaccccagacccggaggttcattgtacgatttctacgaggagtattggtgtcctttcggtgctattcttgtaaaaatggaaacagctggaatgcttgttgaccgtgcttacctttcagagattgaaaaggttgctgttgcacagcgcgaatcagctgcagataaatttcggaagtgggcatctaagtattgccctgatgcaaaatacatgaatgttaatagtgacactcagattcgacaactcttcttcggtggtatagagaacatatacaaatctggtgattttttgccgaagagtaaagctattaaagtgcctaacaatgaaactgctgtttcagaaggcaagaaggttccaaagtatcgcacaattgaccttttcagcattgtggaagacctgaaaactgatatatttactgcaagtggttggccttcagttagtggggctgcattgagaaatttggctgggaaggttccatcagatcttgtttactcaacagatgatgtaaatgatgatgaatgtggtattcattctgaaatttcccattgtgatctagaagacacctcttcttatggtactgcatatgatgcatttgggggaggaaaggaaggaaaagaagcatgccatgccattgcagctttgtgtgagatctgttctattaactcgttaatatccaacttcattcttcctctacagggaaatcatatatcatgtaaggaagggcggattcactgttccttaaatatcaacacagagacaggacgtttatcggcaagggcaccaaatttacaggataggtataaaatccgccaagcttttgttgcagctccagggaacactcttattgttgctgattatggtcagctggaactcaggatcttggcgcatcttgctgattgcaaaagcatgttagatgcttttaaagctggcggcgacttccattccaggacagccatgaacatgtatcagcatattcgtgaggctgttgaagaagagaaagtaattcttgagtggcatcctcaacccggtcaagagaaacctcctgtgccgttgttgaaggatgcttttggtgctgagaggaggaaagctaagatgctaaatttctccattgcatatgggaaaacggctcatgggcttgctcgtgattggaaggtttctgttaaggaagcaaaagatacactgaaactctggtatagcgatagaaaggaagttctggcttggcaaatgaagcagaaacagctagcacatgagaagcgtgaagtttatactttgcttgggcgatcacgccgttttccaaatatggctcatgcaacttctggccaaaggggtcacattgagcgtgctgctatcaatgctcctgtacagggcagtgcagctgatgttgctatgtgtgcaatgcttgagatagacaggaatactcgtcttaaggagcttggttggacgctactcttgcaggtgcatgatgaagtgatactggaagggccttcagagtctgcggagctggccaagtccatagttgttgagtgcatgtctaagcccttctatggcaccaatatcctgaaggtcgaccttgctgttgatgccaagtgtgcacagaattggtatgcggccaaatagacctgttaagtgtcccagaagggcgtcaattccttcggtgaaactcggtggattttgaactggtatctgctggctgctgctagtagcctagtgagctcatctccacgtggatgccatgcactgattatttcgctgttgatctggacagtgaggggtcagcactgagcagcgaaggcactgtacactattccgtattccctataggtcgggtagcttcaccttccacactccctgttaggatctctcgatcattcatgcctgatgtagttggtcgtcctggatagcagtgaagactaagcatgccgtgttcataagatttatttagcatgctgatgtgttgagttgctgaccagttctgctgacgtctaacactgttgcacgcactgcaacaatgttttgatcacaagagaatgtagttgattgtgagcgttcttaatctccttatttctgctgttgaactgtgcgtcttgttaattgtatcttctctaagcattgtccgcacggcagggtgccagggttgggcaaatgtttcagttcgtcataaacttaag

SEQ ID NO: 218676 - DNA, 3799 bp, Zea Mays
gttcaatgctccttccggtgacgatgataaaacatttgactagatagaggtttgcactttggtttgctcgatggtgtgttgatattctggtgattactgtcgtgtcgtgggaaccttgcgtgtcgtgttctgacttgatgctagtaatgtaatctctatatatgaaccaatcagggggatgagtgagccaaatattgtctgttctgtaatttgcctctgcacccatagcccgcaggatggagctattgctttttggtggtggtgtttttgctgaacttcaatggctgattgccaggcaggagtactcccatagctcagtccttggaattcaagacaaccgagctcttaagcttccagtatgtgtcaactttaatctgcaaaacggcggcgcacaagaatgggctgacgagagcaggaggttatcattaagcaaagccggcaatagtaatggttccactcatctagggtctggtattttccatcatgaacccttggaagatttcaagagctccaaccaatctctattgcacagtgtaagacaaagaatggcaccaaattctcttgcgaataggcacgtcaacacggaattggcaaagcatcatgcgattaagcatgctgcagttgctgtgtcagcactgaccagtgttgttaatgatgaccttaaatcagtgaagaggcctaaggaatctgaagtggaggttcattggtctaatggccccaagtttcattctcatattccgaaaatctctgaagttgaaacaagcctgcgatttgatgaaaatgctacagatggctatgctaaagatgtgaatgaatgctcacctgaggagacagtacaaccctctcgaactagagcgccctcatcccaggagtctctagatgcacggaaggcactcagtaccatatatgacaaagttctggtggttgacaatgtcatgtcagctaggagtgttgttcaactgcttactacgaagtacagaaattatattcatgcatgtgacacagaggtagctaatattaatgttaaacaagagacaccagttggccatggaaaggtcacatgctttagcatttactctggcactaaaggtgctgaggctgattttggaaatggcaagacatgcatttgggtggatgtgctagatggtggaccagatgtactcatggagtttgtcccattttttgaggattcatcaatcaggaaggtttggcacaactatagttttgatagtcatgttatagagaactatggaattaaagttgctggatttcatgctgatacaatgcatcttgcacgactttgggattcttcaagaagaacagatggaggatattctcttgagggacttacaaatgatcatagggtcatgggtgttgttccaaaggaattacaaaagattgggaagagatcaatgaaaaccatctttggtcggaaaaaaataaagaaggatgggtcagaagggaagattactgcaattgagcctgttgaaattttacaaagagaagacagagaattgtggatctgctattcttcgttagattccatgagtaccttgaggctttatgagagcttgaaaagcaagcttgaaaggaagccctggacttttgacggttaccccagacccggaggttcattgtacgatttctacgaggagtattggtgtcctttcggtgctattcttgtaaaaatggaaacagctggaatgcttgttgaccgtgcttacctttcagagattgaaaaggttgctgttgcacagcgcgaatcagctgcagataaatttcggaagtgggcatctaagtattgccctgatgcaaaatacatgaatgttaatagtgacactcagattcgacaactcttcttcggtggtatagagaacatatacaaatctggtgattttttgccgaagagtaaagctattaaagtgcctaacaatgaaactgctgtttcagaaggcaagaaggttccaaagtatcgcacaattgaccttttcagcattgtggaagacctgaaaactgatatatttactgcaagtggttggccttcagttagtggggctgcattgagaaatttggctgggaaggttccatcagatcttgtttactcaacagatgatgtaaatgatgatgaatgtggtattcattctgaaatttcccattgtgatctagaagacacctcttcttatggtactgcatatgatgcatttgggggaggaaaggaaggaaaagaagcatgccatgccattgcagctttgtgtgagatctgttctattaactcgttaatatccaacttcattcttcctctacagggaaatcatatatcatgtaaggaagggcggattcactgttccttaaatatcaacacagagacaggacgtttatcggcaagggcaccaaatttacagaaccaacctgcacttgaaaaggataggtataaaatccgccaagcttttgttgcagctccagggaacactcttattgttgctgattatggtcagctggaactcaggatcttggcgcatcttgctgattgcaaaagcatgttagatgcttttaaagctggcggcgacttccattccaggacagccatgaacatgtatcagcatattcgtgaggctgttgaagaagagaaagtaattcttgagtggcatcctcaacccggtcaagagaaacctcctgtgccgttgttgaaggatgcttttggtgctgagaggaggaaagctaagatgctaaatttctccattgcatatgggaaaacggctcatgggcttgctcgtgattggaaggtttctgttaaggaagcaaaagatacactgaaactctggtatagcgatagaaaggaagttctggcttggcaaatgaagcagaaacagctagcacatgagaagcgtgaagtttatactttgcttgggcgatcacgccgttttccaaatatggctcatgcaacttctggccaaaggggtcacattgagcgtgctgctatcaatgctcctgtacagggcagtgcagctgatgttgctatgtgtgcaatgcttgagatagacaggaatactcgtcttaaggagcttggttggacgctactcttgcaggtgcatgatgaagtgatactggaagggccttcagagtctgcggagctggccaagtccatagttgttgagtgcatgtctaagcccttctatggcaccaatatcctgaaggtcgaccttgctgttgatgccaagtgtgcacagaattggtatgcggccaaatagacctgttaagtgtcccagaagggcgtcaattccttcggtgaaactcggtggattttgaactggtatctgctggctgctgctagtagcctagtgagctcatctccacgtggatgccatgcactgattatttcgctgttgatctggacagtgaggggtcagcactgagcagcgaaggcactgtacactattccgtattccctataggtcgggtagcttcaccttccacactccctgttaggatctctcgatcattcatgcctgatgtagttggtcgtcctggatagcagtgaagactaagcatgccgtgttcataagatttatttagcatgctgatgtgttgagttgctgaccagttctgctgacgtctaacactgttgcacgcactgcaacaatgttttgatcacaagagaatgtagttgattgtgagcgttcttaatctccttatttctgctgttgaactgtgcgtcttgttaattgtatcttctctaagcattgtccgcacggcagggtgccagggttgggcaaatgtttcagttcgtcataaacttaag

SEQ ID NO: 218677 - DNA, 3492 bp, Zea Mays
atggagctattgctttttggtggtggtgtttttgctgaacttcaatggctgattgccaggcaggagtactcccatagctcagtccttggaattcaagacaaccgagctcttaagcttccagtatgtgtcaactttaatctgcaaaacggcggcgcacaagaatgggctgacgagagcaggaggttatcattaagcaaagccggcaatagtaatggttccactcatctagggtctggtattttccatcatgaacccttggaagatttcaagagctccaaccaatctctattgcacagtgtaagacaaagaatggcaccaaattctcttgcgaataggcacgtcaacacggaattggcaaagcatcatgcgattaagcatgctgcagttgctgtgtcagcactgaccagtgttgttaatgatgaccttaaatcagtgaagaggcctaaggaatctgaagtggaggttcattggtctaatggccccaagtttcattctcatattccgaaaatctctgaagttgaaacaagcctgcgatttgatgaaaatgctacagatggctatgctaaagatgtgaatgaatgctcacctgaggagacagtacaaccctctcgaactagagcgccctcatcccaggagtctctagatgcacggaaggcactcagtaccatatatgacaaagttctggtggttgacaatgtcatgtcagctaggagtgttgttcaactgcttactacgaagtacagaaattatattcatgcatgtgacacagaggtagctaatattaatgttaaacaagagacaccagttggccatggaaaggtcacatgctttagcatttactctggcactaaaggtgctgaggctgattttggaaatggcaagacatgcatttgggtggatgtgctagatggtggaccagatgtactcatggagtttgtcccattttttgaggattcatcaatcaggaaggtttggcacaactatagttttgatagtcatgttatagagaactatggaattaaagttgctggatttcatgctgatacaatgcatcttgcacgactttgggattcttcaagaagaacagatggaggatattctcttgagggacttacaaatgatcatagggtcatgggtgttgttccaaaggaattacaaaagattgggaagagatcaatgaaaaccatctttggtcggaaaaaaataaagaaggatgggtcagaagggaagattactgcaattgagcctgttgaaattttacaaagagaagacagagaattgtggatctgctattcttcgttagattccatgagtaccttgaggctttatgagagcttgaaaagcaagcttgaaaggaagccctggacttttgacggttaccccagacccggaggttcattgtacgatttctacgaggagtattggtgtcctttcggtgctattcttgtaaaaatggaaacagctggaatgcttgttgaccgtgcttacctttcagagattgaaaaggttgctgttgcacagcgcgaatcagctgcagataaatttcggaagtgggcatctaagtattgccctgatgcaaaatacatgaatgttaatagtgacactcagattcgacaactcttcttcggtggtatagagaacataaggcaagaaggttccaaagtatcgcacaattgaccttttcagcattgtggaagacctgaaaactgatatatttactgcaagtggttggccttcagttagtggggctgcattgagaaatttggctgggaaggttccatcagatcttgtttactcaacagatgatgtaaatgatgatgaatgtggtattcattctgaaatttcccattgtgatctagaagacacctcttcttatggtactgcatatgatgcatttgggggaggaaaggaaggaaaagaagcatgccatgccattgcagctttgtgtgagatctgttctattaactcgttaatatccaacttcattcttcctctacagggaaatcatatatcatgtaaggaagggcggattcactgttccttaaatatcaacacagagacaggacgtttatcggcaagggcaccaaatttacagaaccaacctgcacttgaaaaggataggtataaaatccgccaagcttttgttgcagctccagggaacactcttattgttgctgattatggtcagctggaactcaggatcttggcgcatcttgctgattgcaaaagcatgttagatgcttttaaagctggcggcgacttccattccaggacagccatgaacatgtatcagcatattcgtgaggctgttgaagaagagaaagtaattcttgagtggcatcctcaacccggtcaagagaaacctcctgtgccgttgttgaaggatgcttttggtgctgagaggaggaaagctaagatgctaaatttctccattgcatatgggaaaacggctcatgggcttgctcgtgattggaaggtttctgttaaggaagcaaaagatacactgaaactctggtatagcgatagaaaggaagttctggcttggcaaatgaagcagaaacagctagcacatgagaagcgtgaagtttatactttgcttgggcgatcacgccgttttccaaatatggctcatgcaacttctggccaaaggggtcacattgagcgtgctgctatcaatgctcctgtacagggcagtgcagctgatgttgctatgtgtgcaatgcttgagatagacaggaatactcgtcttaaggagcttggttggacgctactcttgcaggtgcatgatgaagtgatactggaagggccttcagagtctgcggagctggccaagtccatagttgttgagtgcatgtctaagcccttctatggcaccaatatcctgaaggtcgaccttgctgttgatgccaagtgtgcacagaattggtatgcggccaaatagacctgttaagtgtcccagaagggcgtcaattccttcggtgaaactcggtggattttgaactggtatctgctggctgctgctagtagcctagtgagctcatctccacgtggatgccatgcactgattatttcgctgttgatctggacagtgaggggtcagcactgagcagcgaaggcactgtacactattccgtattccctataggtcgggtagcttcaccttccacactccctgttaggatctctcgatcattcatgcctgatgtagttggtcgtcctggatagcagtgaagactaagcatgccgtgttcataagatttatttagcatgctgatgtgttgagttgctgaccagttctgctgacgtctaacactgttgcacgcactgcaacaatgttttgatcacaagagaatgtagttgattgtgagcgttcttaatctccttatttctgctgttgaactgtgcgtcttgttaattgtatcttctctaagcattgtccgcacggcagggtgccagggttgggcaaatgtttcagttcgtcataaacttaag

SEQ ID NO: 218678 - DNA, 3520 bp, Zea Mays
atggagctattgctttttggtggtggtgtttttgctgaacttcaatggctgattgccaggcaggagtactcccatagctcagtccttggaattcaagacaaccgagctcttaagcttccagtatgtgtcaactttaatctgcaaaacggcggcgcacaagaatgggctgacgagagcaggaggttatcattaagcaaagccggcaatagtaatggttccactcatctagggtctggtattttccatcatgaacccttggaagatttcaagagctccaaccaatctctattgcacagtgtaagacaaagaatggcaccaaattctcttgcgaataggcacgtcaacacggaattggcaaagcatcatgcgattaagcatgctgcagttgctgtgtcagcactgaccagtgttgttaatgatgaccttaaatcagtgaagaggcctaaggaatctgaagtggaggttcattggtctaatggccccaagtttcattctcatattccgaaaatctctgaagttgaaacaagcctgcgatttgatgaaaatgctacagatggctatgctaaagatgtgaatgaatgctcacctgaggagacagtacaaccctctcgaactagagcgccctcatcccaggagtctctagatgcacggaaggcactcagtaccatatatgacaaagttctggtggttgacaatgtcatgtcagctaggagtgttgttcaactgcttactacgaagtacagaaattatattcatgcatgtgacacagaggtagctaatattaatgttaaacaagagacaccagttggccatggaaaggtcacatgctttagcatttactctggcactaaaggtgctgaggctgattttggaaatggcaagacatgcatttgggtggatgtgctagatggtggaccagatgtactcatggagtttgtcccattttttgaggattcatcaatcaggaaggtttggcacaactatagttttgatagtcatgttatagagaactatggaattaaagttgctggatttcatgctgatacaatgcatcttgcacgactttgggattcttcaagaagaacagatggaggatattctcttgagggacttacaaatgatcatagggtcatgggtgttgttccaaaggaattacaaaagattgggaagagatcaatgaaaaccatctttggtcggaaaaaaataaagaaggatgggtcagaagggaagattactgcaattgagcctgttgaaattttacaaagagaagacagagaattgtggatctgctattcttcgttagattccatgagtaccttgaggctttatgagagcttgaaaagcaagcttgaaaggaagccctggacttttgacggttaccccagacccggaggttcattgtacgatttctacgaggagtattggtgtcctttcggtgctattcttgtaaaaatggaaacagctggaatgcttgttgaccgtgcttacctttcagagattgaaaaggttgctgttgcacagcgcgaatcagctgcagataaatttcggaagtgggcatctaagtattgccctgatgcaaaatacatgaatgttaatagtgacactcagattcgacaactcttcttcggtggtatagagaacatatacaaatctggtgattttttgccgaagagtaaagctattaaagtgcctaacaatgaaactgctgtttcagaaggcaagaaggttccaaagtatcgcacaattgaccttttcagcattgtggaagacctgaaaactgatatatttactgcaagtggttggccttcagttagtggggctgcattgagaaatttggctgggaaggttccatcagatcttgtttactcaacagatgatgtaaatgatgatgaatgtggtattcattctgaaatttcccattgtgatctagaagacacctcttcttatggtactgcatatgatgcatttgggggaggaaaggaaggaaaagaagcatgccatgccattgcagctttgtgtgagatctgttctattaactcgttaatatccaacttcattcttcctctacagggaaatcatatatcatgtaaggaagggcggattcactgttccttaaatatcaacacagagacaggacgtttatcggcaagggcaccaaatttacagcttttgttgcagctccagggaacactcttattgttgctgattatggtcagctggaactcaggatcttggcgcatcttgctgattgcaaaagcatgttagatgcttttaaagctggcggcgacttccattccaggacagccatgaacatgtatcagcatattcgtgaggctgttgaagaagagaaagtaattcttgagtggcatcctcaacccggtcaagagaaacctcctgtgccgttgttgaaggatgcttttggtgctgagaggaggaaagctaagatgctaaatttctccattgcatatgggaaaacggctcatgggcttgctcgtgattggaaggtttctgttaaggaagcaaaagatacactgaaactctggtatagcgatagaaaggaagttctggcttggcaaatgaagcagaaacagctagcacatgagaagcgtgaagtttatactttgcttgggcgatcacgccgttttccaaatatggctcatgcaacttctggccaaaggggtcacattgagcgtgctgctatcaatgctcctgtacagggcagtgcagctgatgttgctatgtgtgcaatgcttgagatagacaggaatactcgtcttaaggagcttggttggacgctactcttgcaggtgcatgatgaagtgatactggaagggccttcagagtctgcggagctggccaagtccatagttgttgagtgcatgtctaagcccttctatggcaccaatatcctgaaggtcgaccttgctgttgatgccaagtgtgcacagaattggtatgcggccaaatagacctgttaagtgtcccagaagggcgtcaattccttcggtgaaactcggtggattttgaactggtatctgctggctgctgctagtagcctagtgagctcatctccacgtggatgccatgcactgattatttcgctgttgatctggacagtgaggggtcagcactgagcagcgaaggcactgtacactattccgtattccctataggtcgggtagcttcaccttccacactccctgttaggatctctcgatcattcatgcctgatgtagttggtcgtcctggatagcagtgaagactaagcatgccgtgttcataagatttatttagcatgctgatgtgttgagttgctgaccagttctgctgacgtctaacactgttgcacgcactgcaacaatgttttgatcacaagagaatgtagttgattgtgagcgttcttaatctccttatttctgctgttgaactgtgcgtcttgttaattgtatcttctctaagcattgtccgcacggcagggtgccagggttgggcaaatgtttcagttcgtcataaacttaag

SEQ ID NO: 218679 - DNA, 3537 bp, Zea Mays
atggagctattgctttttggtggtggtgtttttgctgaacttcaatggctgattgccaggcaggagtactcccatagctcagtccttggaattcaagacaaccgagctcttaagcttccagtatgtgtcaactttaatctgcaaaacggcggcgcacaagaatgggctgacgagagcaggaggttatcattaagcaaagccggcaatagtaatggttccactcatctagggtctggtattttccatcatgaacccttggaagatttcaagagctccaaccaatctctattgcacagtgtaagacaaagaatggcaccaaattctcttgcgaataggcacgtcaacacggaattggcaaagcatcatgcgattaagcatgctgcagttgctgtgtcagcactgaccagtgttgttaatgatgaccttaaatcagtgaagaggcctaaggaatctgaagtggaggttcattggtctaatggccccaagtttcattctcatattccgaaaatctctgaagttgaaacaagcctgcgatttgatgaaaatgctacagatggctatgctaaagatgtgaatgaatgctcacctgaggagacagtacaaccctctcgaactagagcgccctcatcccaggagtctctagatgcacggaaggcactcagtaccatatatgacaaagttctggtggttgacaatgtcatgtcagctaggagtgttgttcaactgcttactacgaagtacagaaattatattcatgcatgtgacacagaggtagctaatattaatgttaaacaagagacaccagttggccatggaaaggtcacatgctttagcatttactctggcactaaaggtgctgaggctgattttggaaatggcaagacatgcatttgggtggatgtgctagatggtggaccagatgtactcatggagtttgtcccattttttgaggattcatcaatcaggaaggtttggcacaactatagttttgatagtcatgttatagagaactatggaattaaagttgctggatttcatgctgatacaatgcatcttgcacgactttgggattcttcaagaagaacagatggaggatattctcttgagggacttacaaatgatcatagggtcatgggtgttgttccaaaggaattacaaaagattgggaagagatcaatgaaaaccatctttggtcggaaaaaaataaagaaggatgggtcagaagggaagattactgcaattgagcctgttgaaattttacaaagagaagacagagaattgtggatctgctattcttcgttagattccatgagtaccttgaggctttatgagagcttgaaaagcaagcttgaaaggaagccctggacttttgacggttaccccagacccggaggttcattgtacgatttctacgaggagtattggtgtcctttcggtgctattcttgtaaaaatggaaacagctggaatgcttgttgaccgtgcttacctttcagagattgaaaaggttgctgttgcacagcgcgaatcagctgcagataaatttcggaagtgggcatctaagtattgccctgatgcaaaatacatgaatgttaatagtgacactcagattcgacaactcttcttcggtggtatagagaacatatacaaatctggtgattttttgccgaagagtaaagctattaaagtgcctaacaatgaaactgctgtttcagaaggcaagaaggttccaaagtatcgcacaattgaccttttcagcattgtggaagacctgaaaactgatatatttactgcaagtggttggccttcagttagtggggctgcattgagaaatttggctgggaaggttccatcagatcttgtttactcaacagatgatgtaaatgatgatgaatgtggtattcattctgaaatttcccattgtgatctagaagacacctcttcttatggtactgcatatgatgcatttgggggaggaaaggaaggaaaagaagcatgccatgccattgcagctttgtgtgagatctgttctattaactcgttaatatccaacttcattcttcctctacagggaaatcatatatcatgtaaggaagggcggattcactgttccttaaatatcaacacagagacaggacgtttatcggcaagggcaccaaatttacaggtataaaatccgccaagcttttgttgcagctccagggaacactcttattgttgctgattatggtcagctggaactcaggatcttggcgcatcttgctgattgcaaaagcatgttagatgcttttaaagctggcggcgacttccattccaggacagccatgaacatgtatcagcatattcgtgaggctgttgaagaagagaaagtaattcttgagtggcatcctcaacccggtcaagagaaacctcctgtgccgttgttgaaggatgcttttggtgctgagaggaggaaagctaagatgctaaatttctccattgcatatgggaaaacggctcatgggcttgctcgtgattggaaggtttctgttaaggaagcaaaagatacactgaaactctggtatagcgatagaaaggaagttctggcttggcaaatgaagcagaaacagctagcacatgagaagcgtgaagtttatactttgcttgggcgatcacgccgttttccaaatatggctcatgcaacttctggccaaaggggtcacattgagcgtgctgctatcaatgctcctgtacagggcagtgcagctgatgttgctatgtgtgcaatgcttgagatagacaggaatactcgtcttaaggagcttggttggacgctactcttgcaggtgcatgatgaagtgatactggaagggccttcagagtctgcggagctggccaagtccatagttgttgagtgcatgtctaagcccttctatggcaccaatatcctgaaggtcgaccttgctgttgatgccaagtgtgcacagaattggtatgcggccaaatagacctgttaagtgtcccagaagggcgtcaattccttcggtgaaactcggtggattttgaactggtatctgctggctgctgctagtagcctagtgagctcatctccacgtggatgccatgcactgattatttcgctgttgatctggacagtgaggggtcagcactgagcagcgaaggcactgtacactattccgtattccctataggtcgggtagcttcaccttccacactccctgttaggatctctcgatcattcatgcctgatgtagttggtcgtcctggatagcagtgaagactaagcatgccgtgttcataagatttatttagcatgctgatgtgttgagttgctgaccagttctgctgacgtctaacactgttgcacgcactgcaacaatgttttgatcacaagagaatgtagttgattgtgagcgttcttaatctccttatttctgctgttgaactgtgcgtcttgttaattgtatcttctctaagcattgtccgcacggcagggtgccagggttgggcaaatgtttcagttcgtcataaacttaag

SEQ ID NO: 218680 - DNA, 3453 bp, Zea Mays
atggagctattgctttttggtggtggtgtttttgctgaacttcaatggctgattgccaggcaggagtactcccatagctcagtccttggaattcaagacaaccgagctcttaagcttccagtatgtgtcaactttaatctgcaaaacggcggcgcacaagaatgggctgacgagagcaggaggttatcattaagcaaagccggcaatagtaatggttccactcatctagggtctggtattttccatcatgaacccttggaagatttcaagagctccaaccaatctctattgcacagtgtaagacaaagaatggcaccaaattctcttgcgaataggcacgtcaacacggaattggcaaagcatcatgcgattaagcatgctgcagttgctgtgtcagcactgaccagtgttgttaatgatgaccttaaatcagtgaagaggcctaaggaatctgaagtggaggttcattggtctaatggccccaagtttcattctcatattccgaaaatctctgaagttgaaacaagcctgcgatttgatgaaaatgctacagatggctatgctaaagatgtgaatgaatgctcacctgaggagacagtacaaccctctcgaactagagcgccctcatcccaggagtctctagatgcacggaaggcactcagtaccatatatgacaaagttctggtggttgacaatgtcatgtcagctaggagtgttgttcaactgcttactacgaagtacagaaattatattcatgcatgtgacacagaggtagctaatattaatgttaaacaagagacaccagttggccatggaaaggtcacatgctttagcatttactctggcactaaaggtgctgaggctgattttggaaatggcaagacatgcatttgggtggatgtgctagatggtggaccagatgtactcatggagtttgtcccattttttgaggattcatcaatcaggaagaagaacagatggaggatattctcttgagggacttacaaatgatcatagggtcatgggtgttgttccaaaggaattacaaaagattgggaagagatcaatgaaaaccatctttggtcggaaaaaaataaagaaggatgggtcagaagggaagattactgcaattgagcctgttgaaattttacaaagagaagacagagaattgtggatctgctattcttcgttagattccatgagtaccttgaggctttatgagagcttgaaaagcaagcttgaaaggaagccctggacttttgacggttaccccagacccggaggttcattgtacgatttctacgaggagtattggtgtcctttcggtgctattcttgtaaaaatggaaacagctggaatgcttgttgaccgtgcttacctttcagagattgaaaaggttgctgttgcacagcgcgaatcagctgcagataaatttcggaagtgggcatctaagtattgccctgatgcaaaatacatgaatgttaatagtgacactcagattcgacaactcttcttcggtggtatagagaacatatacaaatctggtgattttttgccgaagagtaaagctattaaagtgcctaacaatgaaactgctgtttcagaaggcaagaaggttccaaagtatcgcacaattgaccttttcagcattgtggaagacctgaaaactgatatatttactgcaagtggttggccttcagttagtggggctgcattgagaaatttggctgggaaggttccatcagatcttgtttactcaacagatgatgtaaatgatgatgaatgtggtattcattctgaaatttcccattgtgatctagaagacacctcttcttatggtactgcatatgatgcatttgggggaggaaaggaaggaaaagaagcatgccatgccattgcagctttgtgtgagatctgttctattaactcgttaatatccaacttcattcttcctctacagggaaatcatatatcatgtaaggaagggcggattcactgttccttaaatatcaacacagagacaggacgtttatcggcaagggcaccaaatttacagaaccaacctgcacttgaaaaggataggtataaaatccgccaagcttttgttgcagctccagggaacactcttattgttgctgattatggtcagctggaactcaggatcttggcgcatcttgctgattgcaaaagcatgttagatgcttttaaagctggcggcgacttccattccaggacagccatgaacatgtatcagcatattcgtgaggctgttgaagaagagaaagtaattcttgagtggcatcctcaacccggtcaagagaaacctcctgtgccgttgttgaaggatgcttttggtgctgagaggaggaaagctaagatgctaaatttctccattgcatatgggaaaacggctcatgggcttgctcgtgattggaaggtttctgttaaggaagcaaaagatacactgaaactctggtatagcgatagaaaggaagttctggcttggcaaatgaagcagaaacagctagcacatgagaagcgtgaagtttatactttgcttgggcgatcacgccgttttccaaatatggctcatgcaacttctggccaaaggggtcacattgagcgtgctgctatcaatgctcctgtacagggcagtgcagctgatgttgctatgtgtgcaatgcttgagatagacaggaatactcgtcttaaggagcttggttggacgctactcttgcaggtgcatgatgaagtgatactggaagggccttcagagtctgcggagctggccaagtccatagttgttgagtgcatgtctaagcccttctatggcaccaatatcctgaaggtcgaccttgctgttgatgccaagtgtgcacagaattggtatgcggccaaatagacctgttaagtgtcccagaagggcgtcaattccttcggtgaaactcggtggattttgaactggtatctgctggctgctgctagtagcctagtgagctcatctccacgtggatgccatgcactgattatttcgctgttgatctggacagtgaggggtcagcactgagcagcgaaggcactgtacactattccgtattccctataggtcgggtagcttcaccttccacactccctgttaggatctctcgatcattcatgcctgatgtagttggtcgtcctggatagcagtgaagactaagcatgccgtgttcataagatttatttagcatgctgatgtgttgagttgctgaccagttctgctgacgtctaacactgttgcacgcactgcaacaatgttttgatcacaagagaatgtagttgattgtgagcgttcttaatctccttatttctgctgttgaactgtgcgtcttgttaattgtatcttctctaagcattgtccgcacggcagggtgccagggttgggcaaatgtttcagttcgtcataaacttaag

SEQ ID NO: 218681 - DNA, 3508 bp, Zea Mays
atggagctattgctttttggtggtggtgtttttgctgaacttcaatggctgattgccaggcaggagtactcccatagctcagtccttggaattcaagacaaccgagctcttaagcttccagtatgtgtcaactttaatctgcaaaacggcggcgcacaagaatgggctgacgagagcaggaggttatcattaagcaaagccggcaatagtaatggttccactcatctagggtctggtattttccatcatgaacccttggaagatttcaagagctccaaccaatctctattgcacagtgtaagacaaagaatggcaccaaattctcttgcgaataggcacgtcaacacggaattggcaaagcatcatgcgattaagcatgctgcagttgctgtgtcagcactgaccagtgttgttaatgatgaccttaaatcagtgaagaggcctaaggaatctgaagtggaggttcattggtctaatggccccaagtttcattctcatattccgaaaatctctgaagttgaaacaagcctgcgatttgatgaaaatgctacagatggctatgctaaagatgtgaatgaatgctcacctgaggagacagtacaaccctctcgaactagagcgccctcatcccaggagtctctagatgcacggaaggcactcagtaccatatatgacaaagttctggtggttgacaatgtcatgtcagctaggagtgttgttcaactgcttactacgaagtacagaaattatattcatgcatgtgacacagaggtagctaatattaatgttaaacaagagacaccagttggccatggaaaggtcacatgctttagcatttactctggcactaaaggtgctgaggctgattttggaaatggcaagacatgcatttgggtggatgtgctagatggtggaccagatgtactcatggagtttgtcccattttttgaggattcatcaatcaggaaggtttggcacaactatagttttgatagtcatgttatagagaactatggaattaaagttgctggatttcatgctgatacaatgcatcttgcacgactttgggattcttcaagaagaacagatggaggatattctcttgagggacttacaaatgatcatagggtcatgggtgttgttccaaaggaattacaaaagattgggaagagatcaatgaaaaccatctttggtcggaaaaaaataaagaaggatgggtcagaagggaagattactgcaattgagcctgttgaaattttacaaagagaagacagagaattgtggatctgctattcttcgttagattccatgagtaccttgaggctttatgagagcttgaaaagcaagcttgaaaggaagccctggacttttgacggttaccccagacccggaggttcattgtacgatttctacgaggagtattggtgtcctttcggtgctattcttgtaaaaatggaaacagctggaatgcttgttgaccgtgcttacctttcagagattgaaaaggttgctgttgcacagcgcgaatcagctgcagataaatttcggaagtgggcatctaagtattgccctgatgcaaaatacatgaatgttaatagtgacactcagattcgacaactcttcttcggtggtatagagaacatatacaaatctggtgattttttgccgaagagtaaagctattaaagtgcctaacaatgaaactgctgtttcagaaggcaagaaggttccaaagtatcgcacaattgaccttttcagcattgtggaagacctgaaaactgatatatttactgcaagtggttggccttcagttagtggggctgcattgagaaatttggctgggaaggttccatcagatcttgtttactcaacagatgatgtaaatgatgatgaatgtggtattcattctgaaatttcccattgtgatctagaagacacctcttcttatggtactgcatatgatgcatttgggggaggaaaggaaggaaaagaagcatgccatgccattgcagctttgtgtgagatctgttctattaactcgttaatatccaacttcattcttcctctacagggaaatcatatatcatgtaaggaagggcggattcactgttccttaaatatcaacacagagacaggacgtttatcggcaagggcaccaaatttacagctccagggaacactcttattgttgctgattatggtcagctggaactcaggatcttggcgcatcttgctgattgcaaaagcatgttagatgcttttaaagctggcggcgacttccattccaggacagccatgaacatgtatcagcatattcgtgaggctgttgaagaagagaaagtaattcttgagtggcatcctcaacccggtcaagagaaacctcctgtgccgttgttgaaggatgcttttggtgctgagaggaggaaagctaagatgctaaatttctccattgcatatgggaaaacggctcatgggcttgctcgtgattggaaggtttctgttaaggaagcaaaagatacactgaaactctggtatagcgatagaaaggaagttctggcttggcaaatgaagcagaaacagctagcacatgagaagcgtgaagtttatactttgcttgggcgatcacgccgttttccaaatatggctcatgcaacttctggccaaaggggtcacattgagcgtgctgctatcaatgctcctgtacagggcagtgcagctgatgttgctatgtgtgcaatgcttgagatagacaggaatactcgtcttaaggagcttggttggacgctactcttgcaggtgcatgatgaagtgatactggaagggccttcagagtctgcggagctggccaagtccatagttgttgagtgcatgtctaagcccttctatggcaccaatatcctgaaggtcgaccttgctgttgatgccaagtgtgcacagaattggtatgcggccaaatagacctgttaagtgtcccagaagggcgtcaattccttcggtgaaactcggtggattttgaactggtatctgctggctgctgctagtagcctagtgagctcatctccacgtggatgccatgcactgattatttcgctgttgatctggacagtgaggggtcagcactgagcagcgaaggcactgtacactattccgtattccctataggtcgggtagcttcaccttccacactccctgttaggatctctcgatcattcatgcctgatgtagttggtcgtcctggatagcagtgaagactaagcatgccgtgttcataagatttatttagcatgctgatgtgttgagttgctgaccagttctgctgacgtctaacactgttgcacgcactgcaacaatgttttgatcacaagagaatgtagttgattgtgagcgttcttaatctccttatttctgctgttgaactgtgcgtcttgttaattgtatcttctctaagcattgtccgcacggcagggtgccagggttgggcaaatgtttcagttcgtcataaacttaag

SEQ ID NO: 218682 - DNA, 3155 bp, Zea Mays
gcgtgcggttatctcctcctgtcgccgcctccacttccaccatcccaagtgctccctctcccgtccctcagtccgctactccgctgccggtgctgcatcagttaggtcagcggcggcgccgctgatcaggtcaggtggtgcccaggccgttcacggaccgagccctcccgtcctcgtccgacgcgagggcaatcacccacacgggacgccttccgaagcgacacccctcctcctctggccaacgtcccagcaacaacgagaatggtagttaactgtttaaagaggaatgcgctctgcttcgcatctgtgtccatgggcgcaagtataataatgacgccatatcaactgtacagagctggctgatgagatatggatcaactgcttccaagacaagctcgccttcagacatgatgaggagcgaagtaactgaagctgcaaagctactgaacctgtggaatgaatgggggttacagatcctggtccttgtaagcttcgggttacaagtattcctcctcgttttcggaggagtccgccgtcatagcaactccactgcccttgcgttctccctctggtcggcatacgtactggccgattccacagcgacatacaccctgggccacctatctgttgacagtaggtcaaacgagcaccagctggtggtgttctgggcgccgttcccactgctgcacctcggtggcccagacaacatcacagcgtatgcactcgaggacaacgcgctctggctacgccatctgcaaattctcgccgtgcaggtcctaggagctgcttatgtgatatacaagtacatctccagcagcgggaaattgcttttgctggcctccttgtccatgttctttgtcggtattctcaagtatggcgagaggatatgggctctcaagtgtggcaacatcagcagcatccgcagcagcatcagcatccggaaggtcaagactgacccttatcagttattgactttgggtactagcgaagaggatttgctgcttggagcccactcccagttcgatatctgcaaaggtgtcttcgccgatatcataatgctaccgaatcccttagttcgttcacaacctaaaccacgttccgtgatatcttatctgggagaggatctatacaagttggtcgagatggagctgtctctgatgtatgacttcctgtacaccaaggcagcagtgatccacacatcgtatggcttctgcatccatttcatctcgctgtttggcacagccaccacattccttttgtttcagctcagtatcagcagcagtggaaatcggtacagcagagtggatgtggctatcagttatgttttactggtaggggctttggtcctggaaatcatatcagtgtgcagagctgtactatccacctggacatgttctttgttgcaccgcaggggcaggggatgggagtggtgtctccacattatcacttcccttggtcagcgtgtccatccagcaagcaggagactctggtcgggctcccttgggcagtacaacttgttccacttgtgcacccgcaacaccaacgagatagggagcagactagcaatgaaattggggctcgaggactggtggaacatgatgcacttctcaggcactttcccacacactaactcgtctttgtcaatacaagatatcaagaaattggttctgcaagcactgcgaagcaaagagcaagcactgcaacaccaggatactgatttgaactcaagaggcagctttatactgaaacgtatggaggcctacaaggactttgctcgctggagcgtcaacattgacttcgacgagagcatccttgtttggcacattgcaaccgaggtgttcatcaggaaatccaaggccaaacatgcaaaagaactccttgaggctactgaggtactatccaattacttgatgttcttgctggtggtaaaacctaacatgctaccaggcgctgcacggcataacatacatctcacctcctgcgaacaactagaaggacactgccgaacacgatttggtgataaggacagtccattggcgccatcccctgtaagctggaacctgtgctatattattaaggaattgttccaccatgatggccccagttgctccaggatcccacggagggagaagcttgcagaggtggcgtggagtttctcccaatttgcactggtatagcttccctgaccattcaactgaaaaacatttcgttggtaatttatgtttgaagatatagaacatcttaaacaggtttttgttctaattttactaacagaaccagcacatgcatatattcagagctgcaccaaaaaggcagttccaaactgattttcttcgagtggaatttcattcatagtggaccatctgaattttatttcttgactttgtttttttattttttagatagaccttggtctaacaaagtgcatactaaagttcagggtgcagtagttttatgtaattgtccttatttgtctcagggatcagtaaaggcaccaaatccacacgggaactccatccgtgacagtgctaatatgtatgcaatcttgctcgccaacgagcttatgagcatagagttgcggtggcaagatcagcgtgacactttggaactgatcctgggggtgtgggtggagatgttgttgtatgctgctgaccattgcagccaagagtcccatgccaggcagctcagtaatggctgcgaattcatcaccatcgtgtcgttgctggcacaccacttcaagtactactctggggccttcagggacgccgcaacctaggtgaagataaacccgcaagtgaaaataaccccgttactgtaaataatcccatgagtgaaaattgtgcaaacttggtttagatgagttcgcacaattttcatttgaaatgacctctctgtcagttcaggggaaaaacctgaggattcatgactccaaacaagagtaaatatatttatctgtagatgaacatagtaattaaagtgctaggattcatcaaggttagctttggactctccattcaacagtttgtaaggtgagtctggctggctgtgtgtgggtgtgacattgttagactacccgtctagggtttgtgttattcccttgtaatgaccgttataccccctgtgtaatgggcctggcccagttactcactctatta

SEQ ID NO: 218683 - DNA, 2888 bp, Zea Mays
gcgtgcggttatctcctcctgtcgccgcctccacttccaccatcccaagtgctccctctcccgtccctcagtccgctactccgctgccggtgctgcatcagttaggtcagcggcggcgccgctgatcaggtcaggtggtgcccaggccgttcacggaccgagccctcccgtcctcgtccgacgcgagggcaatcacccacacgggacgccttccgaagcgacacccctcctcctctggccaacgtcccagcaacaacgagaatggtagttaactgtttaaagaggaatgcgctctgcttcgcatctgtgtccatgggcgcaagtataataatgacgccatatcaactgtacagagctggctgatgagatatggatcaactgcttccaagacaagctcgccttcagacatgatgaggagcgaagtaactgaagctgcaaagctactgaacctgtggaatgaatgggggttacagatcctggtccttgtaagcttcgggttacaagtattcctcctcgttttcggaggagtccgccgtcatagcaactccactgcccttgcgttctccctctggtcggcatacgtactggccgattccacagcgacatacaccctgggccacctatctgttgacagtaggtcaaacgagcaccagctggtggtgttctgggcgccgttcccactgctgcacctcggtggcccagacaacatcacagcgtatgcactcgaggacaacgcgctctggctacgccatctgcaaattctcgccgtgcaggtcctaggagctgcttatgtgatatacaagtacatctccagcagcgggaaattgcttttgctggcctccttgtccatgttctttgtcggtattctcaagtatggcgagaggatatgggctctcaagtgtggcaacatcagcagcatccgcagcagcatcagcatccggaaggtcaagactgacccttatcagttattgactttgggtactagcgaagaggatttgctgcttggagcccactcccagttcgatatctgcaaaggtgtcttcgccgatatcataatgctaccgaatcccttagttcgttcacaacctaaaccacgttccgtgatatcttatctgggagaggatctatacaagttggtcgagatggagctgtctctgatgtatgacttcctgtacaccaaggcagcagtgatccacacatcgtatggcttctgcatccatttcatctcgctgtttggcacagccaccacattccttttgtttcagctcagtatcagcagcagtggaaatcggtacagcagagtggatgtggctatcagttatgttttactggtaggggctttggtcctggaaatcatatcagtgtgcagagctgtactatccacctggacatgttctttgttgcaccgcaggggcaggggatgggagtggtgtctccacattatcacttcccttggtcagcgtgtccatccagcaagcaggagactctggtcgggctcccttgggcagtacaacttgttccacttgtgcacccgcaacaccaacgagatagggagcagactagcaatgaaattggggctcgaggactggtggaacatgatgcacttctcaggcactttcccacacactaactcgtctttgtcaatacaagatatcaagaaattggttctgcaagcactgcgaagcaaagagcaagcactgcaacaccaggatactgatttgaactcaagaggcagctttatactgaaacgtatggaggcctacaaggactttgctcgctggagcgtcaacattgacttcgacgagagcatccttgtttggcacattgcaaccgaggtgttcatcaggaaatccaaggccaaacatgcaaaagaactccttgaggctactgaggtactatccaattacttgatgttcttgctggtggtaaaacctaacatgctaccaggcgctgcacggcataacatacatctcacctcctgcgaacaactagaaggacactgccgaacacgatttggtgataaggacagtccattggcgccatcccctgtaagctggaacctgtgctatattattaaggaattgttccaccatgatggccccagttgctccaggatcccacggagggagaagcttgcagaggtggcgtggagtttctcccaatttgcactggtatagcttccctgaccattcaactgaaaaacatttcgttgggatcagtaaaggcaccaaatccacacgggaactccatccgtgacagtgctaatatgtatgcaatcttgctcgccaacgagcttatgagcatagagttgcggtggcaagatcagcgtgacactttggaactgatcctgggggtgtgggtggagatgttgttgtatgctgctgaccattgcagccaagagtcccatgccaggcagctcagtaatggctgcgaattcatcaccatcgtgtcgttgctggcacaccacttcaagtactactctggggccttcagggacgccgcaacctaggtgaagataaacccgcaagtgaaaataaccccgttactgtaaataatcccatgagtgaaaattgtgcaaacttggtttagatgagttcgcacaattttcatttgaaatgacctctctgtcagttcaggggaaaaacctgaggattcatgactccaaacaagagtaaatatatttatctgtagatgaacatagtaattaaagtgctaggattcatcaaggttagctttggactctccattcaacagtttgtaaggtgagtctggctggctgtgtgtgggtgtgacattgttagactacccgtctagggtttgtgttattcccttgtaatgaccgttataccccctgtgtaatgggcctggcccagttactcactctatta

SEQ ID NO: 218684 - DNA, 4603 bp, Zea Mays
cccactacttgttgtacttaattaggagctgcgaagctttctttcggcaaggaagggcgggagtagcttggaagggagagactacatatagtacaaagcgaagcggcaaccaccgccgatcgagatttcttcaataatcttcagtcccttccccccgcaccccacttgttatatccacgagcgcgagctgcgcgcgatcataagagccacgccgcgtctgattccagctgacggggacctgggacttcggcgaaagactcgaacttttcttgacttgccctgccgcctgcattgcgacgagaggaggtcctgttcttggagcatctgagccgactcgcgggcgtttctcggctcgttgcggtagttcaggttctggaagcatgaggttatggtgtatcttcctcttgcctctgctgtgtcagcttgcaggggttcgatcagaggattactcggatgtaactgtcattgttcgcggctctgagacgattgcttcgactagtggcgagtttgtttgcgccaccattgattggtggcctccagagaagtgtaactacgaccagtgcccatggggaagggcttctgtcttaaatttggacttaactaatcctttgttggctaaagctatccaagcctttagtccactacgaatcagagttggaggctccttacaagatcaagtgttatatggcacaccaaatttaggactgccgtgcgacccatttacaaaagtttcgagtggcctctttgagttttctcaaggatgcataaccttggaaagatgggatgatattaatgatctcttcctgaatactggtgcagttgttacatttggtctcaacgcgctccaaggacgacatcagataaggaaaggtgtttggggtggtccctggaattctagcaatgctcgagaattcattgaatacactgcttcgaagaactatcctatagattcttgggaatttggtaatgaactgagtggaagtggagttggtgcaagtgtggcagctgaacaatatggaaaagacctagtcgtacttcaaaccatcgtcaacgagctatacggagattccagcaaaccactggttgtagccccaggaggattctatgaccaaaagtggtttgctcagcttctcgaggcctctgggccaaacgttctcaatgcagtgacccatcatatctacaatcttggtgctggtgatgatccccaagttccaaacaggattttgagcccgcagtatctgagccggacttctgatatattcagaggtctccagctcaccatacagcgccatggaccgtggtctgctccgtgggttggcgaatctggcggtgcatacaacagcggcagccgacttgtatccaatacttttctcaatagcttctggtatctcgatcagctgggtcagtcagcgaagtatgacaccaaagtctattgtagacagacgctgattggcggcaattacggtcttcttgacaccgacacttttgtacccaacccagattactacagtgccttgctgtggcatcggctcatgggaacaggagttctttccttagacatcagtggttctccgtacttgcgtccctatgcgcattgtgcaaagcaaaagggtggcattgctcttgtcttgctgaacctgcaccggaccatgggcttcatggtttcagtcaggaacgacataaatgtcaatctcgcagaagggcaagggatcagaagggacaacgccttcgtccatggcctgaaaaggacggtttcttgggtcgggagcaaagcctctgatggcttttctaagagggaagagtaccatctctcggcgcaagatgggaacccttttgcccggaccatgctgctgaatggagtccctcttgagctcactgaagatggtgacatccctccactgtatccagtggaggtttcagctaactcaccgatctatgttgctcctctgaccattgcgtttgtcgtcttccctgacttcgaggctgaagcttgtggccgttgatcaacttttgttttgacacgaagttttctgatatatgtagtagagatttctaaagaacaaggtcactgtaaagatgtgttcgttttctgatttgtgccccaattgggcctacattttcccaacgaatagtctcctggttcatagttagtagtctcctgatcaatgcctcgtccattgcgtcaaatgcttagcatcaatcaaattccagggaaaactgtgctatcgaacttgctgatgtgcgagtccattacgttttgttcagagcactattgatctttctgctggctaaaattagttaaatcggtgtttttcttctgtaaaatcaatgttggttcaaatgaaatcacacatacaatgtaaaaagtatacaaggtttgctttgcataatcaaaatccatgcttttcacatggtgaaatgtgtatgctcttcatcaattacaataacgatgggactaccatcaacccaacttatattgctccataaaatacaaaagaaccatcctaagcaatatcttaatttcatgagctatgatacaaatggaataaattaaaggaaaagggccctacagtaaatggggaaaaaataacatttcctttctgttcattgaatattctccacagcgcatgtaaccatgttaagggattactgagctccccagttgcacttgataaactccctgctgttgatttccaaaataacgaatttaatttcacttactatatgcttttatatatattgtcaagacaatctaaactgaggctccattatatgacagtttcttatgaattcatttgagtagttcacatattttgtccaaaatggctgaagatgtttaaaaccaatctccagccacggtttactttgcccgttataatgtataactgctgcttgttcaacgctactgacatctgtcttttcctgataacccaagcctaacagatgccatgatggatcaattgggtgaacatggcctttaaaggcaataaggcctggtggcaatgttccaagcctccaaagtgtgaagtttgacttcaagttctgcatgaagagtgagagacaatgaattggcagaaaatatgatataggcaaggatgtccacagtaaaggaaacaatcctacacaagcacaggaatatgaaacaatcctacacaatcctatcagggagatccttgcctattgagaccaactaaccaaacaagaagcaggcgcacaaggcaacaagcctgtgctgtcgtgccacctaaactgcctaaaatagcacacgctaacaaagaggaacaagaatggaagctcatcaatttgtactttcaaatgtaatataggttagactgcagatagtttcaataatcaactgaactagaaagtattcctgataaaatttctcaaatatgcttttgtggtcacttttaagcaaatcagaagacatgtattgatttttttttctttatttggtgtcttttagaactatgctacaggtaaaaagttttttgcaatgaaaagatcttacctccttgacccaatgatgatactgatctttgattgttgtcttcctccatgctttcaggtcaaaaatattcataccatatgcccaagcacactctgaagggtcaaagttttttgcaatgaggggatgagaaaagttgaaataattcctgaacctcttagacatcacccgactgtctccacctatgcaagtctcaacagcaccattaaccttcccagctagatcgatatcccaaagtggtgataggtcatgctggacaacaacatcatcatcaagaaatacgaccttgttgaggcttgggaacaactgcatccaccgattgcagattaaatcagtgtaactttcagcaaaaaaaaaaggatgcaggtcaacaaatataaccacattttgaacaagtttgtaccatatacaattatatatagactacatgcagagaaagctccagatatctcaagaagagggcagcatcacttactccttgatcccagcaggaccagcaaactagaacaggttcacagtgaatagttctacagagcaaaagtctaaaatgctttcaattcttttgcagttttcattgtttcaaaccatccttctatctatataagcacgatacttgtttcacccaacaaaaatggtactaggaaagtaagagatgagaataatagtcaagaaaattctaatacctcaggcaagtatattcgaatatgattgagtacattagtgtatgttggacttcctgcctgcagcttggccgcaaaaacccttgggttatcactagcactggttcttggacggtgacttccatggtaacgatctctagcagtgcgctgagtttctatagcttcaagtacaggaacattttcttttgttaaccaatcaaattggtgaacacctttcacctcaacaatagcaggactgagagaatttaaagcaaaccatgagtgcatggcaggataggtctttttgtcagtaataacatggaaaactattctctcaggtttcagtgatgatctaactgttgatctgaccacaactgaggctgcaaggatgttatctgatgctaaaacaaaatggtaataggagttgtccgaaaga

SEQ ID NO: 218685 - DNA, 4771 bp, Zea Mays
ccaattactgagtactgatcccgaatccccaaccattcgaacgccacggccatccccctcgaatcccctccaactcgaacattccggaatccatggaggccggcccccaaaccttctagagcgtgcttctccggtcgccatgagccgccgcgagccggacacctcccccttctgcgacctctccaacctccgcaccccgagacccaaccccaaaaccgtacctccctcgcctcagttcttcaccgcctccaaatccgccctccaggctcccactccgacgtcactccgccgccggaggcctggcgacggcgtccctaccccgacgcccctcggccgccgcctccacgccctcgaggtcgaccagtcgcgctccgcccgccgcgccgagtccggccgtgagcgcgccctccgtaccttttccgcctccgcctcgtcatggctatccctcctcctacgcgacccctccgcctgcgggtgcttcccagggttcaccggttccgccgcggccgcgcagccctgggctacggggaaacgcggcgcgctcgatggagaccgggcgcgtggggggcgcagcccgaagaggtgccgcggtggtggtgatcgcggcggagagaggagcaaggagatgacgccggcgatggtggccgcgttaagggaatctcttaaggatgcgtgcagcctggaggatgtcacggagaggatggagaaacacatgagtaagggcgcgtgtgaggaggtgctctttatgatgtttcaaatttgtaagaacatcgatgaaggcagattgaagatgaaagcacggtgcccccttgttactgaccttaggctcaaagagaaagcaactagggttttcatgtcctacaatccatattggctcaggattggcttgcatattgttctcggtggtgattccttgctgcagactggacaaggaaaacgggacaaggaggttcattttctaaaactaattttggagaagcatatgctttctcaaatcatgactgcaaaatcatgtggtaacaagaagctggtagaagagcaccatgtacaaggttacagtgatgtgctgggcaatattatattgaaaagaatttttcttcttgttgttgcactagacagaaccaaaatagaaagtactcttcctctcgaagctggaatcgatggccttgatggtggatcccctcttttattttgtcaccaaagtcaaataaaatctagtcgtcaaatcattcaagagtctttgagggagaccatgcatggagaaggtgacattctggtacacctcacaactatgggatataaactaaattatcaacagcctgctttgtcagaatatgatttcacaatgaggaatttatttgaagatctccaagatggcataattctttgtagagttgttcagctgctcctcgcagatgcatcaatcatttcgaaagtaattgttccctcagatacagacaagaagaggcgaagtaactgcaccactgctatacaatatatcaaacaagctcgggttccattatctgattctgatggagtcacaatttccgcggaagacatcgctgctggggataaggagcttattctttcactgctgtggaatatgttcatccatatgcagctaccgttgttagcaagcgcaacctcgctagctcgtgaactaaccaagctaaacgtacatgtaacggaacaacaaatatctgagaacaagccacacatgggtttgctttacaattgggttcaggcaatatgctcaaagattggcatgactgttgaaagttcatctcagttagacagaagagcactgaactgtttcatcaactattatttgaatattgatatttcccccttcaaggaaacaccaactggatgccgaaaggaattgttcacctgtcaccaacttgatactatatcagatatcgctggctggccatccagcgagatggggaaagtactctccgatgttcttcaggcagttgatattccagctagtggcatcctagctgatggtgtattatttgatgagaggagtaccattcttttgctagcattcctatcttcgcatctgactaatgatgaaagattggatcaactaaagaatttgatcaacatgaggttgtacaagagtgcggatactaagattgcagcaagacgtatatctcgaggaaagattgatataaagtatcatccatctcagacagataaaaatgatggtgcatgcaccaaccaggagtgggctgcaactattatacagactcaggccagaagtcttattgcaaagaataaatattgtgagcgtaagaaggcaatatttatcctgcaaggtgctttaagggcatggtcagccatcatctcgaacaggaaccgtagttgtctaagtattgctgcctctattccctggcaagcacaaggaaacaacagatatttcatttttataatggaaaggcatcgatttgttcagatgagaaaatctgccattatgattcaactggctgtaaggatttggattagaggaagaaaaaaatttaagaacagtgattctttcaaaagctgtgagttccttgaaggtaaaactccacccaaaattagtagcattgctccttcccctcaggagcattgtagtggtggagataaaacaatagcttcgcccacagcatgcaagcactgtgagcatgtgctcacagtgagagcttctgctgctgctcctattctttattttgatggcatggacagtctagactcaacaactccactacagtttagcggcaatcaaagcaactttataacttctaccactcagctgtgcaaaagtgagcatgactgtcggtcgtgtgtggttgagaaatccaattcagtttccgtcagtaagcttgtgagtgcggatgacattcagtgcagcagcagtatttgtttccctgtctgcaaggaactagtggctgctcaaacgatacaaagtgcatacagaaggtttttgaacaacagaaacaggataactggtgcaattaaaatccagagccactggcgatgctattcagtacgcaagtgtttcatgaaggaaattcaggctattgtaggaatccaaacatcaataagagtattcttgtgctaccaagcttttcaacgccaccgacttgctgcagtactgattcagcgagttgtcagaggatggctggctagaaagagactgttaggttcctcttcactgcgaacctacacaagactttgtgtagtcgaccaaagtcaaaagagaaaatgttatcaaagccttgagttgaacattgtgctagactctgtcataaggctacaaagatgctggaggaagttcctgctgcgtcagtctgtcaaaacatatgtgatctcaattcagtcttttgtccgtggctggttggcacggaagcaactaaaccaaactttccgttgcatcaacatcattcaaagatggtggcgaaaggttcttcaaacgaggaagcgagctgtgattgtcattcagactcgtttccgtggttgggttgcacgacaagatgctattagaactagaaactctatctgtaacatacagagatggtggagaaaggttttgttccttaaattgaggaagcaagcggcgttagttatacaggctcatttccgtggttggatagcacgacaagttgcttttagaactagaaaaagtattactataatacagtcctatgtcaaagcctaccttgtgaggaaggcttcgaagcaagaagttgcacatataagatctagactgcagaagtcatcttcacaggttgatgatagtatgcgcctgatcaacagactggtgtctgcattgtcacaactccatcgctgtcggagcatacacagcattcgtcaaacttgtgcaacattgagtactgctacagagtattccaagaaatgctgcgagaagctggtcgctgctggtgctgtagatatattgctaaagcaaatatatttgctgaaccgtgggattgctgaccaggaggtcttgaagcaagtgttccttactctcaggaacattgctcgatattcaaatcttagacaggtgttagccagcactgcagaatctgttgaaatcatcttccaggaattactgaggaacaaagcagacggattcttcatcgcgtctgatattctaaaaagcctatgtgaatccaaggaaggccgtgaaaccgtccaagcgctgagtcacctcatcaaaaggctgcgcaatctggtgcatgacctggaaaagaaggtagagcttgataagaggaatgggcgcaccggagccgtgaaggcgaccaacctgcggcggcttcgggaggccgccacactctatcatatcctcaccagtggtacttaacgcgtcggcagcatagctagaaaggctaatctgacgttttgttgtacaataatttagtctaagaaggttttcatgtaactggaggtgactacggtgcaattgtcgaaaaccttcctaggtaaccaggatcttctaagttctgttgctgcagttggttttgtgtggtaggtgtgagaatcatcggcttgatgtattggattacctcttataaagagtgaagtcgctgagttaaccgtcctcacgtgtcttggattaaccgccttttatgttctaacaaatcatcagctcttgatgtgattgttagtatcacataccagtaccaaacagaaaaacgagtcatcctattcattaacttgcagaaatggattttctgaaatagtttttttttgcgtaatatataaatctcaaatcgcggaaggc

SEQ ID NO: 218686 - DNA, 4752 bp, Zea Mays
cccaaacgccaattactgagtactgatcccgaatccccaaccattcgaacgccacggccatccccctcgaatcccctccaactcgaacattccggaatccatggaggccggcccccaaaccttctagagcgtgcttctccggtcgccatgagccgccgcgagccggacacctcccccttctgcgacctctccaacctccgcaccccgagacccaaccccaaaaccgtacctccctcgcctcagttcttcaccgcctccaaatccgccctccaggctcccactccgacgtcactccgccgccggaggcctggcgacggcgtccctaccccgacgcccctcggccgccgcctccacgccctcgaggtcgaccagtcgcgctccgcccgccgcgccgagtccggccgtgagcgcgccctccgtaccttttccgcctccgcctcgtcatggctatccctcctcctacgcgacccctccgcctgcgggtgcttcccagggttcaccggttccgccgcggccgcgcagccctgggctacggggaaacgcggcgcgctcgatggagaccgggcgcgtggggggcgcagcccgaagaggtgccgcggtggtggtgatcgcggcggagagaggagcaaggagatgacgccggcgatggtggccgcgttaagggaatctcttaaggatgcgtgcagcctggaggatgtcacggagaggatggagaaacacatgagtaagggcgcgtgtgaggaggtgctctttatgatgtttcaaatttgtaagaacatcgatgaaggcagattgaagatgaaagcacggtgcccccttgttactgaccttaggctcaaagagaaagcaactagggttttcatgtcctacaatccatattggctcaggattggcttgcatattgttctcggtggtgattccttgctgcagactggacaaggaaaacgggacaaggaggttcattttctaaaactaattttggagaagcatatgctttctcaaatcatgactgcaaaatcatgtggtaacaagaagctggtagaagagcaccatgtacaaggttacagtgatgtgctgggcaatattatattgaaaagaatttttcttcttgttgttgcactagacagaaccaaaatagaaagtactcttcctctcgaagctggaatcgatggccttgatggtggatcccctcttttattttgtcaccaaagtcaaataaaatctagtcgtcaaatcattcaagagtctttgagggagaccatgcatggagaaggtgacattctggtacacctcacaactatgggatataaactaaattatcaacagcctgctttgtcagaatatgatttcacaatgaggaatttatttgaagatctccaagatggcataattctttgtagagttgttcagctgctcctcgcagatgcatcaatcatttcgaaagtaattgttccctcagatacagacaagaagaggcgaagtaactgcaccactgctatacaatatatcaaacaagctcgggttccattatctgattctgatggagtcacaatttccgcggaagacatcgctgctggggataaggagcttattctttcactgctgtggaatatgttcatccatatgcagctaccgttgttagcaagcgcaacctcgctagctcgtgaactaaccaagctaaacgtacatgtaacggaacaacaaatatctgagaacaagccacacatgggtttgctttacaattgggttcaggcaatatgctcaaagattggcatgactgttgaaagttcatctcagttagacagaagagcactgaactgtttcatcaactattatttgaatattgatatttcccccttcaaggaaacaccaactggatgccgaaaggaattgttcacctgtcaccaacttgatactatatcagatatcgctggctggccatccagcgagatggggaaagatattccagctagtggcatcctagctgatggtgtattatttgatgagaggagtaccattcttttgctagcattcctatcttcgcatctgactaatgatgaaagattggatcaactaaagaatttgatcaacatgaggttgtacaagagtgcggatactaagattgcagcaagacgtatatctcgaggaaagattgatataaagtatcatccatctcagacagataaaaatgatggtgcatgcaccaaccaggagtgggctgcaactattatacagactcaggccagaagtcttattgcaaagaataaatattgtgagcgtaagaaggcaatatttatcctgcaaggtgctttaagggcatggtcagccatcatctcgaacaggaaccgtagttgtctaagtattgctgcctctattccctggcaagcacaaggaaacaacagatatttcatttttataatggaaaggcatcgatttgttcagatgagaaaatctgccattatgattcaactggctgtaaggatttggattagaggaagaaaaaaatttaagaacagtgattctttcaaaagctgtgagttccttgaaggtaaaactccacccaaaattagtagcattgctccttcccctcaggagcattgtagtggtggagataaaacaatagcttcgcccacagcatgcaagcactgtgagcatgtgctcacagtgagagcttctgctgctgctcctattctttattttgatggcatggacagtctagactcaacaactccactacagtttagcggcaatcaaagcaactttataacttctaccactcagctgtgcaaaagtgagcatgactgtcggtcgtgtgtggttgagaaatccaattcagtttccgtcagtaagcttgtgagtgcggatgacattcagtgcagcagcagtatttgtttccctgtctgcaaggaactagtggctgctcaaacgatacaaagtgcatacagaaggtttttgaacaacagaaacaggataactggtgcaattaaaatccagagccactggcgatgctattcagtacgcaagtgtttcatgaaggaaattcaggctattgtaggaatccaaacatcaataagagtattcttgtgctaccaagcttttcaacgccaccgacttgctgcagtactgattcagcgagttgtcagaggatggctggctagaaagagactgttaggttcctcttcactgcgaacctacacaagactttgtgtagtcgaccaaagtcaaaagagaaaatgttatcaaagccttgagttgaacattgtgctagactctgtcataaggctacaaagatgctggaggaagttcctgctgcgtcagtctgtcaaaacatatgtgatctcaattcagtcttttgtccgtggctggttggcacggaagcaactaaaccaaactttccgttgcatcaacatcattcaaagatggtggcgaaaggttcttcaaacgaggaagcgagctgtgattgtcattcagactcgtttccgtggttgggttgcacgacaagatgctattagaactagaaactctatctgtaacatacagagatggtggagaaaggttttgttccttaaattgaggaagcaagcggcgttagttatacaggctcatttccgtggttggatagcacgacaagttgcttttagaactagaaaaagtattactataatacagtcctatgtcaaagcctaccttgtgaggaaggcttcgaagcaagaagttgcacatataagatctagactgcagaagtcatcttcacaggttgatgatagtatgcgcctgatcaacagactggtgtctgcattgtcacaactccatcgctgtcggagcatacacagcattcgtcaaacttgtgcaacattgagtactgctacagagtattccaagaaatgctgcgagaagctggtcgctgctggtgctgtagatatattgctaaagcaaatatatttgctgaaccgtgggattgctgaccaggaggtcttgaagcaagtgttccttactctcaggaacattgctcgatattcaaatcttagacaggtgttagccagcactgcagaatctgttgaaatcatcttccaggaattactgaggaacaaagcagacggattcttcatcgcgtctgatattctaaaaagcctatgtgaatccaaggaaggccgtgaaaccgtccaagcgctgagtcacctcatcaaaaggctgcgcaatctggtgcatgacctggaaaagaaggtagagcttgataagaggaatgggcgcaccggagccgtgaaggcgaccaacctgcggcggcttcgggaggccgccacactctatcatatcctcaccagtggtacttaacgcgtcggcagcatagctagaaaggctaatctgacgttttgttgtacaataatttagtctaagaaggttttcatgtaactggaggtgactacggtgcaattgtcgaaaaccttcctaggtaaccaggatcttctaagttctgttgctgcagttggttttgtgtggtaggtgtgagaatcatcggcttgatgtattggattacctcttataaagagtgaagtcgctgagttaaccgtcctcacgtgtcttggattaaccgccttttatgttctaacaaatcatcagctcttgatgtgattgttagtatcacataccagtaccaaacagaaaaacgagtcatcctattcattaacttgcagaaatggattttctgaaatagtttttttttgcgtaatatataaatctcaaatcgcggaaggc

SEQ ID NO: 218687 - DNA, 2728 bp, Zea Mays
cgaagatggtacttccgcggtcgacggcaatgggggctgtgcgctgtggtggtggtcgtggagtcaggaggtggaagagtgagggctagggtttccccgcgtcccgtcgccgtcgccgtcgctctgcaaggtggagagggtgctgcactgctgctgccgtcggtggcggttggaggctggagctcgttcgtcgctgtcgcttccccggcattactggttgtcttgaagaagaagatgatggtgggctcttcccgccaccagctgctgcagaggaaggggaagtccgtggctgacaagggcgccgccgccgccgccgccactgtggcggcagagaaggtggtggtcgcggtgagggcagccacgagggagatctccaagacggccatcatctgggcgctcacgcatgtcgtgcagccaggcggaagcatcatacttcttgtcgtcatcccggcacacagctctggcagaaagttctggggctttccgctgttcgctggagactgtgcaagtggccataagtctatgttggatcagaaatgtgatttatcagagttgtgttctcaaatgttgaagaaaattgatgtgtatgacatagacaagataaatgtgaggtataagcttgtttccggctctccttctggtgttgtagctgctgagtgcaagcaagcacaggcaagctgggttgtgctagacaaggatttgaagcatgaggagaagcgttgtgtggaggagcttcagtgcaacattgttgttatgaagcgatctcagcctaaagtccttcgacttaatcttgtgggatctcctgataaagagtctaaagcaacatgtgcagttccacctgtgctagatggttctaccagtaaaattgcaactgatgttaaggaagcacggagttcaattcgaggacctgttgtaaccccaaatagcagcccagacctggagacacctttcggaagtactgaagcgggaacttcctctgtctcgagttcagaccctgggacatctccgttttctgcttctgaaacaaatggttctctgaagaaagaggtgcaacaaacaaaggataaaattcagcattcagatgctaatatttctgattcagacagtgaaacattgagccctccagcaaatttctcacttcagccatggatgtctgatattctacagggaccagcatcgtcaagatcacttggaaaagttccacgaaaaaatcgcactgcaactgcagatgttttgttggaaaagttttccaagctggatctcctgaatgaaattaatgctatgagaagcaggtcagacttaaacttccgaggagatgtcagggatgttgttttgttggcaaggaatgcacctcctggaccacctccgctttgttcaatatgtcagcacaaggcacctgtttttggaaagcctcctcgctggtttagttatgctgaactggaacttgcaactggtggtttctcacaagcaaacttcttagctgaaggtggatttgggtctgttcatcgaggtgtccttcctgatggccaggctattgctgttaagcaacacaagcttgctagttcccagggtgatgttgagttctgctcagaggtggaagttcttagttgtgcacaacatcgaaatgttgtaatgctgataggtttttgcgttgaggacagaaggcgtttattggtttacgagtacatctgcaatagatctttggattcacatctctatggtcataatcgagaaacattggagtggactgcacgacaaaagattgcagttggtgctgctcgtgggctgcggtaccttcacgaggaatgtagggttggctgcataatccatcgtgacatgagaccaaacaacatccttgtcacacatgatttcgaaccactggttggagatttcggcctggcgcgatggcaacccgatggagacatgggcgttgaaacaagagttatcggcacattcggctatctggctcctgaatatgcacagagtgggcaaataacagagaaggctgatgtatactctttcggggttgtgttagtggaacttgtcactgggcggaaggctgttgacattaaccgaccaaagggtcagcagttactaactgaatgggcacgcccattcttggaggagtatgcaattgacgagctcatagacccacgactcggagagcgctactctgaaaatgaggtgtactgcatgctgcacgcggcaaacttgtgcataagacgcgacccacattcaaggcctcgcatgtcccatgttcttcgcattcttgagggtgacatggtcgtggaatctggtggttctgttactggcagtagtgattctgggagcagaagctggaggatgctgaacgaacagcaacattgccaggagtacagtagcccggctcaacaagagtcgcaaagggcaggcgaggggaaacgctcctacagtgccttgagggcctcttgggaccgagacaagcagagtatctccaacagatattagtgccgtctcataatgcagtgcagctgagattgtttagtcctgtattattccttcgccctacctcccggtctcaattttttttggcttgctcttttgtcttcacttcgtagcaatttgtaggccgaaagcttttgctgatacattgccctggtgtatagtagaaatgggtaataggtttacaagtatattgagctgcaagttagaccctctccaacaaggactcgtaaacgcactacaccaa
